United States Patent Application Publication US 2006/0123505 A1 - sequence listing, part 10

SEQ ID NO: 16783 - DNA, 3853 bp, Oryza sativa
  ref <308>: DATABASE ACCESSION NUMBER: AK067256
  ref <309>: DATABASE ENTRY DATE: 2001-12-06
ggtgcatttggccccctctcccctcctgtctgtcccccaccattattccctccctccctcccttcattttttgtctgttccaatctaccaccatacttactgcactgcgacctcaccacactgaactcaagtcagtaatactgccattgtcaagagggagctctagctttcctttcccaaaggcagaggcagcagcgtggcgtgcattcacttccctccctgtccagtactccagtccataacactgttggctgggtgcctgcatgaatgaattcagtaggagtagctcagtaggtcgacacacaccaggtgtaacttcttgagcttttctcttgcaacagtactggagtagcatagcaagctgctgctgctgagtagctagggagtaggagtagataatagtaggcgcgcgtaggatggtgtggaagagctggggcggcgtcgtgtttgcggttgcggcggcggcggcggcgctcctgtgctcctccgatgctgccgatgacgtggtctccgtcagcttctccaagacccctccccgcgtctccaggtcggcgtcggccgtcttcaccttccaggtcctgcacaccaatggatcaggcccgtgccaggattgcctcatcacctgcaaggtggacggggagagggcgtgggagtgcggaagaaacagcagcagcagcaacgggacagcggtggtgaggtactcgcggctgaaagacggcaaccacaccttggctgtgtgcgcgggtgcgggacgaccaccaacaacaacaacaacaacaacctgcgccacctacgcctgggatgttgacacggttgctccgacggcgtccgtgaaggcggaggcggggttcacgagcggatccaacgtgtcggtgctcgtctccttctccgagccctgccccggcggaggcggattcacctgcaacgccacctactgccatctgagcgtgtacggtcccgggcgcgtggatccgtcgagtcttcaggtcctccgccctgccctgcaatactccgtccacgtcaccatcccgccggagttgctctatggccgcctcattctcgtcatggccaagggcttctgcaccgatgctgccggccaccacttcatcagaaccgccaactctaccttcaccctgcgcttcgacagacggagcgactcgatgaacatcggcagcagcatccctgagaagctgcttcagatcgagggcgccaccagggtggtggaagccaccaacgacgacaaggacctcagggtatacctctccttcgctgaacccgtcatgaattcttcctcccaaatcctcgccgctctcaccgccaccgatgccattctcacgccaaccaaccgaagcacgctcgggaatcgccgctttggatacctcgttaagaggacatccaacaccgccgttgtcactgtttcctgtgacgggaattccataatcagcagacaaggaactcctgtttcttcttcagagccatacacttttctttacgataatcaaaggccttctgttaagctggcgacatccactgtcagaacaagttcacgcaacatcccggttttgataaagtttgcaaagcctgtcttcaacttcacttcctctgcggtgcaggtttccgggggcaatctcctcagcttccatgaagctagtaagagcatatacacagcgcagatacaggcggttgataatctggtttcggtccacgtcgccgagaactctgctcaggacgttgcaggaaataccaacttaccgtcagatcgtctggaagtgaggcattattctgttcctgcatcatcatcatcgatcgcgatcgtgacgacggtaatttttacagcaaccgcagcattcgccacgctgctgactgtttcaacatcgtcgctactggcatcaggtgtcatccagaggccgccttcttacctcgtatccgagccatcacgaaatctcttgagaatggcgtgccacattcaggtattcgcgctgtcgcggtggctgtcgataaatctgccggtggagtactacgagctgagcaaggggctggagtggagcatcccttacatgcgcctcccatgggaaggcccctctgccgatcctttcgtcggctactccaccatgcccgccatcgcctactccgagatgctcgaccgcaccgctctcgccgccgacgtcctccgccgccctcctgcagctccaggagttgcaatggccatgccgtcgacgtcgccattggacggcaagcctctcaccgccatggagtaccggtatctgttcgagaaccaggacatgaagcccgaggcgcagatcatcatgaagctgcaggatctggacggatggaagtacttcttcaggaacatcttctggctggccgtcatcgctgccgccttcctgctgctgcacgccaccctcctcctctacctcaagctgcgccacaggcacagccacacacacgtcggtgcgctcgtgttccccaggctggagctgatgctcgtcatcctcgccatgccctgcgtgtcccaggcgtcggcggcgctgatccgaggcggcacaacggcggggctggccgtcgggatcgtgctgacgggggtgctaacggcgttcctggtagcgctgctgctgttcctgtcgctgggcgtcaccacggggaggctgctgcagtacaaggaggtgcaccaggaggggcgggagtaccactggtaccaggagattgttcgccggacgctgggacccggcaagcgtggacagtggacgtggaaggaccccgcccgcaccgcctgcctcgtcaagctcggcccgctcttcgaggacctgcgcggcccgcccaagtacatgctctcgcagatcgccggcggcagcggcggcaagcgcgcggcggagcggatcatcgtgtccgacgacgagaacgaggacgccgaggcgccgttcctgcagaagctgttcggcatactgcggatctactacacgttcctggagtcggtgaagcgggtggcgctggggatcgtggcgggcgcgcacgcgtcgtcggaccactcgtcgcgggcgcacgccgtggtggtgctcgccatcgcctccttccagctcttcttcatggtgctcaagaagcccttcatcaagaagcgggtgcagctggtggagatcgtggcggtggcaagcgaggtgttggtgttcgccgcatgccttcggctggtggacagcgggggcagcgccgtggcggaggggagcggggtagggctggccatgctgacggtgttcgcggtggcgttggcggcgcaggtgtgcaacgagtggaacgcgctgtaccggcaggtgcggctgctgagctcggacaggaggtcgttcgtggagggcgcgaaggcggcgtgggtggggctgctgctgctggtgctgccgtcgtcggcgcttggagagcagctggagaagatgaagaagcagcaggagcagccggaggcagtggcactgggtggtggtggtggtggcacggagaggtcgtggctggggcagctgagggagatggccaaggcgagcttcagcaaggagggacagggaggggaggcggaggcgtcggggagcagagcaaagggtgggagccggagcatgtcgtcggtggcgtcgtcgtcggactccaaggcgaagggacccgagaactcgcattcgcagtggagctccaagtccaagggactctacaaggatcttgaggccatcttctccaacaggtagcagatgggtacggcagcagctacaatatatactatgttcttcgtgtatgtatatgtactagtatagcaatcaatcattcaatgtatgcaagacgatcaatccagcgatgaagctggtgatgtccctcttcttccctgtcc

SEQ ID NO: 16784 - DNA, 1072 bp, Oryza sativa
  ref <308>: DATABASE ACCESSION NUMBER: AK067257
  ref <309>: DATABASE ENTRY DATE: 2001-12-06
gacaagcacccacaccaaccaaagatgagcaacaccaccatggctatttccaccatccttctcttcctcctcgccggcctcgtcgccgcccacggcgacggcgacaccatgatccgtctcccaagcgacggcgccgaagcaccaccacgcccgcccaaaccctgggactgctgcgacaacatcgagatgtccccgctcgagatcttcccgccgctgtaccgctgcaacgacgaggtgaagcagtgctccgccgcctgcaaggagtgcgtggaggcgcccggcgacttcccccgcggcgccttcgtgtgccgcgactggtactcgacggtggacccgggccacatgtgcacggcgccggatcagccgacgacgaagaggccgtggaagtgctgtgacagcatcgtgcagctgccgcagaggatcttcccgccgttctggcgctgcgacgacgagctggagcccggcaagtgcaccgccgcgtgcaagtcgtgcagggaggcgccggggccgttcccggggccgctcatctgcgaggacgtctactggggcgccgacccgggccccttgtgcacgccgcggccatgggggaaatgctgcgacaaggccttctgcaacaagatgaacccgccgacctgccgctgcatggacgaggtgaacaagtgcgccgccgcgtgcaaggattgccagcgtgtggagtcgtcagagccgcctcgctacgtctgcaaggaccgcttcaccggccagcccgggcccatgtgcaaaccccgagcggagaactagctagctacagatgatcgatgatcgatctgtgtgtccatcaataaaactcgccctagcctgcagctagctgatcgttcgttcgatcattcagagttggtatagctagaggctagagcttagctccatccagatttttcagtgctctgcagcttttgtgcatcttgcatgccttgttagtttgtgtgctccatgtgtgtgggtgtgtttaatttgtccctgttcgcttgtgtggaccaagagggaaaataaaatatatatgcaacgcaagcatgcacccatgttgagttgtctc

SEQ ID NO: 16785 - DNA, 2438 bp, Oryza sativa
  ref <308>: DATABASE ACCESSION NUMBER: AK067258
  ref <309>: DATABASE ENTRY DATE: 2001-12-06
gctctctctctctctctctctctctctctcttcttcgctggctcgcgcaaatcgaggccttccgctcgagctcgcgtcgcgcggcctcggcctcgcctcactccccctccccctctcccacgcgccgcccgccgccgtgaccggaggcgagcgagcgcgcgcccgccgccgccgctccccgccgccactggatccgccacccacgatcctttcagccgaggaagcaagaatttcggctggtcctatatgaatcctcggtcccttgtatactagagggcagtaggagtttggatccaagatgaggggcagaagcgatggggggcagagcaagaggcccatcttgctgctctgcgtgatggtcgtgtgcctctgcctcctcttcttgtatttctctggctccaatgggcaggctgggagtgccgcattagagtacgggaccaagttctcgcgctcactcgggtggggaagtgatggggacggtgacgacggctcggaggagtccatatttggcaccggtgatgcagatgatgttgagctcaagagctttcctgtgtgtgatgaccggcattctgagctgatcccctgcttggataggaacttgatatatcagatgaggatgaaactggatttaaacctgatggaacactacgagaggcattgccctcctcctgaaaggcgcttgaactgcctgattcccccaccacatggctataaggttcccataaaatggccaaaaagtcgtgatattgtgtggaaagcaaatattccgcacactcaccttgcacatgagaagtcagaccagaattggatgattgatgcaggtgagaaaatcaaatttccaggtggtggaacacatttccatcatggagctgacaaatatatagcaaacatagcaaatatgctaaagttcaaagataacaatattaacaatgagggaatgcttcgtacagttcttgatgttggttgtggagttgctagttttggaggatatcttctttcatctaatgtgatagctatgtctttggcacccaatgatgtacatcagaaccagattcagtttgctcttgaaagagggatccctgcatatcttggtgttttgggaacaaaaagacttccatacccaagtagatcattcgaattagcccattgttctcgttgtaggattgactggcttcaaagagatgggattcttctgcttgaactggacagattactcagacctggaggttattttgcttattcatctcctgaggcatatgcacaggacgaggaagatcgcagaatctggaaaaaaatgagttcccttgtagagaggatgtgctggaaaattgcagagaagagaaaccagacagtcatctgggtcaagcctctaaacaatgactgctacaggagccgagcacctggtacaaatccacctctatgcaaaaggggtgatgatccagactcagtatggggagtgcaaatggaagcttgcattacgccatatccagaacaaatgcacaaagatgggggaactggactggctccttggcctgctcgattaacaactccgcctccccgtcttgctgatttgtatgtcactgctgacacatttgaaaaagatacagaaatgtggcaacaaagagtagataactactggagattgttaaaaccaaagataaaaccagacactattagaaacatcatggatatgaaagcaaactttgggtcatttgcagctgctctcaaggaaaaggatgtatgggtcatgaatgttgttccacatgatggaccaagcactctcaagataatctatgacagagggcttataggttctactcatgactggtgtgaagcattctcaacctatcctcgaacatgatcttctccatgcatggacagtcttctctgaccttgacaagagaggttgcagcgcagaagatctcctgcttgaaatggaccgcatcgttaggcctagtggatttatcatcgtgagagacaaggacactgtcatcgaattcatcaagaaatacctcaacgcacttcactgggaagcagtaacaactgtagatgccgagtcaagtccagaatctgaggagaatgaaatgatcttcataatccggaagaaattgtggcaaccaggaggctcacaggacctcaaccccaagtagtctcttcttttgagtccctttcgcactgtgagcatctgcagctcagaagccaagaagcgaggctcggctgctccctcagatacgattcaatgtcgaaaccgctcctgaaatagattccagttcgtgattcctagtctacccacgtgaagatagataatttatcagcatatggcaaatgtctagcaggctaagcgaaggcctattttttgtttctacagatactgcaattgttaattgatgtttgttctctagtcttgttaggaaataaagataattctttttgtcgcg

SEQ ID NO: 16786 - DNA, 3596 bp, Oryza sativa
  ref <308>: DATABASE ACCESSION NUMBER: AK067259
  ref <309>: DATABASE ENTRY DATE: 2001-12-06
ttgcccccaaaagcaacacagggcattcgctcctctcctccgcggccagactgcctctctctctctctctctctccccacctctccgcaagtgaagcggcggccgcgcgccgcgcgtggtgagctcttctagggttttctcgtcgccgggtcggtgtcatctctcctgcgagctaccgcggcggacatggagtccgcgtcgtcttcactagcgaccagcgggcggcgccgcagcagcagcggcggcggcggcggtagctggggcagcatcggctccgccgccgacccgttcgacatcccggctaagggtgctcccgtcgagagtctcaaaaaatggcggcaagcagctctagtactcaatgcatccaggcgctttagatacacattggacttgaaaagggaggaacaaagggaggaagttataagcaaaattcgtgcacaagctcatgttgtcagggctgcattccgctttaaagaagcaggacaagtccacgttcagcaaaaggaggtggcagcaccgccagttgatggtgcactgggctttggtatcaaagaagaccaacttactgcattgaccagagatcacaattactctgctctacaacagtatggagggatttctggggtagcgcgcatgctaaagacagacacagagaaggggattagtggagatgattcagatttgactgcaagacgaaatgcatttggatcgaatacataccctcgtaagaaaggaagaagcttcctggctttcttatgggatgcttgtaaagatttgacacttatcattctcatggttgctgcagcagtatcacttgctttgggcataacaacagaggggataaaagaaggctggtatgatggagcaagcattgcttttgctgttctcctagttgttgttgttacagcaactagcgattacaagcaatccttacagtttcaaaatcttaatgaggaaaagcagaacatcaaattggaggtggttagaggtggaaggcgaatctcggtatccatttatgatttggttgctggtgatgttgtgccacttaaaattggtgaccaggtccccgctgatgggatccttatcagtggtcactccctgtccgtagatgaatccagcatgaccggagagagtaaaattgttcacaaagatcagaaatcaccattcctaatgtctggttgtaaagttgctgacgggtatggcactgtgctggtgaccgcagttggcattaacactgaatggggactgctaatggcaagcatttctgaagattctggtgaagaaacacctttgcaggttcgcttgaacggtgttgccaccttcattggaatggttggactttctgttgctctcgccgttcttgttgtccttctggccaggtacttcactgggcatacctataacccctgatgggtcagtgcaatatgtgaaaggaaaaatgggtgtaggccagacaatacgaggaatagtaggaatatttacagtggcggtaacaattgttgtcgtggctgttcctgaagggttaccattggccgtcacgttgacgcttgccttctctatgcgcaagatgatgagggacaaagctctggtcaggaggctctctgcatgtgaaactatgggttcagccacaacaatttgcagcgacaagacaggaacgctgactttgaatcagatgactgttgtggaggcttactttggtggaaagaaaatggatcctccagataatgttcaggtgttatctgcttcaatctcatcattgattgtcgaaggaattgctcagaatacgtctggaagcatatttgagcccgagaatggtcaagatccagaggtgactggatcaccgaccgaaaaggctatactgtcttgggggctgaagcttggcatgagattcaatgacacaagaacaaagtcctctattcttcatgttttcccattcaactcagagaaaaaaagaggcggggttgcagtgcatctgggtggctctgagtctgaggtacacatacactggaagggagctgcagaaattattttggattcatgcaaaagctggcttgctgcagatggttcaaagcattcaatgacacctgagaaaattagtgaattcaagaaattcatagaagatatggctgcttcgagcctccggtgtgttgcctttgcttatagaacatatgagatggttgatgtcccaagtgaggaccggagggctgattggatattgcctgaagatgacttgattatgcttggcatagttgggataaaggatccttgccgcccgggtgttaaagattctgttcggttatgtgcagcagctggcattaaggtccgcatggttactggagacaaccttcaaactgccagagccattgccttggagtgtggaattttatctgatcccaatgtgtcagagccagtcattattgaaggaaaggcttttcgtgcactgtcagatttagaaagggaagaagctgcagaaaagatttcggtgatggggaggtcttcaccaaatgacaagcttttacttgttaaagcattaagaaaaagaggtcatgttgttgctgtgactggagatggcacaaatgatgccccagctttgcatgaggcagatataggtctctccatgggcatccagggaactgaagttgccaaggagagttctgatattatcatcttggatgacaattttgcatcggtcgtgagggttgtcagatggggtcgctcggtttatgcaaacattcagaaatttatacagtttcagttaaccgtcaacgttgcagccttgattattaacgttgttgctgctgtcagttctgggaatgttcccctgaacgctgttcagctactgtgggttaacctaatcatggatactctgggtgctcttgcactggcgacagaaccacctactgaccatcttatgcagagaccaccagttggcagaagggaacccttgataacaaatgtcatgtggagaaacttaatcataatggctctgtttcaagttatagtcctccttactctcaactttaggggcacaagccttttgcagctaaaaaacgacaaccaggcacatgcagacaaagtcaaaaataccttcatattcaatacatttgttctctgtcaggtgttcaatgaattcaatgctaggaagcccgatgagctgaacatattcaagggcattactgggaaccatctctttatggccattgttgccataacagttgtactgcaggcgcttattgttgagttccttggcaagtttacatcgacaaccagactcacctggcagttgtggttggtgtcaataggtctcgccttttttagctggccgttggcatttgtgggaaagcttatccctgtcccagagagaccattaggagatttctttgcatgttgctgcccaggaagtaaacaagctgctgatgccaagggtgatgacgctgatcacagcgatgtatgaagctacggatcagagggaaacttgtgccaaggtttacttttaacatcattaaggtgtaattaactgctatcaggattgtacatacactatgcttcacatggataggtctgattacctttggaaaattgtggcactatcaacc

SEQ ID NO: 16787 - DNA, 1615 bp, Oryza sativa
  ref <308>: DATABASE ACCESSION NUMBER: AK067260
  ref <309>: DATABASE ENTRY DATE: 2001-12-06
gctcttccctcctctcgcctccaaatcctctcttcctcttcacacacaggcgttgccgcagagacagcgagcgagcgagagagcgcgaggcggaggtgagtgacgaccatgcaggcggtggtggcgaacggcggcggcggggacgtggtgcagaagccgcagcaggtggtggcggcgccgccgccgccccaggcggcgctgccgccgccgcctcattgggtggccatgccgttcgcgcccccgggggcggcggccatggtaatgcagcaccagatggcgccggcgccgccccagttcgccccgcacttcgtgccgttccacgcggcggcgggcaggaggggaacaagaccatctgggtcggcgacctccactactggatggacgagaactacctccacagctgcttcggctacaccggcgaggttgtagcaataaaggttattcgtaataagcaaactggacaatcggagggttatggatttgtagagttctacagtcatgctgctgctgagaaagtacttgaaggatttgctggtcatataatgccaaacactgaccaaccttttaggataaattgggcatcatttagcatgggggacagacgttcagatattgcttcagatcattccatatttgtaggcgaccttgcttctgatgtcaatgataccacattactagagactttctccaaaaggtactcctctgtcaaaggtgcgaaagttgttattgatgctaatactggtagatcaaagggctatggttttgtgagatttggagatgataacgagaagacacatgccatgactgagatgaatggtgtgtattgctctaccaggccaatgagaattggccctgcaactcccagaaaaacctcaggtacttctggacctactggttcagctgctcgatcagatggagatttgacaaacacaactgtatttgtcggtgggcttgatccaaatgttagtgaagatgaccttaggcaaacattttcgcaatacggtgaaatttcatcggtaaagatcccagttgggaaacagtgcggctttgtgcagtttgttcagaggaagaatgcggaagatgcattgcaaggactgaacggaagcaccattgggaaacagaccgtgcgtctttcgtggggacgcaatccagcaaacaagcagttgaggagtgacaatggcagtcagtggaacaacgggatgtactacgcagcctcgccgttttacagtggatacggctaccctgcaccgttccctgctgatccgggcatgtacgctgctgcttatggcgcctacccgttctacggaaaccaacaacaagtgagctaagaggtcacttgtgcttcacctcaaactggagctaggcacgcaagcattagcagtagctcttgctagaagaaaaaaagaacaaggtagacgacggtttcctaggtcagctagatgcagtcactggttatgtaaagtacattactacacgaactagctagcgccactaagccgccctattgactggccatggtctgctgaactcttcttccagaaaagaagttttgacctggagctgcaccttattgaagtagaacaataaactattcaaatacctactgtgcgctatc

SEQ ID NO: 16788 - DNA, 2720 bp, Oryza sativa
  ref <308>: DATABASE ACCESSION NUMBER: AK067261
  ref <309>: DATABASE ENTRY DATE: 2001-12-06
gtgtcaagagcggaagagctcgacacatctctccgatccccatttcgccttctgctccggtgagctccgatctgactgcgcgtggggggaatcgatggggtccatggcggcggcggcggaggcggcgcaggaggaggagacggtggtgttccggtccaagctccccgacatcgagatccccagccacctcaccctgcaggcctactgcttcgagaagcttccggaggtggccgcccgcccctgcctcatcgacgggcagaccggggcggtgtacagctacggcgaggtggaggagctctcccggcgcgcggcggcggggctgcggcggctcggggtggggaagggcgacgtggtgatgagcctcctccgcaactgccccgagttcgccttcaccttcctcggcgccgccaggctgggcgcggccaccaccaccgccaacccgttctacaccccgcacgagatccaccgccaggcgtcggcggcgggcgccagggtgatcgtgaccgaggcgtgcgcggtggagaaggtgcgcgggttcgccgccgaccgcggcatccccgtggtcgccgtcgacggggacttcgacggctgcgtcgggttcggggaggcgatgctggacgcgtccatcgagccgctcgacgccgacgaggaggtccaccccgacgacgtcgtcgccctcccttactcctccggcaccaccggcttgcccaagggcgtcatgctcacccaccgcagcctcgtcaccagcgtcgcgcagcaggtggacggggagaacccgaacctgtacttcaggagggaggacgtggtgctgtgcttgctgccgctgttccacatctactcgctcaactccgtgctgctggcggggctgcgagccgggtcggcgatcgtgatcatgcgcaagttcgacctgggcgcgctggtggacctgacgcggaggcacggcgtcaccgtcgcgccgttcgtgccgcccatcgtggtggagatcgccaagagcccccgcgtcaccgccgacgacctcgcctccatccgcatggttatgtccggcgccgcccccatggggaaggacctccaggacgccttcatggccaagatccccaacgcagtcctgggacaggggtatgggatgactgaggctggacctgtgctggccatgtgtctggccttcgcaaaggagccattcgaggtcaagtccggctcgtgcgggacagtcgtcagaaacgcggagctgaagatcgttgaccctgacaccggcgccacccttggccggaaccagtccggggagatttgcatccggggagaacaaatcatgaaaggtagtatatcactttctttttttcctcttcatataatcattggtatcatctcggcgaaatcaatcattcatcatcttccccgtgtttatgggcacgctagtgcgtgtactactacttaattcagggccgttgctttggagcgtcactagccgttaattaagtcagtcacctaagagtgtgggtttaggtttgtagtgttatgacctgatgacatcattatcacaccttttttttggcttaattacttataggataggaacgagcaggtacaatagcagactattagccagctataaatatattttaatgaaataaaagatgagagaagagcagcgggctatagatctgtagccagctgcagcacagattccaagacgcaatgtgtgaatgacaggtgggaccatatattaatagtatagtaagcaattattgtatgaattggctattagattggctatagatgaattggagctagcagtaggctatactattaaacttgctctaatgcgatgaaccttgttcactagtcgtgaccaataaaaatttctttgcctttgcttataggcctaggtagcatcgaaatatcgttttctttatatagtctggttccaattccatgattccatcacacaattattggtctcttttctcccaaataactgttcatagacatcgtttaacttcctggaattgcatattctccagtactttgagaataggaacgccttgtcatcagtacatgtgtccttttctgttggaactgtactgttacagtggctctaccttagtttctgtagcaaagaatagactaatctaacgtttcatgtagtagttgccaccaattttttttctccctttcgcaaagccgccctctgttgctgtagttgaatgcagtttggttgctcctcctcctacatcctaactactaccacgtattcccttccaagacacgattagcaagcgggagctagcaaagcacatggttgttggtatccagctgatatgcaggcacgttggtagcaaatcatcctcagttcgcgggacagctctcatcatgcaggcaaccactacaatgttcgcaagtagaagctgaatcagcaagggaactcttaacccttttgatgagattgagatggcaagaagctaccgttatcctgcaacacatcttgaccaatgctatcactattacacctaacttggaaccacatagcaaccttgtctggttctcaccttcctgagcctatctcttgattgcttgtgtggagaaagggtgagcacctatcctgacctgcttatgtcatagtcaaaggttgctacctgcttggacgtatgtatgcaaggtgtaacaatattatatgattctaatatggtagatctagtaatatactagtactagattaaaaggct

SEQ ID NO: 16789 - DNA, 2329 bp, Oryza sativa
  ref <308>: DATABASE ACCESSION NUMBER: AK067262
  ref <309>: DATABASE ENTRY DATE: 2001-12-06
gattgctgatttcagtataattcgtcagcagcagaactggtcatctatataagtacataagcaaaaacgatcattcgaccccacacgcttcctgatcgcttctggcaatggggcatcctgtcgtcgccgtcgccatcgtcttcgtctccgccgccatcgccatggcggcgagctcccagtactcccaccacccgctcgacccgctcaccgccacggagatcaccgccatccgcgccgccgtgctcgcctccccgctcgtgccggcccgcccgcttttcttccactacgtcggcctcgacgagcctgacaagccggacgtcctctcctacgcctatggcgccgccgacgccgctgccacctcctcccaaatgaccctgccgcgccgcgcgttcgtcatcgcgcgggccggcggccagtcgcacgagttcaccgtcgacatcgccgccgacaacgcgtccgtgctctcgcacgccgtccaccgcgggcccggcttcccgatgttcacggacgaggaccagatcgcggccatggcgctgccgtacacgtacccaccgttcgtggagtccgtccggcggcgcgggctggacgtcggcgaggtcggctgcggggtgctctcgagggggtggttcggcgccgagcagccggcgtacggcggcgccagggtggcgaagatgaagtgcgtggtggtggactacaacgccacggcgaacatctacgcgcggccggtggaaggcgtggtgatggtggtggacctcgaccggatggccatcatcgggtacagggacagggcggtgttcacggtgcccaaggcggaagggacggactaccgggcggacaaggtcgggccgccgttcacgggaccggcggcgccgcccggcgtggtgatgcagccggagggcagggggttccacgtccacggccatcttgtcaaatgggccaactgggagttccatgtgggttttgacatgcgcgctggcacggtcatctctctggcctcggtgaacgacaccgatgccggtgggctgaagcggcgggtgctctaccgcggcttcgtttcggagatcttcgtaccgtacatggatccggaggaggagtggtacttccacacgttcacggacgccggcgagtacggcctcggagccttggcgtcgcagcttcagcgtggtgccgactgcccagccaacgctgtctacatggatggctactacgccggctccgacggcaagcccgtgaaagccgaggacgtgatctgtctgttcgagcgatacgctggtgatgtcgcatggcgccacaccaatggcattgggctgggcggattgttctcggaggtccggccggacgtgaccttggtggtgaggatggtggtgacggttgggaactatgactacacattggactgggagtttaagaccgttggctccattaagattgtggtgtctcttagcggtatcctggagatgaaggccataaactacacgcacgtcgaccaaatcagggaagacacacatggcacgctgatcaccgagaacaccatcggtgtctaccatgaccactttgttacctaccacctcgacctcgacattgatggcacccggaactctttcatcaaaaacaacatcgttcctaagtgcaacactggcgttcgtgcaaccggcggtgctcccacaccgaggaggagctactggacagtactatatgaggttaccgagactgaggcggaaggccaggtgaacattaatagcgctcctgctgacctcctcttcgtcaacccgagcaagaagatgaagattggcaatgaggtaggttaccggctcattccaactggtgcgacagcaacgtcattgttggccgacgatgactacccggagcgccgtgcaagctacaccaagaagcaggtctgggttacgccgtataacaagtcggagaagtgggcatccggattatacgccgagcaaagcacgggagatgacaacttggccgcctggagcaagaggaacagaagtataaaggatgaagacattgtactgtggtatacggttggtctgcaccatgttccgtaccaggaggacttcccagtgatgccaactatcagcggtgcattagaggtccgtccatccaacttcttcgagaggaacccgcttatcagaacaaagccacccgaaaactccccaaactgctcgtgcagcattggaggatctgcttaatgtgattgatgctgccgtgcatcttatttatatttaagacatcttgtgcgtctatgattcgatatagcggaccattggggagacattgttcgccttttgtccaataatttttatttgatttgatc

SEQ ID NO: 16790 - DNA, 2524 bp, Oryza sativa
  ref <308>: DATABASE ACCESSION NUMBER: AK067263
  ref <309>: DATABASE ENTRY DATE: 2001-12-06
gagatatagcaaagaaagaagttgtcaccaagaaggtgaaaagttcaacaccatggttggagacaactcatatgatacttgaaagctttgcagaaaatggcgacttggtaaatgcaaagagagtttttgacgaactgaatgaatcaaagtactgtaggaattcatttgtgtataatacccttcttaaagctcatgtaaaggcaaaagtttatgagccagatttgttaagagcgatgattttgagaggagcgatgccagatgctgaaacatacagcctactgggattgatagagcagttcaagacataatgaacctgtacacaaactagctattgtagctgtgaaggagtttgaaatgatatatactgaactgagccatacaacaaccggtggtaacatgtgaacattttggcacataatcattcaatattccaattgtcatactgatggtatcgctggtattcatggtgcatgatcagtgtctgaagatgagcacaaatcattgctgaagtgcaggcctcgcagctacctttgttatcctgaacatctagcacaaggggtggattcagaaactcttgacctcctaccttgtgctggccctcccgctataacacccacggtgctagaagtcgacgcttgctccacagatgatgactgttggggagcgacagcagcagccggtgcagcaccattagcatcaggaggtggcaaaggagcctgattgccactcccagcatcagcattgaccacctgctgctgtgttgctggtgcagaaggcgcatcttgtcttgcctgccttcgacccctaccccttggccggggtgcagatgaagccgcctggcctaccactatatcttggttttgcatcaaccgcctcaccatgtttgcaatgcctcctcttgtgtctggcctttgcagctgctgcctcaagctctcggtcctctgcgcactcggcctgggagggatttggatatcatttctggaggagttctcctcgccacctcctcttccataaatcggtgtgacgtttacttcgagcacctcgcccttgcagacagggcaatcagagtgctctgaatgtccatgaagccactggtatatgcaaggccagcagaagaggtggccacaaggggtaaccacaggatctttagctgattcaaagcagatattgcattcgaagctgccgttgcatccgcaaccgtcatccttcttggtggcatcactgccatcaccatcaagcatctgcctccttgatgcctcaagagaattatgagacctctggatggcccgcgccagattatcggcttccgggctattcgcccgtcggctgcggctcactggcccagtccccgccctcccattcccgacgccgtgttgatcgctcacctggatcaacctccgcagccgattctccggcgtcatagggcggcttgcagcagcaatctctgctccccttataagaccagtaggtgggattgctccaccggtctgcacaagcatttccaacgctgcacaagcaaaaatctgtggcagcgtcgacgaggccctggccatgtacgatggcgtctcgagcggcggcaccggctgctgctcaccgggatcaacaagccacgctgcaacaggatctaccagcacctgctccggcgctgacagcgcgttcgacggcgagtacgccgccgccgccggaggcggtgccgccaccaccaccgagcccctttgctcgttcgccaccgtggcggcggggttcagcagcagcgacgggtaatcggcggcgacatccagccttcccggaggcggcggcagcggagggaggccgagatacaggttcagatccatcgggcccctcctctcgcccccgcccgcagcagcagcagccgacgactccgccgccatgccccccaaccagcaaaagaaccaaagctaagcggatccacccgagaccaaaagggctcgaaagaaacggaatctttagcccaaaaccacccacaaatccccagaggatttccccggcggccgacgtgatcgatcggcacggcgacgagccgttcttgctcaagaaccacccagcgtgggggattgattgattgattcctcccgctaccgatagctccagcaagtcggagagatcaccgggagggggaattcggcgagggacgccatgagagggcgcgccgaattacggaggaatcatgtggagatttggggattttttttttaggaaatgggaatgtggaggaagaagaacaggggagagaagtaatagccgcttcttggggttttacttgggaagaagtgatgactgatgactatgaagtgaggttggaggccaatatatagggttgggcgaatttattacttctaactttggaagatttagatgtagggtatattaaataaatgaattaatgatttctaactttagaatatttagatttaggttattatataggggccatttattgtactcatattaaataccaattcttggttttttatttttttttcttgtatatcttatttttatt

SEQ ID NO: 16791 - DNA, 1062 bp, Oryza sativa
  ref <308>: DATABASE ACCESSION NUMBER: AK067264
  ref <309>: DATABASE ENTRY DATE: 2001-12-06
gggtagtacaaagccctctgcatctaatgaccattaccatgcaagctaaacccatcaccatggcaacggcgtcgatgctcctccggagcctcctctgcctcgccgtgctcgccgcggccgcggccgccgctcagccgcggttgcagtgcctggagaacccgccggagctgacggccgccggcgacggcgaggccggcgtggtcgtccaaaacctgggaggattcgcggcctacgtcaccggcgccgcccactccggccgggccatcgtcctcgcctccgacgtctttggatttgaagcaccattgctgaggaaaatagctgacaaagttggtgaagcgggatattacgtcgtggtgccagatttcttccaagggcgaccttacaatggagacccaagtataaacattacacaatggatcatggctcactctccggtgaaggcagctgaagattctaaaccgatctttgctgctctaaaaagagaagggaaatctgttgttggagttggaggttattgttggggcggaaagttagctgtcgaggttgcgaaaaccaatgaggttggagcgattgtcatctcccatccttcatcggtgactgctgatgatatgaaagatgtcaaatgccccattgaaatccttggagctgagaatgacgctgtaacaccaccaagattagtgtaccagtttgtgaatgccttgcgccaaagacctgaggttgattactttgccaggatctttccaggagtggctcatggctttgcttgcagatataacgccagcaacccgtttgctgtcagaactgctgaacaatctcttgccttaatgcttgactggtttgagaaacacttgaaatgacattagctaatcatgcatgcaatgcaaggccagtgcaattgtttatttccatcaaaatacattgctagtgtccatgtatatcctggtgttaagtgaaacttatataaataagcactagtgtaaagtgaaagtatgtgttgaatatggtgcgaagtgaaacaaagtgtactttatgaagtgcaaaatgcaaactctttttgttccg

SEQ ID NO: 16792 - DNA, 820 bp, Oryza sativa
  ref <308>: DATABASE ACCESSION NUMBER: AK098995
  ref <309>: DATABASE ENTRY DATE: 2002-08-28
gccgagtcatttcccgcaccgccgcctccacttcacccgcctcgccgccgccatcgccgacgtcgccgccgccgtcgctgcggcgagcttcccgtccggcaggccgatggacaccgtgggcgcccgcctgagccgctcgtcgacgcggtacggccccgtcgggaacaccgcctcctccttcagcgggcccgtcaggaagtggcgcaaggcctgggtccccatcgccgccggcggggcggggtacgccgggatgatgggccccatgggtgtctccagggggaacaaggtggtgctgttcaggtgggcgccggtgaacggcggcgcggccgggggtggcggtggcagcggcgacggcgacgagtcggcagcggtggcggccaccaggcggcgcttcgttccggcttcaggcgtggcacaaaattctaccaagaagagcggcagcaccgagctgaatttgaaccttgggttggaagatccagatgacgacagcgatgctgatctgagcgcagaagagcaacgtgacagtggaagtaaccaacgctcagacaacagactgaagagaaaagccttttaaccgcccagtcctttgatgatgagaacgtacgtggtcatgcgaggccactcatgtaatcttattagcatctatctcctagctcttagcttgtgttaggcattagcaattgtgtattgtagtccagaacaatgcattagccagttgtagtcttattagcatcttatgccaatatgcccccttccatgagctgatgatgtagcaacatgttattacaccaagtgttaatgcatgaacttgtcagattgg

SEQ ID NO: 16793 - DNA, 2861 bp, Oryza sativa
  ref <308>: DATABASE ACCESSION NUMBER: AK067265
  ref <309>: DATABASE ENTRY DATE: 2001-12-06
ttgagccaggaaagagaagaagaagcaattggggagaagccaagccaaggttggggaagggaagggaagggagaggagaggggctcgccgatcgatccctctccgcctccgccgtcgaaccgccgcgtcgagtcgagtcgaatcgaagatcgagccgctcctccacatctcccactcgcggtcgccatcctccagcgtcgccgcgcgcggctgctccgcttcccgacgccgctcgccgctcctccagctcagctccccctcgcgcgcgtctccttctatctctctctccagcgaccagcggtggtggccgtctctagcgccggctgtcgttaggggagaagccgggtactcgtagtaggttctggcgtgacgttttgaaggactgtgatgtgtgatccccactggcatgttgcatcctaggttcctggttgcttgctcaggctccaagttgtgcttcatctccagttgccgtggtagctatggggacatggctaggcgtggcaggatgatacctttccgcctcatgggctcgagcaggctgtacgagtgtagctccaccctcccggtgttgatcggtttcagttgatgatttctttggagactgaaagaaagattcttagggagttcatcagaaaggattggataagtgcattgtagttgtaggagtgctaggagcccaaatcggtgacatttctttcagcgtttcgctgaacatagtgtagatttgcctgcaatgggtttgcctcaggttaatccagccgaggaagcgcctacgccgtcaagtaggcctgtgtcgagccctcgtagcttcgagggtgttggcgcctgtgatttggatgggcttcttggaggaagctcaagtagcagggtattcgaatacccgtcaatcggtgattctgatcggaagactgcattagacatcccgaatggatcaactgagtattctagagacagccattgctttgatagacctgcaggtctccgaggactaagaattgattcgagggatgcagattctagatcttctcataaattggatcctactgtccatgttcccacaatgagggttgtgggatttgagtcgggttctgttggaggttctgctataatagaaactgataattgtcatactccattcgatcagcatgaacttcaggcaaggaaaagactgctctcaccattgaaaaacgttcttaatagacagttccacggtgatatactgaatatttccgctggtgatgctagatttgaactttctgattcagccaggaaacttaacatttcgtgcttccaagatagtaaaaaagcaaacactggtatgctcgattcttttgagccacaagcctggacaaattctagatgctccaatggtagtccagaatgggatgccaataagattaattctaatttattcactgatggtcctttacttgggagcaaggagtccttagcttatcttgatcatctagctgctagtgcaaaattagcacattctccactctccttgtccccgcttagccctaaatttatgaacagaactaaggctacaggagctcaatgccgtacaatgagagatattgaacatcattttctagattcaagggaaaaagggggacccgatggaattagaatgctgagtgtgctagaagaaactaacatattacatgatgaatacaatgtcatgacccctaaaagaagttcatgcagaagatatcaaatctggggtcctgaatccacccctacttctccccgggttggttatggtcggagtttgagtctcccagtacgacggtcactagttggctcctttgaggagtcccttctatctggccggctttcttatggaaaagacaatcagataattgatggattcttagctgttctaaatattactggtggaaacttctctcctccaactcagaagctgccgttcgcagtaacaagcattgacgaggatagctccttattgtactattcttctattgatcttgctgggaggtcgtcagcaactaactgtagaagcccaaaactcgaaagaagcttaagcaataatgattcacgatcagccaaaagtcgcttacggatccctgttaagggcaggatacagctggtcgtgagcaaccctgagaagactccacttcatactttcttctgcagctatgacttgacagacatgccttcagggaccaaggctcatctgatggatcagaggagaaagacgcaaatgcaaaacgttgttcgttggacagtaacatgatggaatcaaataaacataactctcctgtgaataagaaaaataacaccgattctgatgattgttgctgtcagatggacaatttaggtggcaagaattattgctgtgcatcttctaggattaatgatagctcgggtggaggtgtgattcgctatgctctgcacctgcgctttctatgcccttcctccaagaaatcctcaaaatcgatgctacgatgcaaatccgatccatcatcggtgccatatgatagtaatgccgcgaaagaggacgatcgcagattctacctttataatgatcttagagttgtatttcctcaaaggcactcagatgcagatgaaggcgagctgcgtgtggaacatgacttccctgctgatcccaagtacttcgacataagcaattgacacctctgcttctcctccttgtgcatgcagctaagctctcatgtcatttgtgtacatagcatgcgctttcttgcgcacaaaaaaaaaatgtaaatatctttttaatcctttttaacttgtcatcactcatcagcccccgatgtatttatcagtcgcaaccaactgtacagtttcagtcttcaaataaaatgcaacttttagttccc

SEQ ID NO: 16794 - DNA, 1984 bp, Oryza sativa
  ref <308>: DATABASE ACCESSION NUMBER: AK067266
  ref <309>: DATABASE ENTRY DATE: 2001-12-06
gtcgcgcaccgaccccactcggatcctctcctcccctcctcactgcctctctcccgtccacgagcggttggtcgatcgatcgatcgatcggcgcggtccttcgccagccatggcggcggcggcgatggcgccctcgcctccggagccggcgttgccgcgggagctcagcctgggggacctcagggcggtgtccatgctcggccggggcgccaagggcgtcgtgttccacgtcgttctcgcggcggcggggggaggaggaggcctccatggcgctcaaggcggtctcgcgggaggcggcgcggcacaagaagaacgggagcggcggcgaggacgggcaccggcggatctggttcgagcgggacgtgctcatgtcgctgcgacacccgctgctcccctccctccgcggcgtcctcgccaccgacgccgtcgtcgggttcgccatcgaccgctgcggcggcggagacctcaactcgctccggcgccgccagaccgagaagatgttctccgactccgtcatccgcttctacgccgcggagttggtgctggcgctcgactatctgcacagcctcggcatcgtgtaccgcgacctcaagccggagaacgtcctgatacaggacagcggccacatcatgctcgtcgacttcgacctctccacgaggctcccgacgccgccgccgccaccggaggagcaggacgcaacgattgctgattccatgccggagcctccgcccagttcaccgtccccgaaccgcgcgaagggcaagaggcaaccgggggcggcctcgtgcttcccgttctgttcggtcggcgccacgaagccggccgcgtcggcggactcgccgtcgccaacgtccacctcgcgcacggcctcggcgtcgtcctcgtcctcatcctcgacggccaccaccgcgtcgtcctccaccgccgctggcgtgcggtcgccagcgaagtcgaactcgttcgtgggcacggaggactacgtggcgccggagatcatcgccggcagcgggcacgacttctccgtggactggtggggcctgggcgtggtgctctacgagatgctctacggccgcacgccgttccgggggctgaacaggaaggagacgttctaccgcgtcctctccaagcagccggagctcgtcggcgagaagacgccgctgcgcgacctcatcgcccgcctcctggagaaggaccccgagaagcgcatcggcgcgcgcgggatcaaggcgcacccgttcttcaacggcgtcgactgggaccgcatcctccgcgtggcgcgcccgccgttcatcccgcccccgccggaggacgaggacgaggccggcgaggtgctcgacgtcgagaaggtcgtcaacgaggtgttcgcggccaatgacggcggggccgcagcgggtgtggtggagaagccttcgccggaggcaggtggaactctggccgtcggcgatggcgagcagaggagagatccgtccaaagaaggcgatttctccgtatttttctgagcgtatttattgagttcttttttagcgttctctctcttaaaaatggaaaattacatagctattttggttttttctatggactagaattattatgggggtctctattagtaatagacataattaagacaaagtacggcgcggtggagtacataaatcgactttgctcttgtgtttaatggagtacagtctgtatagtatttttcccctttcccttttattttcttctttgttggatacatttccccgtgcaacgatgcaagctaggggattactgaagagtgtacataaggaatgatgaacagcaaaattggcctaatgttgtgtccatccatgtgttccatttcgctttgggtagccattgatgttaatacctgttacttcctttcagtgggagtaatagaaatggtcacggttttgtacatttttctgcaacattctctcaaagtagtaaatgctttgaagtgcccttgcgccatcaatgaggt

SEQ ID NO: 16795 - DNA, 1078 bp, Oryza sativa
  ref <308>: DATABASE ACCESSION NUMBER: AK067267
  ref <309>: DATABASE ENTRY DATE: 2001-12-06
ttgggccaaaccgcgaacacggtaagccatctgatcagtggctcgccgtcgccgctgctcctctccaactccaacctcgcatcactccatgcgcgagctcgagctcagctgagtggacgatggaatgaggctcgtggctgccaaaccttgctgcctcttccgaatctcaagcgtcgccgccgttgcagccggtcgccgccggccatggcgagccgcggcggcgagcggcaatgcgcacgccgaagccgaaggcgatgaggacggccaatcgctgtcggcgagggcgaggggcaggcgggcgcggctgtcggcgaggcggcgggagaggatcgtggtggtggagggcggcggcgttgggggcatcggcgagttcctgcgtcagcccgccggcgtggagtcgctgctgaacacgagggcgctgcagagcttcgcggcggtggacgaggcgccgggggcgaacacgttccggtgcacgctgcagagcatcggcttcctcgggttccaggtcgcccccgtcctcgacctccgcgtcgccccgacatgccacgactgcaccgtcgagatgctctcctgcaggtttgagggttcaggctcagttgagcagcagaatgagctcttttcagcttttatgagcaaccatataacttggaaagacgatggtgaggaaccatgcttggacattgatgtcaatttggaggtcactctggaggtttacacgaagccattcagcatgcttccattgtcagcagtggagacaccaggcaacctgctgatgcaaggcctcctgggcaggctcgtgcccttgctgggggagcagctgctgagagactaccattcgtgggttcagcttcagcagcagcagcctgaaatttcctcattagaaactgctgaaatcgatgcttcatagtcggatggcttcatcgaattcagagatttttagcgagacgaaagaattctgagaaaatatgttggatggtttggagaaaaattggttgccgatgtaactaaaaattgcagtttgtaatatagttccattatgactgcttcagtgaaactcaggcatcaaactgcacagctt

SEQ ID NO: 16796 - DNA, 1557 bp, Oryza sativa
  ref <308>: DATABASE ACCESSION NUMBER: AK067268
  ref <309>: DATABASE ENTRY DATE: 2001-12-06
gatataccagttacgtcgtcgtcgtcgtcatcatgtgctatagctagctccaaacaaaacttggagaatttggagcgtacgtgtactagctagtatagattgcagcagctagctagcccagcagcaagaagacgaggagatagctgcagtctcgtttttggcttttcgaatttattataaccccggtcgtgcaaatcgaagaggattggaagtcagctggtagactagctagcgtccaagatacacatactactatcgaagagtgtgacttaattggattggattaattccatgcctatcttcttcttcagccacaatttaacagaacaagacaattagtctatcagtggtttgagctgattaactatcatcagagatagagatggcagccgcctcgtctgcacactacttcggtctcggcgagccgcagatgcagcagcagcagcagcagcctcccctgcagaacaacgcggctgctccggtcgcggccacgccgccgcccaagaagaagaggaatcagcccgggaatccaaatcctgatgcggaggtggtggcgctgtcgccgcacacgctgctggcgacgaacaggttcgtgtgcgaggtgtgcaacaaggggttccagagggagcagaacctgcagctgcaccggcgagggcacaacctgccatggaagctgaagcagaagaaccccaaggagacgcggcggcgggtgtacctgtgcccggagccgtcctgcgtccaccacgacccgtcgcgagccctcggcaacctcaccggcatcaagaagcactactcccgcaagcacggcgagaagaagtggaagtgcgacaagtgcaacaagcgctacgccgtccagtccgactggaaggctcactccaagacctgcggcacccgcgagtaccgctgcgactgcggcaccctcttctccaggagggacagcttcatcacccaccgcgccttctgcgacgcgctggcgcaggagagcggcaggattatgccacccatgggcgccgccctgtacgccgccgccggcgccggcatggccatcggcggcctcaccggcatggccgcctcccaccagctccaaccgttccaggaccactcctcggggaggggaggggagtggaggggagggaaggcggcgacgaggagaggagacgcgacgatgacggcgccgacgacgacgacgacgatggcgacgacgcgacgacgacgacgacgacgacgacggcgacgacgcgagtacgacgacgactgctgcgatgacggcgctgacgcgacgacgacgacggcgccacctatggaggccggcggatggacgacaacggcgttttttttaagtttacatgttgattgatgttgattgatgttagcttgcaagttgatgatgttgatttatgatttgaaacctaggatgggtggggtgggctggcgggaaatttttttgttgcgcggtgaatgtagcgcctgcaaagaatgaactgctgcatgcgaaaattatttttgcaggcggtgctttggtccatctaaaaaaattaaggatttttacagtcgttt

SEQ ID NO: 16797 - DNA, 1446 bp, Oryza sativa
  ref <308>: DATABASE ACCESSION NUMBER: AK067269
  ref <309>: DATABASE ENTRY DATE: 2001-12-06
gatagtactcgcacgacgcgacgcctctgctgaacatttcgctctcttccaagatattttttcctcccacgattccttcctcccatccctgggggattcatcggctcatccgtactagcacaagatgtgcgagggtgtgcgggccgccggcgacgccgccgccgccgccgacgtcgacgtcatcacctcctccggccgccggaggatccccgcgcattccactgttcttgcgtcggcgtcgccggtgctggagagcatcctgcagcgccgcctgaagaaggagagggacgccgccgccggcggcggcaaggtccgcagggccgtcgtcctgatccgcggcgtcaccgacgacgccgcggccgccttcgtccgcctcctctacgccggcagcagtggtgatgaggaggagattgacgagaagagcgcggcgcagatgctggtgctggcgcacgcgtaccgggtgccgtggctgaagcggcggtgcgagggggcgatcgggtcgcggctcacggcggagtcggtggtggacacgatgcagctggcggcgctgtgcgacgcgccgcagctgcacctgcgctgcaccaggctgctcgccaaggagttcaaggccgtggagaagaccgaggcgtggcgattcctccaggagaacgacccctggctcgagctcgacatcctccagcgcctccacgacgccgacctgcggcggaggaagtggaggaggaagagggcggagcaaggggtctacgtggagctgagcgaggcgatggactgcctgagccacatctgcacggaggggtgcacggaggtcgggccggtggggcgtgcgccggcggcggcgccgtgcccggcgtacgcgacggcgtgccggggactgcagctgctgatccgccacttctcccggtgccaccgcaccagctgcccgcgctgccagcgcatgtggcagctgctccgcctccacgccgccctctgcgacctccccgacggccactgcaacacccctctctgcatgcagttcaggagaaaggaggaggagaaggcggcagcgaaggcgaaggcaaaggccggcgatgatgacgataagtgggggcttctggtgaagaaggtgagggttgccagggccatgtcttctctgggcaagaggaggcagatgagttgctcccagtgctgagcaagtgcaatcacagcatcagcctgagacagtcaagagaagagtattgtagtatagaagggtactactatgtagttaggcatagtgcatgagtgtattgaagtgagctattttttggtttgttcaagatggtttggtctctcaagtttgagttgctttactgtcttcaatttgtagagttcttttgtgaggtgagagaaatgggctgaaatctgttgtaaaattgcctatatcgtaaataaacttttaatagtgaggtatatgatcattacagtttc

SEQ ID NO: 16798 - DNA, 2499 bp, Oryza sativa
  ref <308>: DATABASE ACCESSION NUMBER: AK067270
  ref <309>: DATABASE ENTRY DATE: 2001-12-06
gaagcagccaaggcgcctcccttcctaatcctacctcgatcgcctcctccctctcgactcgatcgccatggttgtcaacaacaaggtggacagcctctcctacgacgtcgaggcgccaccggcgcaggcgccgacgaccccggcggtggtctccgcgccgccgacgccgcggggcgaggcgccggcgatgacgacgacggcggcggcggagctgcacaaggtgtcggtgccggagaggaggtcgacggcgaaggcgctgaggcagcggctggcggaggtgttcttccccgacgacccgctccaccagttcaagaaccagtcgtccgcgcggcggctggtgctcgcgctgcagtacttcttccccatcttccattggggctccgactacagcctccgcctcctccgctccgacgtcgtctccggcctcaccattgccagcctcgccatcccgcagggaatcagctacgccaagctcgccaacctgcctccaatcattggactatattcgagcttcgtgccgtcgctgatctactcgttgttgggtagctcgcgggatctggctgtagggccggtgtcgatagcgtcgctggtgatggggtcgatgctccggcaggcggtgtcgccggaccaggagcccatcctctacctccagctcgccttcacctccaccttcttcgccggcgtcttccaagcctccctcggcttcctccggctggggttcatcgtggatttcttgtcgaaggcgacgctgacgggattcatggggcgggcgcggcgatcatcgtgtcgctgcagcagctcaagggattgctcgggatcatccatttcacgtcgcagatggggttcgtccaggtgatgcactccgtcttcaagcaccacgacgagtgggcgtggcagaccatcctcatgggcgtcgcccttcctcgccgtcctcctcaccacacgccacatcagcgccaggaacccaaagcttttctgggtgtcaggcagctgctccactgacatcagtgatcatctctaccatcatctcgttcgtcagcaaagctcatggcatcagtgttattggcgatctccccaagggattgaaccctccttcagcgaatatgctgaccttcagtggctcctacgtaggactggccttaaacacaggaattatgactggcatactatctctcactgaagggatagcagtaggcaggacatttgcatccatcaacaactaccaggttgatggaaacaaggagatgatggccattggtgtcatgaacatggctggcctcatgtgcctcctgctatgtcaccacaggatcgttctcgaggtcggcggtgaactacagcgcggggtgcaagacggcggtgtcgaacatcgtgatggcgtcggcggtgctggtgacgctgctgttcctgatgccgctgttccactacacccccaacgtgatcctctcggcgatcatcatcaccgccgtgatcggcctcatcgacgtccggggcgccgcaggctgtggaaggtcgacaagctcgacttcctcgcctgcatggccgccttcctcggcgtcctcctcgtctccgtccagatgggcctcgccatcgccgtcggcatctccctcttcaagatcctcctccaggtcacccgcccaaacatggtggtcaagggcgtcgtccccggcacggcgagctaccggagcatggcgcagtacagggaggccatgcgtgcgccgtccttcctcgtcgtcggcgtcgagtccgccatctacttcgccaactccatgtacctcggcgagaggatcatgaggtttctccgggaggaagacgagcgggccgccaagtgcaaccagtgccctgtcagatgcatcatcctcgacatgagtgctgttgcagcgatcgacacgagtggcctcgatgcacttgcagagctgaagaaggtgctggaaaaaagaaacatcgagcttgtgctggccaacccggttggatcggtgaccgagaggctgtacaactcggtggtcggcaagacgttcggctcagaccgcgtgttcttcagcgtcgccgaggccgtcgcggcggcgccgcacaaaacacagccctgacaagagcagagatgtgctttgctaccagtagatccagcagaagcagaagtactctctgaccagcagaagcacagtagaacaaggtgcttctcggaggaggctaattaaaattaagaatcttaagatagaagcgtagaacaagaagaagaagaagaagaagaagaagaagaagaagaagaagaagaagaagaaggtggtaaaaaacaagtctatgggctgttaatttgttcgcgtgttgtgtttaattaggggggattatggtagtgcagatgggaaataactccgggtgctgatctcttctgatcgagttggaagagtttttgaagcatgtaaccagaatgcgtggcgtgtatggtgtagcttgtgatttggtagttgttgcaaagtaatccttaatggaatcgggttttgatct

SEQ ID NO: 16799 - DNA, 2699 bp, Oryza sativa
  ref <308>: DATABASE ACCESSION NUMBER: AK067271
  ref <309>: DATABASE ENTRY DATE: 2001-12-06
gaattagctcgatatccattagcaagctgttgttgcatcgatccatggttgtatccattgattaatttgattagctgcaagggcaagaacatcatatctgctagctagcttgtcgtcgcaatcaacgatggactacttcaacgggacggacgcgcactgcggcggcgccgtgggcgccatgggctcctacgtctacaacctcacctcctcctacgccgaccagaagaacgaggtcaacatcgtcgccacctccctcgccatgctcctcctcgccgcgctcctcctcgccttcgacctcctcgccggcgccgccacgctgcgccccgccgcgcgcctcgtcctctccgtctccctcgccctcttcctccccgtcacctcctacctcttctccgaggccaagaacgacgtccccggcgccgccgccgccgacgccgagctgcccctgcgtgcgcgcctcattcttgcgtggatgctgctcgtcgagctgctccgcaagaaggtggaggccacggtcgccggcactaagggcgccagtggcggcggccccaccagccgtgccggccgtgtcgccttcctcggctacctcgtcttcttcaacgtccacggcgccggccggaaggcggtgttcggcgtgctctgggtgttcgccgctgccaagctggtgcagcgcgtcgccatcggtgagttcgtcaagcgctccttcgccttcggcaagaacccgcagctcctcgccggctacatggcgcagacgctggagcagcaggagcggcgcccgcggcgagacgacgagctcatgacgagctgcaagtacgccgtcatgggagaggagaacctggagagggaggccggcccgaacggctacctcgtcgacctgaacaagacagtcgccggcgatgacaacgccgacgacgccgtcgtcgtcaccgtgggcagggtgtggtcgctcgccgagagtgaccagctgctggtgtccaacccgaagctgaagcggctctgcctctcgtacgctctcttcaagctgcttcgccgcgagttcgaggagacgccgttggccgccgcggaggccgccgactgccgtgagctcatcttccgaggcctgtgcaacgacggcggcgccgccgccgacagggcggcgacgctgttccaggtgttcgacgacgagctcgggttcgtgaccgagtactaccactccgtcctccccgtgatgctggcgagccccttcttcctcctcgtcaactacatcgtcttccccgtcctcgtgctcggcctctgcctcatgaccgtcgtgctctgcggcaacggcgacatcgccttcatcgccggcagcatcaagagggacaactacgccgtgtcgttcggcttgctgaggatgacgaggtgcctcctgagcagagtattccggtcgccgtcggcgctcttctcctccattgacctctccatcacgttcctcctcttcctcaccatcctctacgaggaggcgtgggagctcgccgtcttcctcctctccaactggctcaccgtctccatggtctgcgactacgccgtcaagccgccgagccggctccgccgctccgccatccgcggcgtccagtgggtgacgaacaggatgagccgccgcaattacctccgtgtcaagcagtactccgtgctctggttctgcaggctcccgctgaagctgccggcggcggccgtgccggaggaggcgaagcaatccatcgtggagtacctcgcggcgtacgacggcgccgtcgccccgctcagcgccggcaggtcggcggtggcggcgaggaacaccctgtgcaacgcgtcccggctgatctcgtcggcgtgcgagagcggcagcgtcgccgaggttatactcacatggcacatcgccaccagcctcctggaggtgaggtgcccgccgcacgcggaggaggaggcggcggcggcggcgaggtcgagcacggtggcgacgcggctgtcccgctactgcgcctacctggtggcgttccgccgggagatgctccccgacgacgtcgactgcacggcgcgggtgtacggcaccatgaccacggagctcaagcgggagctgggtctcaagggctactacttctcgacggacgccacccggtacgggaagatgatggctatcgccggcggtcaagaagacgacgaggcggcggcggaggagacgacggtggtgcgcaagggggcgaggctggggaaggcgctgatggacgaggcggccggcggcgacgaggcggcggtgtggaagctggtggccgacgtgtggacggagatcgtcgtgtacgtggcgccggcgagggacgccgagcaggtgagggcgcacggcgaggcgctggcgcgcggcggcgagttcgtcaccgtgctctgggcgctcgtcacgcacaccggcattgcccgccccgccgccgcgtcggtgtgatcgcggcatcgatcggatggtgattgaggatactgatggttggagtggtacagtaaagattggtttgcatgcatggattggctaatttttggattgattgattgttaatcacttcattatgattaatttgcatcccaatggattggtgtaacatcatatatctgtgtgttgatgcatgtgatatatacatacatacatgatgtgtgttactgtgttttttttcatgtaaagatcatgttgtgtatgttccgaaaagccatcaaaatgtttg

SEQ ID NO: 16800 - DNA, 1162 bp, Oryza sativa
  ref <308>: DATABASE ACCESSION NUMBER: AK067272
  ref <309>: DATABASE ENTRY DATE: 2001-12-06
ggagagagagagagagagagagagagagatgagcagggtgtgtgtcaccggggccagcggctacatcgcggcctacctcgtcaagaagctcttggaacgaggctgcgtcgtccatggaaccttgagaaatcttggagatgagaagaagacggcgccgttgagagagttccccggcgcggcggagcggctggtgctgttcgaggcggacatgtacgacgccgacaccttcgagcccgccatcgccggctgcgagttcgtcttcctcgtcgctaccccgatgcagcacgaccccaccagcaccaagtacaagaacaccgccgaagcgaccacggacgcgatgcgcatcatcctggaccagtgcgagcgatcgaggacggtgcgtcgcgtcatccacacgggctccgtcaccgccgcctcgccgctccgggaggacggcagcggcggcggctacaaggacttcatcaacgagtcctgctggtctcctcccaacctcacctgcgacttcaccaacgattacctgaacggctatgtgtcatccaagacgctctccgagaaggagctcctgagctacaacggctcctcgccgtcgccggcgttcgaggtggtcaccctgacgtgcgcggtcgtcggcggcgacacgctccagccatgcccgtggagcagcagcatcccggtgatcctggcgccgctcaccggcgacgagccctcccacaactccctcaagttcctgcaggcgctgctggggtccgtgccgctggtgcacgtcgaggacgcctgcgacgcgcacgtcttctgtatggatcagccgtccatcgccggacgattcctctgcgccgccgggtaccccaatatgaaggactgcgtcgaccacttcgccgccaagttccccgacatcgagatcaggctcaaagaggtcattggggagggggtgagagtgcaagctgacaccaacaagcttgtggatttagggttcaagtacaggtatggagtggaggagacgctggacagcagcgtggactgtgccaagaggctgggagagctctgatagtctgatgtgatgtgttgtgtagcaaaatcccttgcttcgcttgacctgtacatgtataccgtgtgcgtacattctgtgagaacggattgatgaatgataaattcgttcctgctc

SEQ ID NO: 16801 - DNA, 823 bp, Oryza sativa
  ref <308>: DATABASE ACCESSION NUMBER: AK067273
  ref <309>: DATABASE ENTRY DATE: 2001-12-06
gacttgtccggtcaactctccagtgacctcgccatctcctcagccatggctcgccgtcgcccaccaccgcagcgccaccaccacctcgtcctgctcgccctcgccgccttctcctgcctcgcctccgggacagcgacgccgacgccgacgacttcctcccaatcccagcagcctcagccagccggcacgctcctccagcccgctctcgccgcggacctcgcggcgcggacgtgctggtacacggtgcagatcaagacgagctgcgcgtcgccgtggcgcacgtcggacgcggtcagcctcgcgttcggggacgcctaccgcaacgaggtctacgcggcgcggctggccggctcctcctcctcgccgcagccgtcgtcgtcggccgcgttcgagcggtgcgccaccgacacgttccgcgtggggggcccctgcggctacggcgtctgctacctctacctccgccgctccggccgcgacggctggacgccgcagtgggtcagggtctacgagcccacctccgacaccccctccaccttctactacggcgaccccctccccaacgccgtctggtacggcttcaaccgctgcccccgcctcgccgcctccgccgcggcgcagtgatggtttgcgacgtcgccggcgagatgagcatgattcgacgacgagcacgtaatttacggttgggttaatggttgcgtgatgtgttacgatgtaatgtatgattcgggttgtgtgtgttgtaaatttgcaataatccagagatttatcttttgagtaattaataagaacagatcagattctgattctgatctgtatgtttgtt

SEQ ID NO: 16802 - DNA, 2243 bp, Oryza sativa
  ref <308>: DATABASE ACCESSION NUMBER: AK067274
  ref <309>: DATABASE ENTRY DATE: 2001-12-06
gacctctcgcaccaccaccgcgtcagtatacaaacggcggcgaccaaccaaattccggcgagtcgtcgtcgtcgtcgccgtcgtcgagagagagtcaaaccccccacacgcaaagagagcgaaaccccacccccctcctcttcctcatccaccccacgcacgcctcgtcgcggccgcgcgaggtgagctggagcgaacggcggcgatggcggcggcgaaggaggcggtggtgccggtggaggggcggaggaacgtgctggtgacgagcgcgctgccgtacgtgaacaacgtgccgcacctggggaacatcatcggctgcgtgctctccgccgacgccttcgcgcgctactgccgcctccgggggcacaacgtgctctacgtctgcggcaccgacgagtacggcaccgccaccgagaccaaggccatggaggaaggctgctcccccagggagatctgcgacaagtaccatgccatccacaaggaagtgtacgagtggttcgacatcagcttcgacatcttcggtagaacatcgtcgccgcaacagaccgaggtctgccaagacatcttcctcaagctactggacaacaattggctgtcagagaacacaatgcagcagctttactgcaattcatgccaaaggttcttggctgacaggcttgtggagggctactgccccacagagggatgcaactatgactctgccaggggtgaccaatgcgagaagtgtggaaaattgctgaattcaactgagctggttaatcccaagtgcaaggtttgcgggagcacgccttgtgtccgcgacacggatcacttgttcttggagctccctctgctgagggagaaacttgagaagtatatcgacgagacttctttgactggatcatggagccaaaacgctattcatgcaacaaatgcttggttgaaggaagggttgaagcctcgctgcattaccagggatctgaaatggggtgtgcctgtcccacatgagaagtacaaagacaaggtgttctatgtctggtttgatgcaccaatcgggtacatctccattacggcgtgctacacgcctgagtgggagaaatggtggaagaatccagaaaatgttgaattgtatcagttcatgggtaaagacaatgtcccattccatacggtcatgttcccctccacactacttggaactggagaaaattggactctgatgaagacgattagtgtgacagagtatctcaattatgaatcaggaaagttctccaaaacaaagggcattggagtgtttgggaatgatgcaaaatccacaaatattcctcctgaagtgtggcgatactacttgcttaccaatcgtcccgaggcatcagatacattgttcacttggacagatttgcaagccaagtgtaacaacgagctgctgaacaatttagggaacttcatcaatcgagtactaagctttatcgcgaaaccagagggaactggatatggttctgttgtacctgattctcctgatgtggattcccatgctctgactcagtcattggctgagactgttggtaaattgattgatcagtacatcgatgcaatggacaaggtcaaaataaaacaagggctgaagattgcaatggccatttctagcgaaggaaatgcatacctacaagagagtcagttttggaagctttacaaacaagatccagccagttgcgcaactgtgatgaaaacctcagttggaattgtgtacctcctggcatgtttgctggagcctttcatgccaacattctcaaaagatgttctgcagcagctaaatctaagtccagaagagcacctatcattttgtgatgaaaaaggagaggttgagaaggccaaaagaccttgggatctcataccatcaggccacaggatagggaaacctgcacctttgttcaagggattggaaaacgaaacggtgaagggcttgagagaaaaatttgcaggcagccaagctgaaagaaaattgaggactcaagtcgccgcacaattggaagccacaagcatatagaaaatctaacactatttcccttcaactactagatgttaaaaccgggcttaacaaaaggagcgtttgttttctttattttgccttgaataataattgtacagtgtagtgacttgagattaatgataatacatattacttgtaattccaaaactcaaatgctcaattgattttagtttattgttgattaattattgaggcttgcacatatgccactgttttg

SEQ ID NO: 16803 - DNA, 2360 bp, Oryza sativa
  ref <308>: DATABASE ACCESSION NUMBER: AK067275
  ref <309>: DATABASE ENTRY DATE: 2001-12-06
gactccactcctcgccttccactctccacacctcgcctcgcgtcgagcacctggcaatggcggctcacgcgccctcgatgcgccccacccacgccctctcctcgtgagatcgcctgctgcgctctctccccgcgcgcgcgcgcgcctccctccctgtttgttgaatccaagagcgagcccgaccgcatcttggaccctcccctccccgcggttcttggacgacgccggtgcgcgcggtggctctgctgtccccgcgccgcaccgcgccgaatccgagcagaacgcgcgcgcgtcggcggggggatctgcaatggcggccgtggcggtgcccccgctctccgcgtggctcgtcgccgcgcgctcctcgacgcaggcggaatgcggcggcgccgacgagcaccaccaccaccaccatcagcagcagcaccagtgctgcgtcggcggcgggtccagcacggtgatgttcggcccgcgccgccgccgcttcctcggcggcggcgcgcggcggcgcggcgcggcgcgctctggaatggccatggctgttgccctgcagcctgaaaggagaactgttgaaaagaaacctgatgttaaacaaagaagggtggttatcactggcatgggtgtagtaacaccgttgggccatgatcctgatgtgttttacaacaaccttctggatggtgttagtggaataagcgagatagaaaggttcgactgctccacgtttccgacgagaattgcaggagagataaaatccttttctactgatggttgggttgctcctaagctagctaggcgaatggacaagttcatgctatatttgataactgctggaaagaaggcgttggaacatggtggtctcactgaagaactcaggaatgaattggataaaaccagatgcggtgttctcattggttctgcaatgggtggcatgaaggtttttaatgatgcgattgaagcattgagggtctcctacaagaaaatgaacccattttgtgtcccttttgcaactacaaatatgggctctgcaatacttgcaatggatctgggctggatggggccgaactattctatttccaccgcgtgtgctaccagtaatttctgtatcctcaatgcagcaaaccatatcagaagaggggaagctgatgttatgctctgtggtggttctgatgcaccactcatcccaattggattaggaggttttgtggcttgcagagcactttcacagagaaacagtgacccaactaaagcttcccggccatgggatgtggaccgtgacggttttgttatgggggaaggggcaggtgttcttgtgttggaagaacttgaacacgccaagcaaagaggtgcaaaaatatatgctgaatttctaggtggaagcttcacgtgtgatgcataccacatgactgagccacatcctgaaggaagagggattattctttgtatagaaaaggcactggctgattcaggagtagcaagggaagaaatcaactatgtcaatgctcacgcaacgtctacacagtcaggtgatttgaaggagtatgaagctattgtccgctgctttggccagaaccctcagctaagggtgaactcaacaaaatcaatgactggacatctaataggtgcagctggtggaatagaagctgttgctgctattcaagctataagaactggctgggtccatccgaatctgaatttggagaacccagagaaaatagtggatgtgggcgtgctggtcgggtcgcagaaggagagatgcaaagtgaatgtggcactgtcaaactcatttggatttggtgggcacaactcatcaattctgtttgcacccttcaagtgaactcggcctacgattatcgcttgctccctcaaatttccaaccgcgccatggtaccggaaccgcgtatagaaaactagcaagcaagtgaattcatggcttacacatgctatgaataattgaacatgaaggtccaagctaagaagagcattgtgccatacaacaacagagtgaagaaagtaagaaaccatagaggccatgtccatggcatgaccactcctaagtttcattttgtatcaccatcgcaaatacatccctggaaaagtcctggatttcctttttctcaagtgaagaagaatatgatgtagcctatggcctatgttattactttgtttatctcatctaggaggactttgtgtatcctacctgggccggtaatttttttttcttttttcgcctcacctcagaacccttctctagatttggcatagttgatgagagtgaggatgctttgcagtacagaggtgctgtcatttgatgttgtattgatgatgtttattagtaactttggctactcatattagccgtg

SEQ ID NO: 16804 - DNA, 1874 bp, Oryza sativa
  ref <308>: DATABASE ACCESSION NUMBER: AK067276
  ref <309>: DATABASE ENTRY DATE: 2001-12-06
ggcggatccacccactctcgccagcgcagcagcagcagcacgcgaaaccctcgccggcgacggcgacggtgatggcctccgccctgctcgccggccggggcggggttaaccaccaccaccaccaccaccagtggggggagacccgtgccccgctcgcgcccgtggcccccaattccgatcccaaccaccctctccagcagcgcgccaacggctcggccacgaggccgccgccgtcaagctacgtggcgctgcggccgggggcaatggctcaccgcgaggcccgcgcgctgcgggaccgcctcgccggcgagcttggccaggtccgcgccctcatcgcccggatcgacacgtggcagcagggtcaggtgaagcgccatggctcgcctcgccgggacctccccacgccgccggcgaagctcagggcggcgatgcggaagcgttgcgagcagatcctggcgaagctgcggaaggacaagcggagcatctggttcaacgcccccgtcgaggtcgaccgcctcgggctccacgactaccacgcagtcatcaagtgccccatggatctcggcacggtgagggcgaacctcgccgccggaaggtacccctcacacgacgacttcgccgccgacgtccggctcacgttcagcaacgcgctgagatacaaccctgcggggcacgaggtccacaccttcgccggcgacctcctggcgtcctttgagaagatgtacaaggcatctatgtcttggttcgagcaggaactcaagctccttgagccgccgatgccagtgccgccaccggaattgccaccggcgacagctccggtgcaggtgaaaccaagggcagcgaatgtgaaaatgcggaagccgaaggcaagggagccgaacaagagggatatgacgctggaggagaagaacttgttgagggttgggttggagagcttgccagaggagaagatgcataatgtgctgcagattgtgcggaagaggaatggcaatcctgagctggttgggggtgagatcgagctggatattgatgagatggatgtcgagacacagtgggagcttgatcgattcgtcaacaacttcaagaaggcgctcaacaagagtcgacgggctgccattgttaatggtgaaaatgccgatgtcattgatgcttccgtggctaatgatagtgatatgctggtgaatggcagtaccgctacgatggtggacaacggtgatgtgacaatggcaatagagagcaaggatcctgacaagatcactacacaggccgagcagttggatgagtatgtagatatcggggatgaaatgccaacagcaacttaccaatcagtggagattgagaaggatactgaggccgcgagcagtgggtcctcatcatccagtgattcagggagctcaaaggacagtgtctcagaatctggcaatgcccattctctggtgtaaggcctccattctaacagtaggatacgagtaggtggatgattaatttccttttgtgtgattggtggtgtagagacaccaaaagtgtaggtgttttgtaagttgattaagaggagttggtatctgtttggatttagtcaagattaatttgtagcgagtgaactggctttgtggctattctgatagcgcaggtgtcctatgtacatataagtgaaaaatggagactacggtagcaattggtagactggtagttcaccaggctttctgatctgaagaagtgaatatggttcatgtggctgtctgttcttctagttctcaatgcagttgttttgttacaactgtcatatactcttaatactcttacgtaatttgatgtgtcattatgggtgattgtaactgtggcaattgaagtagcaacatataatcttttctggg

SEQ ID NO: 16805 - DNA, 1626 bp, Oryza sativa
  ref <308>: DATABASE ACCESSION NUMBER: AK067277
  ref <309>: DATABASE ENTRY DATE: 2001-12-06
tgggggagacgagcgaatcgctccacaccaccaccaccgtccaccgcgacccgcagcggtgagtggatatggccgccgcgctcgccgccgccgccgccgccgccgccgcccaccaccaccgcctctcctcctcctccccggccgcgcggacacgagtagttcaccaccaccgccgccgccggtcgtcctccctctccttctccgcgccagcctcttcccacggctgtcccagaggcgcccgtgcgctcaggcgcgccgccgccggcgatggaggcggtaacggcagcggcggcgtcagcaccggcacggtggacccggccgccgcgtcgtcgccgtcgtcgtcgctggaggagctgtaccggagctgcgcgacgtggacgtggagggggatgcgcatgaactacctggtcaggggggagggcccgccgctgctgctcgtccacggcttcggcgcctccgtcggccactggcgcaggaatattggcgtgttgtctgaatcctacaccgtgtacgcgatcgatttgctcgggtttggcgcgtcggacaagcctcctggattctcctacacgatggagacatgggccgagctgatcctggacttcttggacgaggttgtgaggaggcccacggtgctcgttggcaactctgtcggaagcctcgcatgcgtcattgctgcagcagactccagcagagatcttgtccgggggcttgttctactgaattgctcgggcggcatgaacaacaaggccatcgtcgacgattggaggatcaaattgctccttcctctgctatggctgatcgacttcctgctgaagcaaaggcggatagcatcagcgctgttcgagcgtgtaaaagacaggagcaatctgaaggacatcctgctctctgtctacgggaacaaagacgctgtggacgacgaactagtcgagatcatcagggggccggcggacggggagggggctctggacgcgttcgtgtcgacggtgacggggccgccggggccgagcccgatcgcgctgatgccggcggtggcggcgaggtcgccggtgctggtgctgtggggggaccgggaccccttcaccccgatcgacgggccggtggggaggtacttctccgcgctccccagcgagctccccaacgtgacgctccacatgctggagggcgtcggccactgcccccacgacgaccgcccggacctcgtccacgccaagctgctcccatggctcgacaccctcccctccaccaccgcgctgacgccggtatcgtcgccggcggcttaatgctgctgcatttttttaagagcaagtttaattgtatagtcaactgctagctctaaaaattggcacaccatccactgttaatctaatagtctacacatataatagtttcatataaaaaaatactataccaatcagtactgtcttgtagcccatactacagctaacaaatctgtagctctcttctctcctctcctctcatctcttctccatatatgcttatagctaatttaggagtgctagcttcatattgtacttgctctaagaggaatgctgctgcatctgctgctttttggttcgcaaaatttgctatgtgtacaggcggaatgagacacacctaagtttgggc

SEQ ID NO: 16806 - DNA, 3161 bp, Oryza sativa
  ref <308>: DATABASE ACCESSION NUMBER: AK067278
  ref <309>: DATABASE ENTRY DATE: 2001-12-06
ggctctgtacaaatgtgctgaggcttgggttctaggctggcttacctatagctagttagcttacatgatggccgccggtggccacgctgccgcggagcaccgcatacagataccagctgccccggcgtcgcagtcgggaccagctgatcataaggcggtcgccgcggcgccggagaagtggctgaattactttcttcgcttgctcgcggtgatcgaaagcgtgggcaacgccttcggcacgctggccttcacctgggccaccgtcgtcctgctgggtggctacccaaccgttctcaagcgcgattttggtattgcgactgcgataattttcctagaagccacgaggatgttcacccgcaacaataggctggattatcaattgttcttccggacgagaggtgcctttagaccactgggctggaacgggctgatggtaatcgtattcttctccgtttctatggtgtccacggttgtttgggacgcacgccggccacgtatagtatttccaattatggtagtattgtttgcggttggccagtttctatgtgctggagttctaggactgcgcctacgtatcaacagtcggttacgccgtcagatgtcgctgtggagccccatggttgcaatcttattgctggcttcctgtatttgcagaagctcgctactggccatatggatagtatatggtgtgctccttgtggttgtgctcctagtgactattagcaggttgcaattcccaattataatcaaccgagtacatggtgctttgggccgcaaatacgtattttggcgcccatttatcctatactcgtgcatgctcgctgcaattgtgttgccgatgttcatgattgataaattatatcgatatgcgatcatcgtcctcgacatatctgccttggtcattgtgtccttcggcaacctacagattccagcagcactcgtgcgtgttgtgctcgcggcgttgggctttgatcaagaggactacgatggtcacggtgacacgacaaatcttccccaatctctaactatcttctatgggatggtgcttggacaaggactactttacatcattgccgcagtattggaggtcttctcgttcatccctcggatacacctcgtccgccgtggtggatttacaggtcgatggggagcagaatctgttgatatgtactacgcatacgcctatgacaaatacatggaaggaggtctgtttgctccaaagaggatcagcctcagcaactttgccatggattctctgaattcggacctgtccaagaatcagctatacggtgtccagatgatgcatatatttctgcaaaatggtctgaccaaggcacggttgctggagaaactcaccacttcaacgcagacgatggccaggttaatcagcatgttggactggagtagtagacatcatcgtgcaactatcaggttatatgccgccaaggtcactgccgagcttgcaaagaacctccgagttgaaactgtccctgggacactgcagcttgtatctacgcttctggatgctgatggaaagccaaaaagaggacacccactcctggatgcagatgatgatcaagatcattttgttgatatagcagatagacaagataaaagacatgatatagctggtaaccaagggcagagacgagagccgattggggacaccaataacctgctggaaacaccaacccgatcaacacacatcaacgaccaaagatacatacctagaatttggcagaggatactggagtactggtcgattcccaaggagcagccattgacagacgatgatctcctccctgcactaggcatgtcaatcatttatagcccttgctggctgtgatcaaaataattgtgtggaaatagacagagtaactgatctgatccccaatataattggattcacaagcttcagaagtgcaatggtaaattccgaagcacaacagaaggttctcttaaagtcatcgttgaaggtactgcagaggctcacaagcattgaaggggaaattggcataacactgcggtacaagatatcaaaacatcccttcttactgcgaaaccttgcagagatcttgcgagacaatagcagcaacaaacaagaactaaggaagctcgtggtaggaatcctcagaaaccttgccattgacagacacacaaggcaagagatgggacaaatgcaaatgctcattaccacgctgatcaaggcattcctcgattttaaaggattatttagttcagatgttgattgcttgctgccaaaggtcgccgggcaagcattggtaatgctgtcatcagaaaattcgcataactgctttgttatgttgaaggaaccagatttcattcataaactaaaaaatatgatcctaatccatggtgataaatacatatatgtggcagcgagtctattgcgtaatatgtgcctgtatgctcaacatgagctcacagaatcagaccaaaaggaactatctcacacattgcgagaggtgttggaaagaataatggacactgaaggggcagaactagaaatcctcattggccttagttcacagatatgcaaactcattcctgaagaattttcccaagagctagagcatggacagattaagcggagattcattaagaggctagtggacaccctgaatgcaaacatgaacccaagttctcattgccctgggatccggagggtggtacttgagcaatccatacacatgatggagtacaattctcgctatgccaattatttcaatgaataccagatgatggatgcactgtcgtttgtagaattgacaccctcaagggctgagaattacatggttttcttgggtgacgcaggtttcatggaatgtaacacacctctctctgccctagtggacagggcaaaagaactgatgggtcgtcagtggctgcaaggtatcagcagtgccaactgaaaaaaataaaatgtttttgcatatacagtcagaagaccttgcatattgttagtgcagggcaaacaaagtgattctgcatttacagtcagaagacaacgcatgttgctagaaagaacatatatttacctttaagatgagcaaagggtattgtatctgtacatcatgaatcttgcactgtaatctgtgtgctattgatgatttatccaattatcatttgttgagtggcct

SEQ ID NO: 16807 - DNA, 3764 bp, Oryza sativa
  ref <308>: DATABASE ACCESSION NUMBER: AK067279
  ref <309>: DATABASE ENTRY DATE: 2001-12-06
ggtggagtctctgataataagtgtcgatttttgttgttccgggagaaattccgggagatttggggcggcggcggcgatgaggattcggggagacggcggaggtgatgaggaggaggcggcgatggcggtggtgtcggcgccgccgcagcatctggtcttcgcgtactacatcaccggccatggcttcggccacgccacccgcgcgctcgaggtggtgaggcacctgatcgcggcggggcacgacgtgcacgtggtcaccggcgcgccggagttcgtcttcaccaccgagatcagctcgcccaacctccacatccgcaaggtgctcctcgactgcggcgccgtccaggccgacgccctcaccgtcgatcgcctcgcctccctcgagaagtatcatcagacggccgtgatgccacgcgaatcgattctgaggactgaggtggaatggctcaacacgatcaaggccgacctagtggtttcagatgtcgtccccgtcgcgtgcagggcggctgcggatgctggcattcgatcggtgtgcgtcaccaatttcagctgggacttcatttatgcagagtatgtcgtagtagctggacatcatcatcgctcaattgtgtggcagatagcagaagattattcacattgtgaattcttactacgactccctggatactgccctatgcctgctttccgtgatgtcattgatgttcctcttgtggtgagaagattgcataaatctagatctgaggtgaggaaggaattaggaattaaagatgatgttaaggtggtcattttcaactttggaggacagcctgcaggatggaaactgaagaaagaatggctgcctgatggttggctctgtttggtatgtggtgcatctgaaactcaagagcttccaccaaatttcattaaacttgcaaaggacgcctatacacctgatttgatggcagcatctgactgcatgcttgggaaaattggatatggcactgtgagtgaggctttggcttacaagctgccatttgtatttgttcgtagagattatttcaatgaagagccgtttttgaggaatatgcttgagcattatcaatgtggcgttgagatggtacggagggatttacttactggacactggaaaccttatctgcaacgtgctatgacacttcatccatgctatgatggtccaataaatggtggtgaggtggctgcacatatcctccaggacactgctgttggcaagaagtatatttctggcaagttgagcggagcaagacgtttgcgtgatgccatagtgctaggatatcaactacaaagggctccagggagagatgtcggaattcctgactggtattctgtgtctgagaaagaaatcggtgttcgtccagcaccaacatatcatgaggttaatggaagtgcagagtcatcttttgaggacttcgagatactccatggggacatacaaggattaactgatacaatggcatttttaactagtttatcaggacttgttggaaatgatccaaggagccctgagaagcaatctcgagagagggttgctgcttctgttttctttgattgggaggaggaaatatatgttgcaagagcacctggacgtttagatgtcatgggtggcatcgcagattattcaggaagtcttgtattacagatgcccattcgagaggcttgtcatgttgctattcagagaagtaatcctatgaagcagaagctatggaagcatacacaagctaggcaactagcaaatggcagagcagtgccgttgttacaaattgtatcatttggttctgaattgagtaatcgtgcaccaacctttgatatggacctgtctgattttatggatggtgacaaaccaatatcctatgataaggccaaagaatatttctctcaggacccatcccaaaaatgggctgcatatgttgctggaacaatccttgtgttgatgaccgagctaggtgtggtcttcacagacagcatgagcattctggtttcttcatcagttcctgaaggtaaaggtgtctcctcttctgcatcagtggaggttgccagtatgtctgctattgctgctgcctatggtctaaatatccctccacgggatcttgccatactctgccaaaaggttgagaatcgcattgttggagcaccttgtggtgtaatggatcaaatgacatctgcttgtggagaagctaacaaacttcttgcaatgatttgtcagcctgcagaagtgaaagagttggtcagcattccaactcacattcgattttggggtcttgactctgggatacgacatagtgttggtgggactgattatggctctgtaagggtaggcacttacatgggacgcaagatgatcaagtgtgctgcatctgatcttctttcagaatcattaccctcctgtcctcctattcaatcaggcaacacaaattctgatgaatacgaagaacatggtgtagatcttttgaaatctgaagcgtcgctggagtatttatgcaacctaccacctcatagatatgaagctgtttacgcgagagatattccagagatcataaccggggatgcatttttggagaagtatggagatcataatgatgcagtaacaactgttgacccaaaacgatcttactgtgtgaaggctcctactagacatcctatatacgagaacttccgagttgaggccttcaaagcattgctaacagcagccaaaacagttgagcaactttcggcccttggagaattgatgtatcagtgccactacagctacaatgcttgtgggcttggttctgatggaaccgacaggcttgttaatatggtacaagaagtccagcacaggaagacctcacaggatggtggtcctagtttatttggtgcaaagataactggtggaggatctgggggctcggtttgtgtcattgggaaaaattgcttgaaaagcagtgaagagatttttgagattcagaagagatacaaagctgctaccgggtacctaccaattgttttcgagggctcatctccaggtgcaggcaagtttggatacctgaagattcgacggcgatccacatagccatcaatcagcctaactgaagatttggctgtattttaggtccacacaaacatttgtcaggaacctgaatattacctgttcatatggaacacatatcacatcatcccattatgtagtagtaataagctctctagttcatgcaataattctagtgattagtgcacctctggtgcagacttccattgtgtaagtgcagtatccagataataaaatggaagtctttagattgatgttctgcaatagctgatagcctcaacaccatccatttgcatgggtacacagtggctaccgacttcaactattggatcggaggctatgcatgcatcaaggagcagttgcatttgcaagggacaagacatggcttctgatcaagcagacagcagatgcaaactgggcattgtagagtagcagcatggccttctgttttcagatggcaagttgtgctaacctggagagatctgaatgttcagagagtaacacatccttttctccttttttggtagtatcaagcagctggatgatgatttcattcagccttatcatgaatagggcttagttagtgtattatctggaacaatcatttagcagaataattgatcagttagcttagctctagcttcttgttagagttttgttactgtttgcagaagttgatgccagaaagttgtctagaatcagagttatactgttgcctgac

SEQ ID NO: 16808 - DNA, 3135 bp, Oryza sativa
  ref <308>: DATABASE ACCESSION NUMBER: AK067280
  ref <309>: DATABASE ENTRY DATE: 2001-12-06
gaaattgaattatctcgtcgtagaaaaattctgtaaaaattttgttaggtcttctcctcctccgccgtctcgtgcgccgatgcaagcggcaaccggcgaaatccccgcggcaaccgccggattccatggaaatctcgccggcgtccgccggtagccgccgcggtcacccaccctagtcctcccccacagctcgctcgcgccgctgtgaatcagtgaatgacttccggtttctcgcccgactccgcccagtctcctcccggttttcccctctctgagctcgccgagcagatctgccggctggagagcggcgagcacaaggaggaggaagccgccgacgccgacgccgacgcggtcggcctctaccatctgatggtcgacgagagaactgaggcagttggtggttcagacaccataatggcatcacctccagcttctgcctcaaggccactggatcctgcatgggttcatgcaaaagtaattggcaattcaaagaatgccttagcatgtcttcattgtgggaagaagattggtggcggtggcatcacccgctttaagtaccatcttgctggaattaccggccaagttcaagcctgcaagaaggtgcccaatgatgtcaggcgtcagatgaagcaacttgtcaatgagcataggtcacggcatgacactcgagatggccactattcaggctttgaagaggattcttctgatgctgttttgtcgaatggaagctcaggggttcaacttaggccgtctaggaagcgaagaacagggtgtgtttctccgcaagctgctgcaggctttgaaagaacaggatacgtctctccacaagctgctgcaggttttgaaagaataggatacatctctccactagctgctgcaggttgcgaaagaacagcatacgtttctccacaagctgctgcaggttttgaaccaagcaatgatgcattgttggtatcacgagacttggttcaacatagcatggatggtgtggaagttccaaatgatctgttacacaatgctagagttgctatggcaagatggtggtatgatgcaaatataccctttagtgcagcaaaatctcctttctatcagccaatgttagacgccatagcatccgctggagcaggtctcaagggaccgttgtatcatgacctacgcgggccattgttgaaacatcttactgatgacattcgcgaatatcttcatgatatgaagaaagaatggaatgcatgcggttgctcacttattgctgataggaagaagaatcatggagagagttcaataataaatttttttgtatactgccgacgaggtactatgtttttgaaatctgtcgatacttcagcagagaaagcaaatttgcttgagatctttgatcaggttgttagagaagttgggccggaaaacattgttcagtttatcactgatttagatccgagatataagactactgttaaggttctggaagaaaggtataaaacttttgtttggtctccatgtgcagcacgttgcattgacttgatgttggagaatctcgcagatcctagatattttcctatgattgatgaaactctaaataaggcaaagaagataacccagttcatatataatcatgcatgggttttgtcattgatgaggaaagaattcacaggtggtagagatctgtgccgtccagccatctcaagatttgccacacatttccttagtctccaatgtattcttaaatttgagaaagagctctgccaaatggttactagtaacaaatgggtaaaatcaacttatgctaagggtggtgtcggcaaagaggttgcagctatgattttgaatgcccacttttgggcccagtgtaagcatgtagtcaaggtcactgagccactgttgtgtgtgcttcgactggtggatagtaatgaaaaaccttcaatgggttacttgtacgaagcaatggaaaaggcaaaggaattgatcagggcacggatgatgcataaggtgtctctttatgggccgtatgttagagtaattgatgctaggatggagaaacaacttaacagtccattgcaggcagcagggttgtttttcaatcccggaatattctttagtcccactttcaagatgcaaagctatgcacatagaggacttgttaagacaatttcttgtctggtccctgatgatgatattcaagataagatatttctccaacttgaggagtataagaaaggaactggtgactttggcctaccaattgcaattcgtcaacgtgaaaaacttgatccagttgcatgatgggataactttggcaatggaactctcaagctccaaggtcttgcaaagcgagtccttggccaatgctgcagcgcaacaggctgcgaaaggaattgggacattttccatcatatccactcaagaaagattagcaggcttgaacgctcaaggctaagtgatgttgtcttccttcaatacagccagaagcttcgggaacggaaccttcacaaacacagagatgccatcgacccaatcagcattgacaatattgatgttttagatgaatgggtcagtgaagagcctagccttctttgcagagatgacctgaactgggagagaatagacgcaccatttgccgagccgacttctgaagacgaagaatttgtcgctattgatgacgaggaggctccaacagcgtcactgtcctggccggcagcagcagcagaagactcatattgcccaccacctgatcaagatccctatcagtatgtcacccaggaggatggaattctacctttctgaaaccgggaacttctgctctgtagcgaactgaaaactgtcattaggacacacatctagctaatgtcttggaaaacttcctgggcatggatttgtatcggtttaactgaatctgtccagttaggaaatgagaagtttcaatctactgctgaaatcatttacagtctgaggcatgtgcaaagcttattttccatcccccccccccaccccccaatcccctcctgttggttttggatgcttcagagttcagacttaagctgtgatgccaaaacctggaaggctggaatttctgttccatagtgaactgagctgtcattgggacacatatattaggttctgaaactttccctgtgcatg

SEQ ID NO: 16809 - DNA, 1521 bp, Oryza sativa
  ref <308>: DATABASE ACCESSION NUMBER: AK067281
  ref <309>: DATABASE ENTRY DATE: 2001-12-06
gggggccgtctcctccttcccctctccgctcgcctccgcgattcccttcccatttcgccgccgatgaagggcggcgggggcgcggcggcggcgtcggcggcgccgggggactacgtctacttcaagtccgtcgtcccgctccacaagatctcgattggaccgaaattatggaggtactatgattttggaccaaagactgttccacctcttgtctgcatccaaggaattgcaggaacggctgatgtgtactacaaacagatcatgtctctctctatgaagggttatcgagtgatgtcaattgatgttcctcaagtttggaatcaccaggaatggattcattcatttgaaaaatttttggactccatgaatatccatcatgttcatatttatggtacatctcttggtggatttcttgcacaaatatttgctcaacaccgtccaaggagagtaaagtccttggtcctatcaaatacttttcttgagacacataagtttgctgctgctacgccatggtctcctgttgttaattggaccccttcttttttgctgaagcggtacctattgacaggaatccgagatggcccccatgaaccgtttattgcagactcagtggattttgttgtgagtcaggttgagacgctgtcaagagatgatctctcatcaaggttgatgttaaatgttaatgttgcatcagttggatcattaatgctacctgattcactcatcactataatggatacaaacgactattccgctgttcctcagcagttaaaggaccaagtgaatgaaaggtacccaggtgcaaggcgtgcagtactaaagacgggtggtgatttccccttcctgtcacgtcctgatgaggttaatttgtaccttcagctacatttgagacgagttggagtagaacctagaccagatctggtccaaggtttcacacgtaatggcagtgctgggagctcaaaggaccaaaaagatggtggaaacaattttgacaatcatcctggagataatggtggccctggttcagggggtcatgatcatgagacacagaattctggatcagaatcacatgattctgatgaatcaataccaacgagcacaatgcttgccaataccattctaggtacggttagctcaaccctgcaagcttcactatgtgtgctcttgatacatcattactatgagtctgctttgtatatttcgtcgagacagccattggatgtatgaagtagggaatcaccccttttgcccccatgtagagctcgctttgtagaatatcatcgtggtacgagtgtcatagcttctttggagtgggttcttacttcgttgctgccaacgggaaaggcacatcaacaaccaggaaaacaacttctgtatgtttgtatattagctcttgtttctttatcaatccttctttttgtgtttctaggcctgtaaattgaatttgatctgcctgagacatgaatatgattgcttaattttcttgtagttgcaccataaaaagttgcgtacagtttcatg

SEQ ID NO: 16810 - DNA, 2575 bp, Oryza sativa
  ref <308>: DATABASE ACCESSION NUMBER: AK067282
  ref <309>: DATABASE ENTRY DATE: 2001-12-06
tagtcttccaactttttcccccatcggattgcgccccacgctgtcggcgatggccacgatcaccttgaagccgccggcgacggcggcggcggcgggaggggaggtgtccgaggtggagctctcggaggcgggatcgccggatgtcggcagccagagcagcgggagcggtgggagcgggcggagcacggcggggtcctccgggtgggtgtaccacctcggcgtgaactccatcggccacgagtaccgccacctccggttcctcgtcatccgcggcaagacggtggccatgtacaagcgcgacccgagcaagaaccccggaatccaacctatccgaaagggtgttgtaagtcacactcttatggtggaggagcttggtcgccggattactagccatggggaactgtatgtcttgcggttttacaatcggttggatcaaacaaagaaaggagagattgcatgtggggaccccggtgaagctaggaaatgggttgaagcatttgagcaggcaaaacagcaggctgattatgacctgatgacgagaggggttagttggaatagatcccagaatgaaaacgagcttaatcttgatgggcatcgaccacgtgtaaggagatatgcacaaggcttggggaaacttgtacgaattggtaaagggccagaaaagctcttgcggcagtcttcaaatcttcaaagccatgagataattaatacaaactttggaggcgattctggagatgcattcgaagcacacgaatggagatatgttcgaacatttaatggtataagaatttttgaagatattgcaaacacaaagggtggaaaaggggtacttcttaagtctgttggtgtggttggggcgaatcctgatactgtatttgcagtggttctcagctctgataagcataagcgatatgagtgggatatgctgactgccgatttggaattggtagaaacaattgatggatactatgacgtggtttatggaacctatgaacctagatatttaagctggtggaaaacaaagaaggattttgttttttccagacaatggtttcgtggacaagatggggcatataccattttgcagattcctgcttgtcacaagaacaaacctccaaggcatggctacgagcgtacaaaaatcaattcctcaacatgggaactaagaaggttgaacccaccaggatcatcaactccgaaatgccttgttactcatatgttggaaatgagcccaagtttttgggatagatggaagagaagacataacgagaattttgacagaagtattgcttttgctttgctcagccaagtagcaggtctaagagaatactttgcagcaaatccagctttgacatctgatttgccttcaacagtagtgaagcccaaacagtctgattctttgatcatccagagtgaactggaagattctgaacttaatgatgaattctatgatgcacttgctagaggcgaatcctttgaagatgaggatagtgatgacgatgatgatatgattcctaaggctggaaaagtgaagttcaagaatatttcatgggctatcgcaggtcttgctatgaaaccgactaaagcttcggttgagaagagtgaattggttacaaattcaactccggtaactattgattcaaaccatttccatggcacccttcgacgagcgaaaagtgagaatgacccaaactcttggagtgagcctggtggagagaagttcatgataagaggaaagacttacctgacagattacactaaggttgttggaggtgatccccttctaaagcttattgctgtcgattggtttaaggctgatgagcgttttgattcagttgccttacaccccaagagcctcgttcagtcagaagctgcaaagaagattcccttcatactggtcataaacttgcaggttccagcgaagccaaactataacttggtcatgtactacgcagcagaaaggcccgtgaataaagattctctgttgggaagattcattgatggaaccgatgcgttccgagatgccagatttaaacttataccaagcattgttgagggttattggatggtaaaacgtgcagttggaacaaaagcttgtcttctgggaaaagcagtaacatgcaattaccttcgccaggataactttctagagatagatgttgacattggttcttcatccgttgcacggagcattattggtctagtcctgggatatgtcacaggccttgttgttgatcttgctattctaattgaggcaaaggaagagaaagagctgcctgaatacattcttggcacagttcgcctaaatcgtgcgaatcccgactctgcagtacccatctaaagtcagttctatatttcttggctcaattatccttttctcccacagaaaaggtgggattttttttggcagatctgcttttctgcaattttctttattatctgtggttgcataccatttgtaaaaaagaaggtagcatcaatttcacatgtacagattacctattacagacatgatgctgtcgtacatacaaatagaggaaatgagcgtttatttatctccagtttggggacagcg

SEQ ID NO: 16811 - DNA, 2767 bp, Oryza sativa
  ref <308>: DATABASE ACCESSION NUMBER: AK067283
  ref <309>: DATABASE ENTRY DATE: 2001-12-06
gggtttggccgcaatccaccaccccattcctatccatcctccttcagcttcttctttcttctcctcctcctccttgactgtcctaacaaaaaaatcgattttttgttctcctcttgatggttgctgcgaccttcgatgtccctatgcggaatgaaatctcctgctggggcggctaaaaatcggagattttctgtctttttgatccgtctttagtggagctttttgagcctgatttatgcgatgggcttcttggcgtgcttgttcccatgtcctcaagaggtgagagatgaggatgaggaaccaagaagcggccagagagtcagctcaggtggatttaattattctttttgttggaattcgttcttatgttcttgcaatcttgcttaaaaattggagtagaaatgtttggtgctgattggttagtgtcacttgtagcagttcttgtggagctaaatatgctctcaggtataagaggggcttttctttcatgcagtggaaggaaaaaagaatcgagttatttgtgatctattgatcttaatgattgtgctgttgggttcgggatgattcaggctggggttgtacattaatttaattttttatttagatactagacttattgtagtcaaccatcaggatttttcaattgtttgctcatttccccttttggtttgtggtgggagcaattatttgtgcaattcatctgaagtcacacgagaggatccaaaattagaagtttgtttgtaagtttggactttggagtgcgtaatttcaccgggagaagaggatagaaagaacatgaattagtttaagcggaattaaaattatgaagaagacgaacactgtggtagaaaaggaaacagtctgggtggactcgaagaaaatcgctaattttctactattcttgttttcgatttccaactctgtttctctttcaggatgtatcgagtctatcttcattaacagtggacgtgttcttttcttcccttgaaatttctcaataacagtggaatattcaaagtcgtcagagagttgcccactgaagactgaagggtcgatagatatggttggaattcggcgaaataaggggcatggtgaagcaacgatcttcactttgcgcgagcttgctgatgctaccaacaacttcagcacggagtgccttttgggccgaggaggattcggcagtgtgtataaagcatttctcaatgatagacaggttgttgcagttaaacagcttgatctaaatgggcttcagggaaacagagaattccttgtggaggttctcatgctcagtctcttgcatcatcctaatttagtcaagttgtttggttactgtgtggatggagatcagcgcctgcttatttatgaatatatgccattgggatcactagaagaccgccttcacgatctcagacccggccaagaaccactagattggacaacacggatgaagattgctgctgatgcagctgctggtttggagtatctgcatgatgaggccattccagcagttatttaccgggatattaaaccgtcaaacattcttcttggcgaagggtataatgcaaagttgtctgactttggacttgctaaacttggtcctgttggtgataagactcatgtgacaactcgtgtcatggggacacatggttattgtgctcctgagtacctctcgactggaaagcttacgatcaaatctgacatttatagttttggtgtggtctttcttgagctaattactggacgaagagcgcttgacagcaatcggccacctgatgaacaagacttggttgcatgggctcgtccattgttcaaagaccaaaggaaatttccaaagatggcggacccctcattacacggccacttcccgaaaaggggtctgttccaggctttggctattgcagcaatgtgtctgcaggagaaagcgaagaaccgcccttccattagggaggttgctgttgctctctcttatttagcatcacaaacacatgaaagtcagaacactgctgctcgccataccctgcctggcccttctgtaccaagagtgctggataatcagattaaccaagacacttccttgcccagtcaacatggagttcatatgccaccgcttgccgggacggatcacatggtacaagaagtcaaggagaattgccggagcagttcgcatcgaccgggaaggggcagagttaccccgaacggcgctgatagagagcgtgcgcttgcagaggcaaatgtatgggtcgaggcttggagacgtcaagagaagacgagcaaaatgcggtaatcaacgaaaagcttctcgctgctagcttcatttgatcataggaacagaattgacaaggtatgccacagattgcatacgttttgaagaaaccgcggaccgaataataactgttagaagacgatagcgaataataatgatcagtgagttcttctgtggacctacaccagagtgagcgcttgggagatttcaccggtgaagtctactaaatttacatccagacttgtttcactacatacatggattcttatttctcatcatatagataatttagcttctataggttaaagtcgcaggaggggatatgtacatgtaaataaccccctcataacagaagtggcagatgcagagcatacatatatttcttttctgtagttggatgtctcttgtgaatccatgtacatgagctggtaccataagtgctacagcttatacatttttcagatgattcttggtgttaactctcccttgcaattctctgttccc

SEQ ID NO: 16812 - DNA, 2768 bp, Oryza sativa
  ref <308>: DATABASE ACCESSION NUMBER: AK067284
  ref <309>: DATABASE ENTRY DATE: 2001-12-06
gacgtaactggcataaaaacaggttaaatgttgccgatgcagcgctgctatacaaaaatgcaagtgtaaatttcatttttcatttctgccctccttaatcttggtattaatcaccgcagccaatgacgtcgtcgtgtcggcggcgacgtcgccgccgctcaagttcgggatcaactacggccagatcgcgaacaacctgccgcacccgacgcaggtgtccggcctcctccagtcgctgagcgtcaaccgggtgagctctacgacgccgacccggccgtcctcgccgccttcgccggcaccggcgtggagttcatcgtcggcaacgaggacctccacaacctgaccgacgcgcgcaaggcccgggcgtgggtggcgcagcacgtgcagccgttcctcccggccacccgcatcacctgcgtcaccgtcggcaacgaggtgctctccggcaaggacacggcggcgatgcagagcctcctcccggccatgcagtccgtccaccaggcgctgctcgacctcggcctcgccggcagggtgaacgtctcgacggcgcactccgtcaacatcctcgccaccagctacccgccgtccgccggcgcgttccgggaggacctcgcgcagtacatccagccgctgctcaacttccacgccgaggtcggctcgccgttcctcgtcaacgcctacccgttcttcgcctacaaggcgagcccggcgagcgtgtcgctgccgtacgtgctgttcgagcccaacccgggcgtacgcgacccggccaccaacctcacctacgacaacatgctgtacgcccagatcgacgccgtgtacgccgccatgaaggccatgggccacgccgacatcaccgtgaggatctccgagaccgggtggccgtccaagggggacgacgacgaggtgggcgccaccccgcagaacgccgccgcgtacaacggcaacctcatgaagcggatcgccgccggggaagggacgccgctcaagccggccgtccccgtcgacgtgttcgtgttcgcgctcttcaacgaggacatgaagcccggcccctcgtcggagaggaactacggcctgttctaccccaacggcacgccggtgtacaacatcggcttcgacgccgcgtccttcagcccgtcgccgacgacatccacgttttcctcctcttccaggccaacgagtacatttctgatgggggtggttgtcctactcgccgcattcctcctctgacaattttctccacaagtatattgcacgaatgatttgggattgttttttgaccgatatagttcgatttgtggttggttgcatagcacagaaaagcagatacattgttctaacctcgaggtaagcttgtcttgaccatgttcttgttcagttgctcacacagttttcagaaaccgttttttgtcagtaaaattgccatcttacaagttacaactaggttattgcttactgtgttagccatgaaattgattagttcagcataattttgtagacataatggtaggtgatgggtcgatcctatctcagtggcaagatatgtttggacattttcgcatctggtgcgtcatgtgaaagatgtcgttcagttagcgcatttcccagggaggtaggccggtggttgatcggttgttgcatgttttaggattctagctctggctatctcttcagaactctaaactgaccgaccaaccaacgcccaacgagaagattctagtttgcgtcatgggcaagaatcgaataagcatttggcacagaagtgggcattattcagaagccattgattgttcatcaatttcgtcaggaacagagcattaaactaactaaatcctcaataattttctcatttcgttatcttaattgtggaatcttggaagaattgaattgactgtttgttgtagaaaattaggtgggctttttttttcattctagcatatggatgtttaggcagatctcttactattcctcacaattgaattaggtaggagtaagaagagtactctgtcgctaagttgacaaaatgtggaatatatgcgaggacagcgttttcattcattgtatagtggagatgatcaaacaagactgtactttacctgcttttgtcaactattcgcttataatcaattactcttccggtactaaaatataacaatttaatattggattagacacatcatagtactattaatttgaactgttatatcttgggacagagggaataattggtagctctcttgctgttaagttaagaaaaagtcaaacaaaacaatacccctctttgttttcatatatggcatgctgcaccaaaatgacaaatttatttgaagaccagtttaatttctaccaagcctagggaaacaagtttctgtctgaaacttgcatgtaaaatctgcaattatgctgctaattttcatgccaacaggccagccaatatagctcctgataatatgttgctccattcatttataatgcaggatagcagggtccatttttcatctatagtttggattttaaagattgtaatcatagagcacaggagaagggtcatgcatatcataggcactcctacacaggaaatcgttttccccaaggaatcagattcaagccaagagttaaattggaaacacaggtggcagtgacttgttctgtagctgtggtgattcacatcacttgctgatagagagtgatagtgttttgtttgcttctattattgctgtaaaaaaaacagtaagtttaatagtctattcatttggttcccagttatacgt

SEQ ID NO: 16813 - DNA, 1492 bp, Oryza sativa
  ref <308>: DATABASE ACCESSION NUMBER: AK067285
  ref <309>: DATABASE ENTRY DATE: 2001-12-06
ttggcaacgtgcaaacctaacccacactcctcctccctctgcgccttggcaccatatccctccacgatcgccttcccttctcctctcccgccgccgccgccgattcgatctccatcccgcgccgccgccgctgcttccgccgcatcctccctccctgatttgtggatatggctgataacgacaaggaggcggcgggagagggagcaactccccgtggagcggactgggaggtggtgactcttactgcgtccgcctatgcggcggcgccggggccgggtggagcaggagacaggccggcggctgagaccaaaggccttgatgcaagtcaggaaggagaccagaccaaaggccttgatggaagtcaggaagggcggggctcggagagcgcgctgttcatgtctggccactttgtgttccctccaagcgagcatgagaatctgccgatcgatgccggctttgatgacatccagcataagaaggatgcgcaggaagcgagcacgagcgtggaagacgagggtttcaagaatgtcggtgggaactatggtgctgggttggagaggattcagttctatgatgaaggaaggaacctctcggccaatgatgtagagatgatgatgggtgatgctgctgagcatggctcgtttcatgctcaggacgaggagcaaggtttagatgatgataatgattttgatgactctcatgacaaatcagatctgccctcagaatctgcggacagcaaaagccgtgattctggcgccccttgcaaatgctggctgaagaaacatatgtcatgcctgtatcaccaagccaaggaaacaaatgctctctggtctgtggtggttgcagctgctcttgtcgggctcgtaatcttgggacgctggcacaaagacaaactgcaccttaagaatcttaaatggcgatctggctcaacagtgagagggtgaccaacagggctggtgggtgtttttatggtcttcttcgatgcaacctctgatgagtcatcacatgtcatctgaagttgtaactgagacggttggcaatatgattgtgacaatgacgaaaggagtatacctaatgtaataatatgaagtttgacagtggtgcttgtagccttcgtttggttgccttgccagctctgagatgccgaagtttccaccgctacacacaccaccgtaccattgtacacttgctatgctacattttcttttatgttctgaggaatggctgtcaacacgcaattgcatactgcgaaatccatgtaacctcgttgttcttccagaacaaattcagatgcatttgtgctgttcttttaagaaggaaaacctgggagtctcgtttactgttccttacaggaggtggtttcacttcagtttttatcccttcacaactgggatgttgcttgtcattatcatggttttttttgtattgcaagcattatgattgctacccatatgaatcagtgtttagacctccatggtcgtattttctactc

SEQ ID NO: 16814 - DNA, 622 bp, Oryza sativa
  ref <308>: DATABASE ACCESSION NUMBER: AK067286
  ref <309>: DATABASE ENTRY DATE: 2001-12-06
gggggttcgattcgagtcttctctctcgcagcagcacaaagatggacgcaaacagacgccaaagtggaatccagcaattgttggctgcagagcaagaggctcagcaaatagtaaatgctgctagggctgcaaaatcggcaaggcttaggcaagcaaaagaggaggctgagagggaaatagctgaataccgtgcccagatggaggctgaatttcagaggaaggttgcagagagtagcggtgactctggtgcaaatgtcaagcgtcttgagcaggagacagcggaaaaaatcgcacaactcaagcagcaggctgcaagtatctcccctgaagtgattcagatgcttctgaggcatgtcaccactgtgaagaactaagggttgatggcttgctgctaggcgatttgccatacatctgatggcaaacttgtactgtttattttttgagagggtggtaagaataacttcgtctcttctagctgtaattccgtgttccgaataacggaataaactgcttctgttcatcagcagccatgtttcgtactttgaaaacctcggttcctgtctggtaaatattatcctttcatgtatcatttgaataaaataatgggagattctttttgttt

SEQ ID NO: 16815 - DNA, 2427 bp, Oryza sativa
  ref <308>: DATABASE ACCESSION NUMBER: AK067287
  ref <309>: DATABASE ENTRY DATE: 2001-12-06
gagtccacgcaagcacgccactacatcgccaagatcgatcccctcccatccgccatggtcgatccccatcctccctcacagaaatcgtcgtgccatgttcgatcctcgtctctcgtcgcagaaatcgctcgcacagccgcatcttccgccgccacggcttctttcgtcgcctttcttagcagcggcgcccttggctccctttcttctccatgagcactgtgtgcaggtctgaggtggcgtccaagaagatcggcagcagcgcccttgctttcccctcctttggcaacgatctgcatgctccggtttaccttgcttttattcagttcaaggttaacactgcctccattttaccgtgtaagattcgatatctccatgcatgagtgggtcctggtgtagtcatgatctattaagtatggactttgagccatgcactcgattagccggatttgatgtatcatgtatggacttgatctgtgcattccttccattaacctttattagattccttttgattctcctttactgaagaattacagcggaaggtgccacgttccaattgagctttctcgtaatacataatatttttagtgggaaattgtgaatccctgttttgactttcaagatttttttcacctcatcactcgagcattacttctgatgataagctgataaccttctgacaatctttatagttttgaagtcttacaggttttggggtctaccttccatgaatataatggctactattgaaaccagaaataactccgtgattggtgtactgctttaaccaatgcctgcacattctggaagaccatcgccaaaccgatatcgatatcgtacgcacaactgagtcatctctgctagcttggttccaagtgcacctctactagctagcgatgatgagttcgctacatatttccgtttgtcttcaaggcgatcaatgccacagtgtctatataccagtccaattggtatgtcccagtgcaacttttaagctgttggctcttcatgccttactttatgcttgcatagcatatctcatgcccttcttggacgatatcatgtgtagcatgctacgctacattcaaaattttattttgttggctcataataaggacaagatcacacatgctatgaacggtcctctcatttactttatgacacaactgatcatttctatccattttattagaagtgccatgcttagacattgcaaccactgcacaggcatgtaaaaaatgtatcctgatgacattagtttatttgttttgcataatcttgtccagcataagacttccaatggtatacttttactcacatattcatttactttccagtagtaaatagtaagccacacatctgcatctggtgttacctttgctgttgccatttcataaaatattgtcaatccattccaaatattatccatcggagtatgaaatagggtcttcgtctattggatattactaatgaagtttttgacacatgaaaatatttttttagtgaattggttgtttatagttataggattgattaggtctcacatgtccattttagtaaaacgttttctcccaaatgatggattgattctgttcaaatttcatcaggtgcttatattggcaatatttccattcggtgcattgatcttcagttcaagataaataatggtctgcgtatgttctatttttcttaccgttgtcattgtcaaatgtttgttggggatgttactgatacacgagcttttgatctacacaaatgccatggtggttgttacctctaaccatattatattaccattgcatttatatcttaagatttaaattgcatttcgacataaagggattatgatattttaaaatttttctaatttacgtttggtataccatgacaataatatagcagtttaggtttttagttaattgtattggttgagaatgagttggagttgttttgttggatttctatcgttacaattgttgctttcaattgtgtacgagaaaatatttcaaacttaacttgacaggccatatatattctgcagtatattttacacacccattggcttggaaactaagtctaactagcatattttatttgattcaaccactcttttgttgattaaataatggttagtttgtcccagattatttgaatttctacatatataattgatcgccttttttcatgactttcttttagtagagtttatggtttgatgcatgtggtttactatctgctacgtatgttaacttaaaaaggaatctgagcttgtaatagttgtgtgctactattgtcattttaacatgggtctatattgtaactgggatctacctgaagttgagttggtggttctactattttgtaatcacgatgaagttgacttggttctgccattatgtaatctcaagcgatatgctgatttttttt

SEQ ID NO: 16816 - DNA, 896 bp, Oryza sativa
  ref <308>: DATABASE ACCESSION NUMBER: AK067288
  ref <309>: DATABASE ENTRY DATE: 2001-12-06
ctctcacccatcagtatgcaaattaaccatatggcaactgcttcgttgagcctcctcctctgcctcgccgcggcggccggcgccgccgccgcggctgttccgccgcgcttgcagtgctttgagcacccgccggacatgaaggccggcggcggcgaggccggcgtggtcgtccacgacctggcgggctacgaggcctacgtcaccggcgccgcccactccggccgggccatcgtcctcgcctccgacgtctacggtttccaagcgccgttactgaggcaaatagctgataaagttggtgatgccggatattacgtcgtggtacctgatttgtttcatggagatccagcaaccacaactgtgaactttaccgaatggctcgagtctcactctccggtgaaagaagctgaaaaagctaaatcaatctttgcttttctaagaaacgaagggaaatcacttgttggagttggaggatattgttggggtggaaagtttgctgtggaggtagggaaaaccaatgaggtagaagcggttgtcatctctcatccttacgcagtgactgctgatgatatgaaagaggttaaatggcccatcgagatccttggaggccagaatgacacagttacaccaccaagattagtctaccagtatgtgcatgccttgcgtcaaagaaacgatattgatttctacgccaagatttttccaggagtttcccatggatttgccggtcgatataacaccagcgacccgtttgctctcgaaaccgggaaacaagctctcgccttaatgctggactggtttcagaaacacttgaagtgatgaaacttaataaatacatgaaagaacatgcgactgtttattcagaataaattaccggtgtccgtgtacaaatttgcacg

SEQ ID NO: 16817 - DNA, 1759 bp, Oryza sativa
  ref <308>: DATABASE ACCESSION NUMBER: AK067289
  ref <309>: DATABASE ENTRY DATE: 2001-12-06
gaatattgtagttcctactacaggctctccattctcgttgccttgctagctagccttggcataggaatcctttgattgttttgtaggtccagggtagacgcatcatggggctcttaggtatggtgggcgactcattcggttgctcagctactggtgagcggcttgtctctgctgcaagggatggagacatccaggaggctatggccctgttggagcttaacccccgacttgcgcggtattcaacgtttgggatccggaactcaccccttcattactcagcagcaaagggccaccatgagattgtttctctcctaattgagtctggtgttgatatcaacctcaggaactgcagaggacagactgctctaatgcaagcttgtctatatggtcattggaaagttgtacagatcctagttctttttaaagctaatattcacaaaaaagattgttttagtggcgcgacagctattcattttgccgccctaaaaggtcatactcggtgccttcggctccttgtggctgattacgtaccaagcttgccagaattttggagtgtaatgcacgcaaaatgcacagatgaaacaaataaggaagcttttgatgcggtagctctccggaggctaataaacaacaagtctgatgggggcgtcacaccgcttcacttggcagcccttcatgggcatgctgagtgcgtgcaattgctgttagaccttggagcctctgtttcagaggtcactatcaatgatggttcaactattgatctcataggttcaggaagcacacctctccactatgcggcctgtggtggaagtgctgtatgctgtcaacttcttgttgcagccggagcaaacatgagagctcaaaatactaacgggttgacccctttgatggtggctcgttcatggcacaaaagtagtgttgaaggtatcctaaccaaacggtcagaagttccagtacgcattcttccatcatcatatctgtctctcccactgatgagcattgtcaaaattgccagggaatgtgggtggagaaaaacttctgtctcatctgtttgccatgacccatgcgccatatgtttggatacggaatgtacagtgtctgcagaagggtgtggccatgagttctgcaccaaatgtgcgctctacttgtgcgccaccgctagcagctcaacatctatccgtggtgttcctggctccataccttgccctttgtgccgccacacgattgtctcattcgttagactcacaagtacaaccccaataaaggagcttccgtggacgaacaaatcgttagctctatgtgcagcaggggcaagcaccggttccaaatatgctggtcctgcagcaatcactagttccaagtatgccggttctttgcaccgaaggtctgagatgcgcagcctgcgctcctcttcagttgatctaggctgctcatcgtttcgaaccgcgagctcagggaagctgtcgtcgataaagctgaattgcaccggagccgacgagacgatgccctgcctcgtcaattgcttcaggccggatgtgcagcggtcgtcttcgtatagggaaagaattaggagatattcacaattttcatagcattactgtctatttgtatttgtgcctcccatccattttgtgagtttccgggggtttggcagtacaaacttgtgcagtgtttgttcatgcttttctcttggcttcttcatacctgtagtctgttctgttcttctgcttgtggtcttgtaacatgacatgtgatcctc

SEQ ID NO: 16818 - DNA, 1199 bp, Oryza sativa
  ref <308>: DATABASE ACCESSION NUMBER: AK098996
  ref <309>: DATABASE ENTRY DATE: 2002-08-28
gagctcccactttccagtctcccgccgccgccgccgctgttcactccgcaccaactccgacgatcccccggcgagctctcgacgatggcgacggcggcgacggcgtcggctacggcggccacccgcttcacgcggctggcgggggtcgggctccggcgcacggcccgcctccccacggccgtgcggttccagcgccgggtgctcgccaccaccgcgctcctcaggaccgccgagctccggcccaaggagcagggcctgcccgagacgctcgactaccgcgtgttcctcgtcgacggcgggggccgcaaggtgtcgccgtggcacgacgtgcccctgcgcgcaggcgacggggtgtttccacttcgtcgtggagatccccaaggagagcagcgccaagatggaggtcgccaccgacgagtcattcacccccatcaagcaggacaccaagaagggcaacctccgatactacccgtacaacattaattggaattatggattatttccccaaacatgggaggacccaactcttgcaaacaccgatgtcgaaggagcatttggggataatgatcctgttgatgttgttgagattggtgaaagacgtgctaacattggagatgttcttaaggtaaaaccgttggcagctttagcaatgattgatgagggtgagcttgactggaaaattgtggctatttctttggatgatcctaaagcatctcttgtgaatgatgtggatgatgttgagaagcattttccgggaacattgactgccatcagagactggttcagggactacaagataccagacggtaagcctgcaaacagatttggtctgggcaacaaacccacaagcaaggaatatgctctgaaggtcatagaagaaaccaacgaatcatgggagaaattggtgaaaaggaatatccctgctggagagctctcactagcctaatcttgtccatgagaagccatcagattcttttggtcatttacctaagcatgttgttttcataagctataagcatgctgcttcttgcgaactctttggtgacctgtgtgcaacaggaacagcttgtggagtgaataaggctttctgagctagtttttctaagggaattgggtgttcttgagcagcgattgtgtttggaacaagctttacaaagtgaacaatcagtttagaagttgaatgataagcaaatatagtt

SEQ ID NO: 16819 - DNA, 1787 bp, Oryza sativa
  ref <308>: DATABASE ACCESSION NUMBER: AK067290
  ref <309>: DATABASE ENTRY DATE: 2001-12-06
ctcggtgaatagttgtgttgccaggtatttgtgaatcaggatgttccatctaatttggttttgctcgggttgtcaaatgctcaatggatatgtacctgcgcatgtgcatcaggttggtgtgcttcggcatgtggtgggttgatttacttcagccaaggttgtgctcatctcttgtatcctcaaacactaagatactgatgttcttttcctcttctcgccattcccttgcatgccatttttttcaggtaaccaggttcaatgaagaatgggagaattatgtttactgataatgtgcatttttatttactgtgccttattagttcatttggcatggacgcccttacttttgcatcagctcaggcttagcaagaaagattctcatcctgttttaattgctgacccatgaatgattaatcttgatcccccaccctcaagcaactctgttgcttttcgcttgcgagaacgcagttctgtaatctagcttaactcagaccgattccttattttattgataatctcatctatttgtcatgtgagtaatttaagtggcgcttaaacaacaatgaaacaattgtccagatgtggttggaacaaaaccatatccacttgccgtcaaaaaaaaagaaaagaaaaataagtgcaaatttgttatttcttgttcttcgtatggttaaagatggtcttcctcgtatggtcgaagatggtcttgtttctcactatgaattattcttgtgcttgcagatggatgatactctgacaactggaagcatcaggagtacacaggggaaaagagacgtttagcagaggcttcacttgcctacaactgtgagaggtaattccatcatccatctatttaggtttgtgggaaatgataaagctcttgcaagcatgtattgttagggagtaacatacttgccataaaagaaacagctcaattttcagtccgaatgctcttcccaagcgtaatgaattatgttagatgggtgacatttattacttgtgctgatgtgtaatatgatgccatcaatccttccctgtttgaagccatgggacactaacaagcttactttgttcttgtttccaaaatgtgttaatattgcgactgggtcttaattccaaaatgacaatggagaagtgggcactgaaaagaacagttgatcatgctctctatgttatttttatgcctccattttcttttcttccccttccgttgttgttcttctcttctttgcttaacatgtatctgttttgcactttctgcaccatcatccacatattaacgtgcgcagcgtgaagccacgcttgttcttctagtaacatccaatggccaatgctatctagagaatattcatcaagagcagttaagtatgcaaattattcaggagttgaatagttccaaaaagttggtatagagcatgctatctagtaattccttgatgacatgcacatcattatagaacacttagtctttacttggattttgaatatttctgttgaaatgtgaacactgactttcgacatggtcactacctcaaatgaatcattaatataccttgcctgatttttgtttttgcaggatatagaagactaaaggatttacagattacagatgaaaagagaaacggccaatgaatcagttctacatgtagaaagctgtagatagctttaattagtgagacaattgtgtgaacttcagtttttttttgccattgcacctttttttttaaatgtaccgttgagctgtaacttcgatgatttatccaatataaataaaaatagttatgttc

SEQ ID NO: 16820 - DNA, 1107 bp, Oryza sativa
  ref <308>: DATABASE ACCESSION NUMBER: AK067291
  ref <309>: DATABASE ENTRY DATE: 2001-12-06
ggttgccttgctttgcttctttctttctttctttctttctttcccgcatcttcttctccatcgcgctcctctcctctcctctctgctgccgatctgctgctgcgcgagccagagctcctcctcctcccgcgcgcggccggcaagaaccagcaagccaatccatatattttcaatgctccctctgaggtagcatgtctgaacaacaggatcatgctagcaaaagttcttgctcaagtcttagcaccagtactcaggagagtgaggaggatgtgacagttggtacccttttaactgaagcaaagaacagtggacggagtcttggaaaacgcctttcccacttagattctatcccgcacactcctcgagttaatgggcaaattcctgatgttaataatgcaacaatagaccatgaaacattactggaaagattgggcacttatggcttagctgaattccaagttgaaggagacggaaattgtcagttccgagctttggcagatcagatattccgcaatcctgactatcacaaacatgtgaggaagtcagtcgtgaagcagctaaaggaattcaggaaacactatgaaggctatgtaccgatggaatataaggtgtacttgaagaaaatgaaaagatctggagaatggggagatcatgtgaccttacaagcggctgcagaccggtttgctgccaagatttgcctgctgacatcatttagagacacatgcctaatcgagatagtccccagaggtgccactcccacaaaagagctttggttaagcttctggagtgaggtgcactacaattccttgtatgcaactgaagatcttccaaatcgcaagaccagaaagaagcactggctgttctaagtaggtagatagcctatggcaattcttggaattgtacctgccattgttcttctcactcaatctagtagcagctgtaacttcatttcacttcgctcattttctgtcattgctgatgctgtaagttgtaactcgggagcaaactttgtaagcttatgtacagtgaaatgctgtttgttcatctccttttctgaaggcctgtttcagtaaaaaaaaaaaagaagagggaaagatcccaaaatgc

SEQ ID NO: 16821 - DNA, 1249 bp, Oryza sativa
  ref <308>: DATABASE ACCESSION NUMBER: AK067292
  ref <309>: DATABASE ENTRY DATE: 2001-12-06
gactgactcgactcgagcacaatctaatctgggcttcgagttgacgcgcacgcgctctcccctcgctccccctcccacgccaaaacctccctcctcctccccctcgccgcggcgccaacgcagatcgcctcccaatccctatccgatcgagaccgcctcccctttccggctagttcgccgccgccgccgacgacgacgattgcgattggcgatggggcacagcgcgaggaagaagaagaagaagaagggcgggggcgggcggaaggcggccaaggaccacggggggcagctcgagggcgaccaggccgccctcgccgacgagctcacggcactgggttcaattttccttgaggacttcaaagtgacatcagaatcacctcagacccgttttactatatgtatcaggccttattctgatggcatgggctttggagattcgaatgtttcagcgactcttgatgtaacgtgttttgctggttacccccacaagtgcccaaagttgcgggttctacctgaaaagaccttatctagagaagatgctaatcggttgctttcccttcttgttgatcaggcaaacatttattcccgagaagggcgtgttatgatattcaatttggtagaggctgcccaagagttcttgtcagaaattgctccagctaatgattcaacaagcatggctccttggttgggttcaggcaaagtacagcaaacaactgatgtagacgtgaaagttaagcttgacaatggttcttaccatggagttgcttacatgcataactcatttgacctgtatagtcaattatatgatggaggtagttggagcatgcaaggtccagatccagcaactgatagtgctgggaaaattgttggttctcaagtcaaatctaatcttaaaagcaagaggaagacaattattgaaaaatcccgtgtttcttctgatgaggttaatgttgcaaagggtttattaccggataatgctggtcagaaaaatataatgaagcatgatgttattcgggagacagttcccagtttgcatgtcgttgcagaggaaactgaaaatgacagcaaaactgtttctacgagcaacagagaaaatacatcaggtactccagagaggagttttagcagtgtgcatcaacttgaggactctgatctttcagacgaagattggaatgatgaagattctggttcaggctctggattttcaaataccccatcttttgacatgtttgatgatgcttcacggaat

SEQ ID NO: 16822 - DNA, 3976 bp, Oryza sativa
  ref <308>: DATABASE ACCESSION NUMBER: AK067293
  ref <309>: DATABASE ENTRY DATE: 2001-12-06
aaatccgatccgatcagacgcctagtttagggtttcagagctttctccccacctctcccctcccctcccccccctctctctgtcgtcctcttcctcccgctcgcgtccgccattgacgcggcgcggcgcacgagctccccctcagatctgaccaatccacaccgcgaaccctctcacctgacgcaaccccgaatcttgcctggaacggcgaagaattcgaacacaaatctgaagcacaccgtcgtcactaagaccacacactacatctgatttttttttgtttctccacaccctgattgtttctagatttttttttattctcgtttcggacgcttcataagaacagatctgcgagcgagttcgcggatcttatctatctgtgtgagaaccaagacccttttgttgcctgtggacacgatccgaacgaactttgacctgaggattcgtttgagatctgtttgctgctggtctcgagagaatgatcaggtcgatggtatatttcgggaacacctccatcggcgaggtggaggtgtggcccagcggcgacgcgagcctggcagcggcagcgtgggctcgagagatccgcgttgaccgcctttccccgcccagcgagcggtgccagccgctcgccgtgatgcataccgtggccgtcggtgctcgctgcctcgtcatggagtccaggctgcccaaggcagcggatgagccaccccagcctctcgtcgccatgcacgctgcttgcctcaaggaaaacaagactgcagttgttccactaggagaggaagaattgcatttagtggcaatgacatccaggagaaacctgacaaatcacgcatgtttctggggatataaagtgccatttggtttgtacaattcttgcttgactatgttaaatctccggtgccttgggatcgtatttgaccttgatgagacactgattgtcgccaatactacacggtcttttgaggacagaattgacgcgcttcagagaaagttgagcaatgagactgatccacagcgcataaacggtatgatagcggagattaagaggtaccaagatgataagtctatcctaaagcagtacattgaaggtgatcaggtctatgatgatggaaaaatgtataaagtgcaacctgagttggttccgccattatccgataaccatcaaccaatgacacgtccagttatacgattacaagagaagaatattatcttgacgagaataaatcctttgataagggataccagtgttcttgtacgtttaaggccagcatgggaggatctccggagctacttgattgctagaggtcgcaaacgttttgaggtctatgtgtgtacaatggctgagagagactacgccgtagaaatgtggaggttgcttgatccagactcaagattgattaactctgttcaacttaatgacagaatggtgtgtgtaaaatctggtttaagaaagtccttgctgaatgttttccatgatggatcctgccatcctggaatggccctagtaattgatgaccgactcaaagtctgggatgagaaggatcaatctagagttcatgtggttcctgcattcactccatattatgcaccacaagcagaggcaaactgttctatcccagttctctgtgtcgccaggaatgttgcatgcaatgttagagggggcttctttaaggactttgatgaaggcctcttaccaagaattagcaatgttttttatgaggatgaaatcaatgaaatcccatctgctccagatgttggcaattatttgatttcagaggatgagaatgttgcggcagtgaatggaaacagggatccattggcttttgatggtatggctgatgctgaggttgaaaggagaatgaaggaagcatctggaaatgctcaagcttttactacaacagcagctaactttgtgatgccagtactccctggtcaaaatttcgtttcatcttcagtagcaccagtagccccatcccttggcatggtgcctttgagtaataatcagggtccacctccattcactcaaccagttgctcaactgagtctctcagatccactgcaaggctctccagctagggaagagggtgaagttcctgagtcagagttagatcctgacacaaggagaagacttcttatattacaacatggtcaagacaccagagatcctacacctcctcttccagcagtacctcctgttcaagtcccagttcctccagttcaacctcatggaaattggtttcctgtagaggatggcatgaatccaaataatctaaacaggggttctgcagggttccctttggaatctgaaactatgcactatgataaaaagcaactacctcacccattctttcatggtggggaaaaccctatatcctctgatagatttagttatcagaaccagaggtatccctcccagctaccgcatagtgaagatcatcgcgttcttcagaaccatgcaccgtcaagatacagatccttccctggagaggagctagcaactcggcatgtttcttcaagtcagagaaacaaccagatagtaccaggacaacactttgctcggcatgcagggagctctgctggcatactagaggagattgctatgaagtgtggttctaaggtggagtacaggtcagcactatgtgatactgcggatttacagttctcaatcgaggtttggattgttggagaaaaagtaggcgaaggcattggcaggacaaggaaagaagcacagtgtcaagctgcagaaatctcattaagaaatttagctaataaatatctgtcatctgatccaaataagatgactgatatgaaagaaaatggttttggtagcaatacaaacatttttggataccctggaaatagtagggacgatgtgttaccaattgcaagtacttcagaagaaactcgctttgtgaagatgggggagaacaattccagaaaagcaggaggttctattgctgctctcaaggaactttgcacagctgagggatataacttagtttttcaagctcggacatctcctgatagttcagtaggcaaagaagcttatgctgaggtagaagtttgtgggcaaattctaggcaacggagtgggaataacatgggaagatgctaagcttcaggctgctgatgaagctcttggaatgttgagatccatgcttggtccacttgctcagaaacggtccagttctccaaggtcactggcacccagttttgataagcgcttcaagccagattttccacgggcagtgcaaagggttccttatggtagatattcccgaattgaaggccatgttccttgacattttaacggatacattggttctaaactctggattttttagctagatgagacgtatcaactttgcagagaataaaaaccatgacacccggtcatcttgcgcggcttctactggaaacatggatggttgtggatgcaccaagaaattgcaagcaattgtggtggccatgtcttcatgctgatacttgctttgggtctgatctcacgttaattgacatgtttgacttgaagtgtgcccatccttgtggatacccagacgtaccgcttccgtgggggcttgtgcagcttctgtcctgcttgggggaacttcaatccgtggctgcagaggcgctgcgaccgttttaacattttgtttgtaggataagtttgtagcttaggtttggagtaggtagctaattttgttgcggtggaagtaggtattaatcctacattaaatcccgtgtttatttttttaggtcaatactgacaaaagttcagtagctagatgtttattatttgtttctttatgtagtcattctttattatgttcttgtcattatttgtaaagatctacggtttgttgattgtgttgccggtgtaacctcgcatcgcggggtggcctctcgaatctctcgtatgttgtctcctgctgaaaaactgtacacgtctgctgtggtcgtgactacgaagttcttcc

SEQ ID NO: 16823 - DNA, 2092 bp, Oryza sativa
  ref <308>: DATABASE ACCESSION NUMBER: AK067294
  ref <309>: DATABASE ENTRY DATE: 2001-12-06
gagtagtaaaaagaaaaaagtttgtactgtactaccttgcagtggagtgcctcgcggtggccgccggggtagaggaggacgaactcgccggcggcgagcagctggtagatgtacttgtaggtcatggggacgccgccccagaggttgaggaagtcgaagaagtcgtggccctcggaccacgtcttggtcttgttggggaacagcagcgagatgagctcgatccccagcagcatgtggttccccaccagcagcaccggcccttcctccggcacccccgccagcccccgcaccaccaccccgtcccccatcgtcgagaacatcgccgggcacgtcctcgccctcaggtcactgctttttcatccatcccattttcatccatgttcatggatgcatggtgagccactctactttcttactctcaatatttaattacatgttcagagattcagaaatccagaagtgaaccttttcaattctccaagtacatgttcagagattcatagtgatagtaaaaattcagaatttgttttatgaaaagagaaaaaaaaaaagaacagtactgaacttcaggaattcagtactgaactttcaagtctaaacaacacttgttcagaaatttagctctgaactttcaagtcacaataacacatgttcagaaatacagaatgatggtaaaaattcagaaattcagctccgagctttcaagtcgcaacagcacatgttcagagattcaaagtgattttaaagatttagaattttgtcttttcttaaaagaaaaaaaatcagtactgaactttcaagtctcaacagcacatgttcagaaattcatagtgatggtagaagtttaggaattcagcaaaactttgaattgttacctgccagctttctcgacctccttgagctcagtggctgatggggggatgtagtcgaaaacccggtggtaccgcctcgagtggcggtaaaggctggtgcatttgatgatcgacgagacatgaacaccgtactcctgaattttttattgagttttaccatcagcagggtttccttcacttctacattttgttcttttcagttgaaaaaaatgtctttctaaatttgcatatggctgctgaacctcaccaacagtaagctgtgcccatggttctcgaagaagaacactttgcatttaggtagcgttctctggagcctgtcagcttcagatttgcttggaagtaatctgtcagcacagctgaatgcaaacataccaaagtacgttttcgatcatcataacagaaatgtagttatcgagatccaacagaagcaaaatactcatgttgggatagcttgactgaaactatgtccaagaacggtgaaattgaaaaggtagaaaaccagagataaatgggttgcttaaggtagcaagaaacctgactagcagtagcacttcagctgaaactgattctagacggcaattagcatatgaagcagcctgttggatcagcttcattttccatcctagagtgtcctccggtattttatttagtatgttctacagtgaaattatagaatttgaaagccacattaattaaatataagcagaaaattaaatcatttctactgctcgtccccctttctcctggcttgataaaatgggacatagtagcgggacgcacaaaaaagaacggtacataccgaatgcttcaggaatgatgatatattacttgttaatctgtttagtgcttctaaaggatgtcttccacttttcatgctactcaatgccatgtcaacttcattgtctgccctcatgatcaggaagaacagaagaagcggatgcagagttattaaacaggaaatgtgacaacttatggcaaagtacagaaattaaatgatgaaaactggaaagcagtcctgtagttatcaggttatttcagccaattaaatgtttcattatgcttggttattttcgttcttacatatctttttctaaatcttctgtgctgcaacttaggaaatacttaccaatattgtagttcagaagagatgtaattgcaatccgtgcacgatccgacaacgggctggaaaccgacaggagctgttttatgtctgatttctc

SEQ ID NO: 16824 - DNA, 1548 bp, Oryza sativa
  ref <308>: DATABASE ACCESSION NUMBER: AK067295
  ref <309>: DATABASE ENTRY DATE: 2001-12-06
gaacctttgccattcccctgtcttcttccatctccaaatccttcttccctaatccccctcgccggcgaagcgcggcggcggcggcggcgccttcttccctaatcccctcgccagcggggagccgcagggcggcggaggcgtgcgtcggctgctgctgctgcgcgggcgggggaggtggggagagatgcacagatccgcgggcgccacgatggcgtggaacgtgttcaggttctgcactgcgctgagggggctgggctccatcatgatcctgctcgtcctctccatcgtcggggtcacctactacgcggtcgtggtgtacaactacggccccgcgctcttcgccggcggcgccagcaccctcctcgcgctcgtcgtcctgctcctcttccacttcctgcttgttatgcttttatggagctacttttctgttgtattcaccgaccctggttctgttccaccaaattggaatctcgactttgatgaggagaggggagaaactgccccccttcctggcttagatttcaatagccaggtaaactcgcaacaatctatcgctcacaatgacacaggacatccaagggctaggtattgtaggaagtgcaaccagatgaagccacctcgatgccatcattgctctgtttgtggaagatgtgttcttaagatggatcatcattgtgtatgggttgttaattgtgttggggcactaaactacaaatactttcttctcttcctgttttacaccttccttgagacaacactggttaccctttctctattgcctcgcttcatagccttctttagtgatattgatatcccaggaagtcctgcagcacttgcaaccactttcctcacctttgtgttgaacctggccttttccttgagtgttctgggttttatgattatgcatgtttcacttgtttctgctaatacaacaacaattgaggcatatgaaaagaaaactacgccacgctggatgtatgatattggccggaagaggaatttcattcaggtttttggaaatgacaagaggtattggttcatccctgcgtactcagaagaggatttgagaagaatgccagttctacagggccttgattaccctgtcaggacagatttggatgggcaagaattgtgatgggacaatttcgcctgtgccctcacttcccatatgcaccaaatatgttccatgtaaattttacggtttccttccgatatcgtagagttaaatatttttaaaggtacaccttagtactgacagcattgctggttgggtactacatggcctccgaagagagtgttcccagaattacttttcaaaccctgtgtaattcacttgtgctgtctgattgggcaaagaacgtagaggtcttgctattgtggctaaaagaggcatgtgatgtaaattctttttagtgtgtttcagatgggtttccagatgtatgatgtacaatgatttgagctgtgcaatagacgtacagttattagagcatgacatgttgataagataacctgtgttaattagagaactggatgtttaagtgttatttt

SEQ ID NO: 16825 - DNA, 1929 bp, Oryza sativa
  ref <308>: DATABASE ACCESSION NUMBER: AK067296
  ref <309>: DATABASE ENTRY DATE: 2001-12-06
ggggagaagagtcgtggcttcctcgcacagataaaaaggcgaggaggcatttccccggtttcctctctgtccgggtccaggccagcacgaactacgcccacaacgaacttttagctgtgtttagcttaatccacccaccactcgcactcgcgtacgtactcgtcgcatgtgagttagctttggtcgccggcatggcgctcacggcggcggcggcgagcggcggcgacgcgcacgacgacgagtacgcgaagctggtgcgggggatgaacccgccgagggtggtggtggacaacgaggcgtgcgacgaggcgacggtgatccgggtcgacagcgtcagcagccacggcacgctgctcgccgtcgtccaggtcatcgccgacctcggcctcgtcatccgcaaggcctacttctcctccgacggcagctggttcatggacgtgttcaacgtcaccgaccgcgacggcaacaaggtgctcgatgaccaaaccatctcctacatccaaacgacgctggaggcggatgactggtactacccggaggtgaggaacacggtggggatcgtgccggcggaggagtacacggtgatcgagctcaccggcaccgaccgaccggggctcctctccgaggtgtgcgcggtgctcgccggcatgcgctgcgccgtgcggagcgccgagctgtggacgcacaacacccgcgtcgccgccgtcgtgcacgtcaccgacgacggcggctccggcggcgccatcgaggacgaggcccgcatcgccgacatcagcacccgcctcgggaacctcctccgcggacagagcggcgtgcgcgccgccgccgccgccgctccgggcgggctcacccacaaggagcgccgcctccaccagatgatgttcgacgaccgcgactacgacggcggcggcggcgccgcctcctcctcgccgcgggggcggtccccgaccccggcgacggaggtgtccgtgacgccgtgcgcggagcgcgggtacaccgcggtggtggtgcggtgccgggaccggcccaagctgctgttcgacacggtgtgcaccatcaccgacatggggtacgtcatccaccacggcgcggtgagcagcgagccccgcggcggcgcgtaccaggagtactacatccggcacgtcgacggcgaccccgtccgctccgaggcggagcggcagcgcgtggtgcagtgcctcgaggccgccatcgagcgccgcaccgccgacgggctggcgctggaggtccgcaccggcgaccgcgccggcctcctctccgacgtcacccgcatcttccgcgagaacggcctcaccatccgccgcgcagagatctcgtcggagcgcggcgaggccgtggacacgttctacctctccgacccgcagggccaccccgtggaggccaagacgatcgacgccatccgcgcgcagatcggcgaggccacgctgcgtgtcaagcacaaccccttcgccgacggcgatggcgccggcggcggcggcggcggcgccaccgatgacgtcgctggctcgacggcgttcctcttcgggaatctcttcaaattctaccggccgttccagaacttcagcctcatcaagctctactcctaattaatttactccaacctgggttaattaattagctgtaaataattacttagttagttagttttatgtttttttcttctagattttactgtaaatatgatttcagatttatgacgacgacgaagatgatgtaggctgggtggtgtaaataggtttacacatggtacaaaacatagggggaaagttaattcaaaatttaggtcagggaaaaaaaatcatgtaggattagtttcatcagtatactggcattgggggtatacagtcgctaaatattccatcttgtacatgtattcatggaaggaatacaaagaatgaaacaaaagcttgt

SEQ ID NO: 16826 - DNA, 1401 bp, Oryza sativa
  ref <308>: DATABASE ACCESSION NUMBER: AK067297
  ref <309>: DATABASE ENTRY DATE: 2001-12-06
gttcgtgtggtcgtgactcgtgtgactcggtgcgtgagcataatccacacttccacagagagagcaagacgaggtgaagcggcgcaagcaacagtgcaacacgccaggcaacacggaagcgactagcgagcgagataattatcatcgtccactctatccgcctccagcttgccccgcctcggtcctcggaggtgtaggagcgaccgaccatggggagcgcgggggcgctgctctcgcactcgcctccggggctcggcggattccctcctcgccaccatcaccaccaccgtctctccgtcctccgttgcgtaccgctcctcccctccccggcgcccgagcccctcagctgtcgccacggccggcaccttcgctgcgccgccgtcgacgggggagccggccgggagacggagcgtccctcgccgcccgcacctcagagggaggagtcgccgtcgggcagcctcggcgcagccctcgaggacccatctcctcaacctgtccaaaatggatcttttggaggtatcacagaggatgaagaacagagtagcctgtacaattttctttatccgagcaaagagctacttcctgatgataaggagatgagtatatttgatcatctagaggaacttcgtgacaggatatttgtctcagtattggctgttggtgctgcgatacttggttgtttcgcttactccaaagatcttattagaattctagaagcaccagttagtgttcagggtgttcggtttctgcagctctctcctggagaatttttctttacaacattgaaggtctctggttattgtggccttctacttgggagtcctgttattctgtatgagataatagcatttgttcttccgggtttaacaagggatgaacgtaaattcctagggcccattgttctgggctcttctgtactattctaccttggcattttcttctcctacacggttcttgctcctgcagcattgaatttcttcgtgaactacgcagatggggcagtggaatcgttatggtcgattgatcagtattttgagtttgtgcttgtgcttttattcagcacaggattatcttttcaggtccctgttatccagctactgctggggcaagtcggtttggtttctagtgaccaaatgctttccatctggagatatgttgttgttggcgctgtagttgctgctgctgtgcttacaccgtcgacagatccgttgactcagatgctcttggctggtccgctgcttggcctgtacttgggtggtgcttggatggtcaagctaactggtcgataattcctactagtattttgtattaattagcatcatagtcatggcggtggttctggacaaatcgcattccccattgtaacatagttcgtataaaattaactctttttttctctcc

SEQ ID NO: 16827 - DNA, 2452 bp, Oryza sativa
  ref <308>: DATABASE ACCESSION NUMBER: AK067298
  ref <309>: DATABASE ENTRY DATE: 2001-12-06
ggccggattttgcaatcccatcggccggcagagcgcgacggcggcagctcggccaccgccgcggcatcgccgccatgccgcactcactctccctcctgctcgcgcccagccgcgcgctctccctctcctccccaccgctccgcctcgccccaacgcacccaccacttcgcctgcaccacgacggcggccacctcctcgtgggcacgacgaggcggcaggctccctcgcctcgccgccgccgtctccatgccgccagggcttccgcgccgtccgccgccgcggcgtcccccgtagggcctgcgggcgagggtggcgaggtggggggcagggcgaggaaggcggcggggtaccggaacaggttcctggacctggcgcggctgggggccgtggcggagagcgcggcggaggcgctcttccgcagcgagattcgccggcggctggccgtcacggccgtgctcatcctgctcagccgcgtcggctacttcgtcccgcttcccgggttcgaccgacggctcatccccgattcctacctcagctttgcaccccttcctgcagatgacctcggtgatttttcatccgaattgaagctgtcatttttccagctcggaatcagtcatcagatttcagcatctattgtcatgcaggttctctgtcatgttcttccatcacttgaaaaactacgaaaggaagggttagatggacatgagaagatcaaaggctatatttggtggctgtcgctgggttttgcacttgtggcggcttttacagtgtcatgctactcactgcaatattctatatatgctgcaagttacagagttaagcatgtaatgataacaagccttttccttgttcttggtgcaatgacaatgacatggatctgtgacactatatcggaatctggatttggacatggctcttccttgattatctgtgtgggaatattgactggttatacagacacactccacaagatgttaactcaattttcaggaaattggtacagctgttggccctacatcttggggatagctgggacttttattttggttaccatgggagcagtactggtgactgaagggtgtaggaagataaagcttcagtactatggatttaaattggcttctggtgcaaggagtgagagctccccagttacagaggtagagccatatatcccttttaacataaatccaactgggatgcagcccttgcttaccacctcatacttattagcttttccaagcattatggccagcatttttggtacgcaattttgggaaagtttgaaggaaacgttgaatccaaagacttcagttggtggtggtccatgagtttattatttgacatatgcatttcttgtcttcgtcttcaatatttttgacattgcaaacttgccaaaagagatatctgactacctgaataaaatgagtgctagagtaccgaagataaagcctggaagagcaacagtagagtatcttacaaaaatacaaacatctacacgtttctgggggggtatattgctgagcttgttggcgacttcctctttattacttgaccgatatctcaggcagataaatgagggattttctataggtttcacgtcggtgttgattattgtgggctcaatcatcgagctgagaaggtcttatcaagcatacaatgtgatgccagcactaagcaaagttctaaggagatatggtgcctgaggttatgtacgccacatatttggttatgatggtatcatccacaagaagaagagggccatttcaaaaaaacttcagagtttacaggcttacagccgactagatgctgtgaccttgattattgtcaacaacttgcagtacggtgcagtaagaagagttctataacccagaccaatattgtgcttgggttgggatgagattagtatagtttgatatcaatcttctgtggcataaactggaactgaagaaccaaggaggatattttgttactcatggcacagcaactatgaagagcgtgacctacgaggagctgtgtaattgtgttgtctttggccacttctggaatggttgacggcttgatgcaatgcgaacgaaaatttggatccaatctcacccagctgtataattttctgaagatcagattgccaaattgctggctagctgcatcacgcttagtaaatggtgcggtcagaagtcagaacctgaagtctgcaaaattgctggttttgggttgattgttggaacgttctacatcagaggctggcgggttgaccatctggacttatccgtgtagcacaatgaagatcagctgtcgtgcgtttgctgaccagtagtatctctctgtaggcttatgtttttgtaaatatatggcttattaacagtagaacttccactcctgtcctgacttctcaaaggctgttctgttcacttttccaaaaagcagcttcatatttacaaaagataaagaagcc

SEQ ID NO: 16828 - DNA, 3389 bp, Oryza sativa
  ref <308>: DATABASE ACCESSION NUMBER: AK067299
  ref <309>: DATABASE ENTRY DATE: 2001-12-06
gggcgcctcccccactcctttttctccgcgtctgccgcccactccgcccacactccgtcgcgcatcgccctgccgccgacgaccgtcgccatcgcgccctgccaccggcgaccgccctgccccgcctgcagcggaatccatgcctcctccgtccgtcgccccacaccccccaacccacggcgccactttcctcgacgccaccgcctccgtccaacactccaactgccacgcgacgccgccgccttctccctctccttcgtggtccatcccatcacggcgattccccgcctcctcgccgccgtcgccgctcccactccccatacccccaccccagtttcctcgacgccaccgcagcgcatagccaacggggccgttctgtccctgctccccagggacgacggtggcgccgccgccgaccgcaaggcgccggatgtcaaggacgcagcctcaaggtcagcctgctcggcgattgctagatcggcaagacctgtttcatggtaaattctcccatctcctcctcctcctcttcttcttcttccaatccattccaatctcttgccatgtcgctttactgcctcgttaactccatcttgataagctttcccactgttatgttggtttcttgtacatgctatttcaagttttcaaccaagaagcaatccgaccctgaaacatgagtcagcaatccaacaaaaaaaaatcattttgaggttcagatttcggaaaactgctacttaatcatttttcattaaagattttgagcttctttccataggccatgcacacgaattttttttagcttgatgacatctacaactaattaagaatacctatgtgaaaacgacaagagagcccaaatcaaacctgaatcgagcacagcatgctaccgataagtttgtgcagaccgtgctgacctgatatcacccctacatcacagctaacagaaaaacaactcctcatgctattgggagagcctcatgcttgaaaatgtagttgcgtttcttttcagccacaatgaatagcaggttactgaaaagttcagatgagttcttcagtactcgaaatttaatgggaagtcaagtttaacccggtttaattctgacgaagaacttgacaacaaaaaaaaaacagatgcctgcatttggtgattcatacagataggctgtcatattgctgatttcacctggaaggagatctccttgccacctcaattaattgcacgttcatttggaggcttaattgtgcagcgatatatatcttgtttgcaaggtgtgtcttctcaatggtcaaacaaattcctgtcacttgttggttaaatatggttattctttatgttcttaacatttttcagtttctccataactgaatttgcatcatcaagaacaagtttcaatcattatatatgtgctgaaattccaaaggtttcttgtttacttaaattagacagaaaaagttgtgaattattcttcgaattcctgacaatgattccaaaggttgggattttttttcttttgttttgttttatgtaagcttagtagaaattgttcgatctgatcggggtatttcggtgctcttaagtttgtttgaatttaccctgtattactgtactgtgcttacattttagatcttatcaatcctgtatttctcctgttggatattctgaattacctaacctgagctcttattaaagccaagccaagtttctggaatgactgccagtctgtcagtcaccaagatatatcttcagatttaccaatacccaaatagaggaaaagttcttttgccactgaaaacagggaaaagtatttcaagtagtatggattaagcctcttgcagggcatttgttcggcagaactcactgcaatatataaagctgtaatcttgaggtgttatagccctaacgaaatattcagggcactgctattatttcaccaagtagaataaagtaaaaaaatattttattatgttattgtgctgcaaattgcaggaagataagctcttttggtgcaaccaattatttttcagcaaacaatgatccttctctaaagttttggttataagctagaactgaatgagttgagaggttcttgtctgttcttgctttcaattgcatctttcggtagataggaatgcatgatttgtaaccctttcagcatatgcttttcgccatgtgtttctcttgacttctgtactccaacatatattgaaaaaacaatatattttgatgactagagtctgtcatctgtatgaaattggaatgcactagaagtgtggtcctcgatttcgccttatggtttgtactggactgcactgaaaattttgaacttgtgcattacagggttccaatggatagcaattttggggcctctagaccaacatcgctgacaagatcagagcaaccgatgttgttgatagtaatcttaaatgagatggagtagggtgcaatcctaccagctgcacttagactgccctggtgaatgcattttgcaagggaaagtcagtatgagaagactgaagaagtgtttgaagaatgcaacaggctagccacgagaccgaagtgtatgcttatgatgtcctcatggaagataaatggtggtcatcataaatccatggctacacgagcctacgttcctaccgacatctggatggaattttttacttttctttaagtttggagtaatatacattgtatatatcaatgcaccacagccatacaggattgctgcaaggcgcttgagggatctctccttgatgcagcatttggtgaggggtgattgtgacagagcttcatataacatcttggtggatgcatatgaaggtacagatggtggtagataatttgccaattttgtgataaaggaaccaagaacttgagtgccatggtgccactttctaaaactgaaagcttttgaatttgctgctaattttcagattcagaagcaacattcaagcaactgaagcagcaggtgatgacattctcgatgaagacattcttacttctgttgttggcgcgtgcaggtctggcaacgtggtgaggatcaagtggaggtgatggcatggctgcacaaatccggcatgtcataactattgataatgctatgcatatggccacctttatgaaagcttttgattatcttgattatggattatatgcagttgtccaaatatgtacctgctatatttgaatatacggcatgagtgcataatgactagaccccccccccccaaaaaaaaaaaaagtgatgacttgtttggttggccagatatttatgaataattttgttgtttggggataatcagatattagagtaatcataagctgtccgttgctataattggtcccaaagaggacctatgagtctacatccatggcatatttgttcttttgg

SEQ ID NO: 16829 - DNA, 1998 bp, Oryza sativa
  ref <308>: DATABASE ACCESSION NUMBER: AK067300
  ref <309>: DATABASE ENTRY DATE: 2001-12-06
gagaagaagcagcagcggtagcggcagcagcctgggatctacaggaagcttgggaatccaagaacggcgcgaggaagagggaggagaatcggaggaggaggaggaggagtggtcgttcttggcgctgctgctcgcgctgctgcggaagtcgctgctcgggtgcagcgcggaggacggcggcggcggcgaagggatggagatagggtggccgacggacgtgcagcacgtggcgcacgtcaccttcgataggttccatggattcctcgggctccccgtggagttcgagcccgaggtgccccgccgcgctcccagtgcgagtgcaagtgtctttggagtttcaacagaatcgatgcagtgctcctatgattccagaggaaacagtgtcccaacaattctcttgatgatgcaaagacgtctttatgaacaaggcggtcttcgggcagaaggtatttttcgcataagtgcagagaatagccaagaagagcttgtgagagaccaattaaatggtgggatcgtgccagagggtattgatgtccactgtttggcaggtctaatcaaagtaagcttctttctattattttgaattatgtgattccattgacatcaccagtatcctgatcacatgtacaatacttagatagctgttgattattgtctgtactgaactagtggaatttcacaaaaagaaaaacacctggcagagaatccagacttcctatggaacctgatcatgtcctttccatttagaaagatttttttcacaatttattatttgtcaacacatacaaaattgaggctgtgctgtcagcaatattctgttgcagaatctaatatttgcttttggaagcagttataggtgcggtcacacaaatttgataacaaaggtgtattcccaccccatatatattttcgcatgttttccaggcctggtttagggaactcccgagtggggtgctggactcaatcccacctgaacaggtgatgcaatgccagtctgaagaggactgtgctcgtgttgccaaatgccttccaccaactgaagcagccttactagactgggctgttaatttgatggctgatgttgtccaagaagagcaaataaacaagatgaatgcgcgcaatattgccatggtttttgcaccaaatatgactcagatggcagatcccttgactgcattgatgtatgcagtacaagtgatgaattttcttaagatgctaatacaaaaaaccctcaaggatagagaagagtctgatctggatgatttgtctcttcctcagaaggacccgtctgatgaaaatggacaccagaccaccggcctctcgcttgattctcaccctgacgaaggatccaggcgtccctctttcgtcagcgaggagccccttctgaacagtcccgtgcacagcactgaagagaaacctaataagaccaatcttgctgaaggaaaatttgcggattccagttgcccggaaaatgtagccctaacgagcatggagacagagggctctactagttgctcccaacctgctctggcagcagctgccgctgctccccgtgctacagctatgaacttacttcaaggcaaagggagccgtagcctgaatagtaggaggactagaaagggcaaggtgcagtttggaacacgtgctgctccagcatctgagaaatcaaaaggtgcgagcattgtgagcaggataaactcaaaggttgaacggatcgaagcgtggcgatgaaatcagaagttgccgcaaattgttgttgtgaagtagatgactgacccaatgtttcctgtttcctgaaaataggaccaagagctgtgtgctttgtgcattttgcattttttgatgtgcttatcatttcttgttggaccatgatcacggtgtttttagatcattttctgttgctgctaacttatgtatcttgtttatgagtactactgttgtctgagtgaatcaaacagactgttgctttccccttgtacataaatgtctccaatgcct

SEQ ID NO: 16830 - DNA, 1593 bp, Oryza sativa
  ref <308>: DATABASE ACCESSION NUMBER: AK067301
  ref <309>: DATABASE ENTRY DATE: 2001-12-06
gtctccctgctgctggtactgtgcgtgggccggagggcgagagtgaagcttgagccgtctcgccgcgggcgctgctgctgctgctgctgctcgcgtccgattccgacgagaggctgggaacttcaaagctgaaaaggactaatggagggtggaggcgcaaaagatggttctgcagcggcagcgcaaacaagggggagtggggatgatggttcccacaagccgctgccgccttgctgtctcaaggcgaaggctgcggcagcagagtctgaggcaaaatgccatgccacagtggtgtcagggtggttcacggaaccccgctcgcactctggtaaaacaagcaaagtgcagtacttcaacaatccaatgtggcctggagaagctcattctctgaaagtagagaatattctgtatcaagggaaatcaccataccaagaaatcttagtttttgagtcctcaacctatgggaatgttctggtgcttgatggtattgtgcagctgaccgaaaaggatgaatgtgcataccaggaaatggttactcaccttccactgtgctcgattccatcccccaaaagtgttttggttgtcggaggtggtgatggtggtgtgctacgagaaatagccagacatgcctcagtggagaacatcgatatatgtgaaatagaccagctagttattgatgtctgtaaagatttcttcccacaactatctgttggattcaaagatccccgtgttcaacttcatgttggtgacgctgtggatttcttgagaaatgcccctgaagggaaatatgatgctatcattgttgattcatctgacccaattgggccagctcaggagcttgtggagaagcccttttttcagacaattgctagagctctaaagcctggtggagttctatgcaatcaagctgagagtatgtggctgcacacacatctaattcaagatatgctttctatctgtcgtgaaacattcaagggagctgtgcattatgcctggacaagcgttcctacctatcctagtggtgtcattggttttttgctatgtgcgaaagaaggtccagcagtgaacttcctttctcctgtgaatccaattgagaaactggaaggagctatggaagctggaagggaaatcagattttacaattcagaggttcatcgggctgcttttgttctgccaacatttgtaaggagagaactggaatcacacaatacttgtgctgaaaaggataaatcagaaaccaagccagtcgcgaaaccaaagaagatgaaaataatgccgaatagtgccattccgactgcttcctagattcgggcggccatatgcgacaaccatgttcgacgtccttagctacagtatatgccaactataagaggagaatgtcgctgtaactcttctgtcttaagtatggtatgttatgcctgactgaataaaagggaggaacagatgagatgtgaaccaaaataatgttcttcctgatccgtgagcactgttgtagtgttgcctgttgtacaaatgtatattgtcacagcactgatgtgtttattatatggatgtggagtgaatcgcatggataatgtgcctttttatcccctt

SEQ ID NO: 16831 - DNA, 3100 bp, Oryza sativa
  ref <308>: DATABASE ACCESSION NUMBER: AK067302
  ref <309>: DATABASE ENTRY DATE: 2001-12-06
ggcgcatcttcccccttttggaatcgcccggtccccatctccacttcgaaccaaacccggaggcgcgccgcgcgcctccccgccgccgccgtcgagcgggaggggatcggagcgcgcggccgccgccgtcgccgagtccgtccgacctccgtcccccgcgccaacgcagcagcagagcagcagtgtgggaaggaagaagggaagccgctgccgcgagcggcgagcgggagtgggggtttctccattgttaccatttcaggccagccgccgtcgacgccgaggcggggtgggccccacctgtcactggccatgttcgcctctatatatatacaccgcgccgccccccttccgccgccaacctgagccgagcggggagacgcgtcttcctcctcctcctcctccattgctgctccccctcccccttcctcctacaggggcatgcgattttggaagcggagttgatacttgatcgagatggttaaagtagaagatgatgtggagggcagtggcatcaacgcttctgttggtgatctcagggatgctgctgtcaatccacagcctgccctgctgcgtgctactgttaaggaggaggaaggacagccaagctcttcctccagtcatgtaagatcacaatttattggcatggggttttcaccaatgttggttgacagggtgcttcagaaacacggtgacagagattcagatactatactggaggctcttttgtcacagtctgctcttcaaaaatctgggtctgaatcaggttcattgggagatctctttgattctgataatgaagaaaatagttctcattttgcgcctaggaaagaagttatccaagacattaaggttggagctgattcatcctcagaaaagagatcatatctactgagtacaatgaacttctcgcagcgagaagttgatttggcactcaaccagctaggtgaggaagcatcattggaacagcttgtagatttcattgttactggtcaagtgtcaggttgctctggaggaaacgaaaatggagatgcttcaaatgaggtaaaggatgaatcactgtttggagtaatggataaaacactacatttactccagatgggttttacggaggaagaagtgtcatctgtcattgacaaagctggtccagaagcaacagttttggagctggctgacaccatttttgcacgtagaattgccagtagcattgagcagaaagaggtgaaagttgagcctgactttctagatgagacagaaaccagctattcagcataccatccctcaaattctggtctaaggtactatgatgacgaccatgacaacataaggattaaaagggctaagcatatgtttatagatgacagtgcgggttccagtagtcgtgctggaaatcaacctttagatccatggcttaaggatcaccgtgccacaactagtgatgggtctgtcaaggaagaatttgatgcaatgacaccaggcatccgtagaaatgttcgcagtgatgtcgccaatcccccatatttcttatatggaaatgttgtagaaattcccaaagctacatggcgtcagctgtcagagttcttatataatgtggagccagagtttgtaaatagccagtttttctcggctctctcacgaaaggagggttacattcataaccttccaacagagggaaggcgtaacctggttcctaggtcaccaatgactatcgaagaagcattcccattcacaaggcagtgctggccatcgtgggacacaagaaaacaacttaacagtgttgctacagaagttgcaggaatagagcagctgtgtgagagactgggaaagatggtaagagactcaggaggttatctttcacaagaaaagaaaacgcacatcatgcaccagtgcaagctggctaacctcatctgggttggcccagataggttaagtcctttggatccacaacaagtggaacggatacttggctacccacggaaacacacaaacctgtttggcctgaatccacaagatagaatagaagccatgaggtacagtttccagactgacacactcggctatcttttgtcagtcctgaaggacctgtatccagatgggctaagggtgctatcaatctacagtggaattggaggtgcagcaattgccctccatcgcctagggataccactacagtgtgtagtatctgttgaccaatctgatacgaacaggaaaattttgagaaggtggtggagtaatactgaacaaaaggggcaactgaggcagataaataccatttggaagctgaagattaatgtacttgaggacctggtgaaagaatttggtggttttgacataattattggtggaaacttcagttcctgtaaaggtggtacaacagtaaactcatccatgggcatggattccaaccagttttttgagtatgttcgtgttgttcaaagagtgaagcatataatgggtcggctccagaaccgtggatgattttttggttacaccggcagcagcaaagtgggaggggggaaaagaatacgcggcgtcagaatctcggacaaaaaaatgtagttccacttccatatgcaccagctttcccaaatggctgcacacagggttcatctctgctttctaatggaggacggtgaagaaattctgaactagttttcatgctgacctcagaaatcaccatcctacaaacgcgcattgctttcgagcatgttcggggataagcttcaccaggaattccattggcatacccttcagttctgttcaaatcggccagattagtagataattataagttgatcggtggttcagaaattttcgtctacgcatgtcatatgtcagccggtgttgcaagcttaccatggggcttgaagttgaagagaggaggaaggaaacggccgttcggtaagcgggtgtttggatcacggagttcatcgaagaagggatggatcaatgcttccgactgtaatggcaaataaagaaatgcacaatctgtaactactagtacttggcaaggcagtgcatgtttgtatgatgaagtaattagaaaaatgtaacacaatagtgatgccaagaactaaaactttctctaaaaaatggtgttggc

SEQ ID NO: 16832 - DNA, 689 bp, Oryza sativa
  ref <308>: DATABASE ACCESSION NUMBER: AK067303
  ref <309>: DATABASE ENTRY DATE: 2001-12-06
gtgatttgctagggctttgaattttttttttccgctcgatcgagttcgcttcgaattcgtataattaagctaatataagctaattaagctcggggatgaagctgttcgccttcgtgaggcgctgccggcggctgtcgtcggcgccggtggatcaggcggcggaggaggagccggcggcggtggcgccgcccgcggagaagcggcggaggaggccgtcggggccggcgtggaagccgacgctcggggcgatctccgaggacgccgcggtggcgtcgtccgccgccgcgaaggcgaagccggcggcgaggacgaaggcgaaggcgaaggggaaggcggcggcgccgccgccgccgcggcgcgtggtccggtcggagtacgacgacttccggcactacggggcacccacggtgttgccggcgttcgcgccgacggcgttcttgttctgagctcaactccggtggacacaagtcctgtagctggtggggcgctgtgtgctcgtagtgtgtgtgtgtgtggtttcactggcttgaccatgacgcctctctagtgtgtgtggtgctcgctggcttgaccatgacggctcagcttttgtgcgcaaagatctgagcgaactcgcaaagctgattctgtaaattttccggatgcttctgatgatgtgcatataaatctgctgctgctgctgctgctgc

SEQ ID NO: 16833 - DNA, 1138 bp, Oryza sativa
  ref <308>: DATABASE ACCESSION NUMBER: AK067304
  ref <309>: DATABASE ENTRY DATE: 2001-12-06
gtttggattcctcctcctcctgctgctgctctctctcctccaaggctccaacacatcctggtccagagagaaaaaggggagatatttttttgggggcgcatgattcgatcccttgttgtttgctgttgttgccttgcctgcgcaaagatttggtcctttctcggtctgtttcttggcctgttcagctcggtggtggtggtgttgttggtggtgcagttcttggagtcacatggttggtggtggtgtgggcagttcttgatccaggctcagattgaaactggcggtcgagagattcctggttgcaggagaagttcttggtcgcatttcgggtggtggtggtgggtggtggtggcagttcttgatctgctccctcgggagaattcgattgatgtggtgggttctctctcttcttcttctccttggagctcagttccccaattcgccattttgatgaggagctcccactgtgagagctactgcgctcctcccttgtgcaacctcccctgcctccccaaatccaaagacgattcgaccacggacgatgccgccgccgcgtcgtctccaactccggccaccgtcgtcgccgcagctttcgctgaggacaagcctcctccgctgcagaagattgaggcggcggtgacggcaaacaaggatcatgatgatgatggtgatggtggtggtgatgagggtagcaaggaagtggtggtgacagtggttcccaagagtagcctgaagaagactaattgtgaggacagtaagaatgtggtgaagggcaatgtgaaatggatggatttgctggggaaggatctcactcaagttaaagaatttgagccaagcgaatctggagactcggatgacgaagacggcaacacctgcatctgtgtcatccagtaagcagccccttggagatcatccctgtaaattctctgaaaggaaaaaccgaaaaacaagtgtctgggtcagccattagttgtttatttgtcagtagagagatcagagagccccccattgtgtcgttggtttatctggaattgtggatggaattgggttgtgttgtactatcaatcagcagcagcttcaccagtacatgttgcacatgcatagagtttagattttagaagattcctgcaaagatctg

SEQ ID NO: 16834 - DNA, 3155 bp, Oryza sativa
  ref <308>: DATABASE ACCESSION NUMBER: AK098997
  ref <309>: DATABASE ENTRY DATE: 2002-08-28
gattgtctctctctgcatttgggggtgtgtcagaagagagatggaggaattcctgaccagaatggttgatcagctaagtaccatggccgtgtcggggttggcttccatgttgggtgcgcagcagcgagtggactcgctggtcgacgaatgggagacgctcgagagcttcctcaaggccacggcatggatctgcggcaagacgcgacggcgaggcggtggcttaattctctcagggacgttgcttacgacgcggaggacctcatcgagagcgcggtgctgcagcagcagggtgacaggtactctgccgtgaactcggttctccatccgattagtcgttacaggtctgcccagaaggtggaggagatcaggtccaggatccgtgacatggtagaccgccggaccagctatgctgccatggcacgtgagcttggacattgagctggagagaccagcatcagccccatcagtcgtcatttcgtctcctgttccaggtggcggagttcatcttaccacataggcaacaataccatctttggtcttgaacaagacactgatatgatcatggaaaggctgctccaacctactgaacatcgagaggtgattgtgatagttggcatgggagggataggcaagacaacccttgcatctcttgttttcaacaaggctcgtggagttgaagaaaggaacacttggtctggccaagctccacccaaagcaacagatccaggaagcagcagcaaaagaagtcattttgacgtctgtgcttgggttccagttggtcaggatcctgatactctccacctcttcagtaccatatctattcagattggagctaatttggatctatcacgtgatgtggctgaaataaaacatcatatgttcacctttctgcttgataagaggtacctgattgttctggacgacgtctggagagaagaaacatggcatgaattggttgacgctttccccatgtcgacaaatgggagcaaaatcctgatgacaactcgctccaaggtaatagccatttctgccgaccctgcttcatatccacatgagctgaatcccttgagtgatgaggtgagctttcacctcttcctatccaaagttttcccaaatagcaaccttaatcaagcaatgtcgtatccaccactgatggaggatttggggcgccaactcagcaagaaatgtggtggtttacctcttgcacttgtggttctaggaggcctactatcagccaaggaaaagaaacacgatgtatggagcagcatactgaatagcatgaactggaacgacaatgaagctgagaaacagtgcctgaaaatattggccttaagctacgacgacttgccctatcgtatgaaactgtgttttctttatctaggagctttcagagaagaatctgaaatcagtatctctaaattgacaaagctatggattggagacgatcttatacctcagcaaagtggaagaagaagaaaagaggacacggccactgactatttaaatgagctcattcaaaggtgtctcgtgcaacctgttcttctgaaacataagcagcgatcaacgagggtgcgtgtccatgctctattgcgtgagctagcaatatcagaaggaagagaaaacagattcctttattgtgaatatagcaaccaagcagtgtcggaaatggagatggaaaccctatcgtcgtttggttctccatccgggacccaataaacgttataatctgcatgatttcgagaagatgagagctctgttaatcgtcccacgaacaacgggaactcaaaccatttgtgttggccatcaggttatcagaccattctttccgctaatttttagatggtgtagaatcaactggcaaacagtttggagcatgccttatataagagttattgaagtcgaaggattgatgatgccaacggatgctctgagatccatccagagtagcctaattcatttaaggtacttgtgcctaagaaacacccagttggttgcgttcccgttcaatgagagcaagttcccatctctacaaacactagatataagagagacatcagtcaagaagctacctgataccatttgggctcttaagacacttcgtcatctgtacctgaacggaatggaacctccaagtataagatgcctcaccaatctacaaacgttttgtggggtcttagtttccaatgatcagattgccatggaatttttaacattaaaagatctgaggaaattacaaattgaactcaaagcatggaatggataccctctactggtaaaatctctgaagctgctgctggctctcacctcattcaagttgtcttccacagaaatctcttcagaagtgattaacaaaatagcacaccattcaccgctgcgcaagctgcatctccaaggcatgctacatcctcctgtcctgactctaagcgaatatttttcagattacatcacgagcatcacattgtcagcctcgagaattggcactgatcaattaaaaacacttggcagtctgacatgtctatgggaactcaagctaaaagatgatgcactcttgccatgtccacagcacagctttcctcagctgggatatttaaagatcagtagcctaaccaacctggaggcattccgaatcgagcgcggtgctttttccaacctcgtccgcttttcagtacactattgcagtaagtttcgtagcatcatcgatgtcctggagcatactacgagcctgcaggtcctgaagctcaagggaatggaacttctaccggatattactgattcttgtagaaacaaaaatgtttctgttatcactatggcttattagctagagtgctaatttggtaaaatttctgcgtccataattgggacaagatcagcgttgatttggtactctctggatgtcaaagcatatcgttttggtcgtgtttcaagttgaactttatagattttaaacatctatatctatatgcattgagtatcaatatatgtaatttgtattgattttatcgaagaaccaactttttccataagtttgtttgacatgtgggctcaactggcaatggtgtaagactgtaagtgttacatttgtgtttgatggttgatctgacctatcagacaaacagagcttgcagttctctaataaaatcaaaagttgatgttgc

SEQ ID NO: 16835 - DNA, 3130 bp, Oryza sativa
  ref <308>: DATABASE ACCESSION NUMBER: AK067305
  ref <309>: DATABASE ENTRY DATE: 2001-12-06
gagcgcatcaacgccaaaaatgggattcatcggttgaactcaagatggaattttgatctcctcggtgttcttcttccctccagatttggtcactgtcgcgggggaagagagaggcggagcatcggaaagcagatcgagccggaggcgccgcggcctcctcccccccaccggcgcctcggatcgaatcgaatccaatcgaaggatggagtatggaaggaggaaacctattagcttgctggagctgtgcatccgtactaccatggataacctgaggtatgtcgataacgtggacggcgtggagatggatctgctccagagaatcctgcctcactgcaagatggaggacctgacccgtatcgagaacaataccgagatggatcttaccccagttactgataagctgtggaagctattctatacgcgacaattcggcgaggaaaatgcaaaccaagccgtcaagagaatgagcatgagcggagcgcggtacaagtggaaggatctcttcgatgtaaaatagtacctttttcatcactcttttgttgttttggttggctgtggatgtcagggttttaggagaaagaattatgaaggactaaaattctaaaagttgtacctgttatttgtaggccaaaacaaaaaagcagaaggaatatgaagaaaagatgggccagaggcttgctaagaagtatgaggcagcgaaagctggtaaggtggttatagttctgtattgaaagtgtgcaaaatgaattgatatgtgtcatgctgataatagaatagctataggatctttgatagcttaatgaatatatgttatttgcaaatgagtttggacagtaaattggtcgatatctccagttggcgcttcagccattgagaacgcgagcaggacaaaattacaagacagcactttgacttgttctgatgtattgccttttattttggtggagttacaagtgacatctcctttgcttctagggcctatctatagtgctgggcgaggggacgcagaaccacagatcaaccctcaaatacctatacatggttgagtggcttcatagtacctcgccactccatggggtccattcgccaaaggcacgatctgatgacattgtgaggggtcctgccgaactcataggctgttcacgctattgactctgctcctgggttacatccaggatgatccactcatgccactgctgacctctcccactttgcatcttgggcctctcgttgtattgatatcgactcgactcagattttgtccggggatcaccggatcaatattctttcctcgctgctagaaagggctggattgtatccactggtggctttgcaccacgaggatgaactaggatgagtcataacggtagtcggtatttctatggtgaacaaggatgtgtgaggagccttccctccacatgttttgtttatggaatttaacaaattttcctggtaagtacagcatgttaaaatatgaattacttttgccaccctagtcgtaatgtcattaacttcaatctgtcaattacttttgcagaaacattttcttgctgggtgtctccagattgtatgtgttagatacggattaactcttgcgctatgaaataagcatttaattttgcaatggaagtatttggctggcataataatttgggtctttgatggtggattaatttttcgtttagtggtactctacacttctattgtaagctacttcaaatagaatgaatcaaatgccattgcaaactttcacggaagtccacaaaattagctttttgtaagctaccacagtccaataaaatattgattttcccccttcccgtctgcattttatttatttacgctttctaccattagaaatgggtgattcttgagaagaacctgaatgcccactgccagttcatgctctccacatgctatgccatgtaagaatcttctgatgatttgtgttaatcccttgagttacggtgaaattagcaaagccaaccgcaatctgtatgattcatagattttttttttgttcttataaggtccatttataggccgcaatcgcatacatttataaatggaatctgtacttatgaaaccatctttaattaacgttgaattggaggtaaatattgcaaatgtaacctagtgctgagattagctgagctgtttgcctcaaaaaggggtatcagaatcctccattagagagtgcaaagaaaggtttatttgattcctgtctaatttgattagttaattcctagttagaagaaaatctagcttcttcttgtgacaacaagtaattatttttgttattttatactagtatccaggatcagtatcattcaagttctaactttccttttcttttccagagaaacaaagtaaacaaattaaaatttgtacgaaggtgccaccaagcagcaaaagaagttttttcggaggaagtggacccagcaacctatccagctataagagccctattcttaaaaaagcaaggatggaggttaacagtcaggcaaaaatgaaagctgctattcaaaggaatactatagcaaggacatctcagcacataaggatgaactcaaatcatgtacagccaatgaagacaacgactattcatagacccaattcaaccattaccatcactaaaccaactggtccgaataagccattacagagcgacaaacaaactggtctgaataggccgtttgagagcaataaaccaactggtcagaataggccattccagagtaacaaaccaactggtcaaaataggccattgcagagcaacaaaccaactgatctgaataggccgtttcagagcaataggccgaaattctagaggatcaaaccgcagcatcgcgttcttgactccagagttcgccttgcttgtgcagcaaaaacatcaaatttcttgtgcacaagttgtggtagtttaccataacatgaactcattgtgctctaggaaaaatagtcttgtctgaagttggcctcactgagcactcgtatgttgtatctgaagagcatccgtttggcaaaggagaagcacaccaaagtgtaccataaaaatattggttatatctgtaacatacaatttttatcatatgagaaaaggattttattccttgattacttttggatc

SEQ ID NO: 16836 - DNA, 5032 bp, Oryza sativa
  ref <308>: DATABASE ACCESSION NUMBER: AK067306
  ref <309>: DATABASE ENTRY DATE: 2001-12-06
ggtctcgctgcgcttacactccccttctccttcctccagatccggccactcccctcccctccccctcctcgactcgcctcgccgctcgcctccgggctcgaaaccctaggtttggtcgctcggggtgtagtgggtgggggcgggggggaaatggaggcggcgctggaggcggcgcgcgccaaggacacgaaggagcggctggccggggtggagcggctgcacgaggcgctggacgcggcggcgcggcagcgcgggctgacggcgggggaggtgacggcgctggtggacacctgcatggatctgatacgggacgccaacttccgggtcgcgcagggcggcctgcaggcgctctccgccgccgccgtcgtcgccggggaccactttaagatccacctgaacgcgctcgtcccggccgccgtcgagcgcctcggggacggcaagcagcccgtccgcgaggccgcccggcagctcctcatcaccctcatggaggtttcttcgccgacaatcatagttgaaagagctggaagttatgcatggactcacaagagttggagggtccgggaagagtttgtacgtacagtggcaaccgcggttgggctttttgcttcaaccgagctcccattgcaacgagttcttctttcacctgtcttgcaattgatgaatgattcaaatcaaagtgttcgagatgctgctatctattgcattgaggagatgtacacacatatgggatctcagttccatgaagagttgcagcgccataacttacctccgtacatgctaagggagataaattcaagattggaaagaatagaaccaaaggttcccacatctgatggtaatatcatgcaatataagtttgtcgaatctagatctgttagtgttaatccgaaaagaggcagtccaaggacaaaaagcacaccacgggaaagtacattattcggaggggacacggatataacagaaaaaccagtggaaccagtaagagttcactcagagaaagaattacttcgggagtttgagaagattgcagctacccttgttccagaaaaggactggtccgtgcgtattgctgccatgcaaaggattgaagctttggtgtatggaggtgctattgattatccatcttttcttatgctcttgaagcagttggttccacctctatcaactcagctgtctgatcgacggtctagcattgtaaaacaggcatgccatctactcaatgtactatccaaagaactccttggtgattttgagccatgtgctgaactatttattccgatgctttttaagcttgttgtcataacagtgcttgtcatagctgaatcagccgatacatgcataaaaaccattctacggaactgcaagatttcacgaattcttcctcgcatagctgacacagcaaagaatgaccgaagtgcagttctccgtgctaggtgctgcgagtacgctcttttaatactggagtattgggctgatgccccggagatacaacgttcagctgatttatacgaagatctaataaagtgctgtgtagcagatgcgatgagtgaggtccgtgcaactgctagaagttgttatagactgtttgcaaagacatggcctgagcgttcacgtcggctttttatgtcatttgatcctgctatacagaggactataaacgatgaagatgggggtgtgcacaagcggtatgcttcaccctctcttcgtgagagggttgtgcagccttctcgttctttatcacatgcaagtggtacaagtgcacttggatatggcacttcagctattgttgctatggacaaaactgctgctatttcttcagattcatccttttcatcaaatactcttcgtttgtcacagtcaaagactgttgggagaagttctgaaagaagcctagagagtgtgcttaactcaagcaaagaaaaggtttctgccattgaaagtttgctgaaaggtgtaagcatatcagataggcaaaatatctcagctacccgctcaaccagcttggatcttggtattcttttaactgcttagttgtcaattactgttaagtaatagaaatggccttttatcatgtatttcctggtcattgactgacaatattatcatcttagttttctatgataaaaaaaatcagtttcttatttccttttaatcctagtgcaggggttgatcctccatcgtctcgtgatcctcctgttccgcttgcagcaacagcttcaaatcatctgtccttacagaattcagcactgctcgactcatctgttcctagcaccataaatgctagtgcacgaaatggaggctcccgcttattggagtcaatgacaacccagttgggcaccagagagcgatcaagatcaccgtacttgggtaatatatcatctgagtccatgacaagcttatcactgccttttccaagaaggtctttggagaggccacaagaaggaggccgcatggatgagggtagtgatatccggtcaactaggagattcccccaaactcaaaactatgttgacatgccctacagagatgccatccacagagattcacataataatcatgttccaaatttccagagacctcttctaaggaagcaagtaatgtcaagggcttctgccagcatcaggcacagctttgacgatagccaagtacagtcaggtgacgtgtctggttatacggatgcactggcttcactaagtgatgctctttctgagggtctcagccctagttcggattgggtagtgagagtctcagcttttgaatttattcggaatcttctgcaacaaggccagagaggtattcaggaaattacacagaattttgaaaaggtcatgaagctgttttttcgtcatttggatgaccctcatcataaggttgcacaagcagccttttctactcttgcagaacttattccagcttgcaagaagccatttgagagttatgttgaaagaattttgccatatgttttttcccggcttattgatccaaaagaattggtaaaaaaaccatgctcatcaaccttggatgttgttgggagaacatatgcaattgatatgttgctacctgccctagtgcgctcactagatgaacagaggtccccaaaggcaaagttggctgttcttgagttcgcaaataaatcgttcagcaagtacactgtagattctgaaggttatagtaacagtgggttccttaaactgtggctttcaaaattggcacctttagttcatgaaaaaaatgcaaaactgaaggaggcatccatttctggtatcatatctgtttattctcattttgattcaacagcagtgctaaattttattctaaacttatctgttgaggagcaaaacctcttgaggcgtgcactgaagcaatacacacctcgcattgaagttgatttagtgaactacttacagagcaagaaagatcgtccccgtcccaaatcttatgatcaagcagattatggaacttcttccgaagatggttacgcgcttgcatcaaagaaaagctatccatttgggcggtattcctctagttcccttgatgctgaaggtgggaaatggatgaattcagtgcaagagtcaacaccgcgtaatgcgcctatggcgagaactacttctgatatgagcatagatcatactagtcaaagcatagaactggacactggaagtgaagttcttttaactagaagtagagaatcaaagaataatactagctcactagtggaaactgctcgttcttggccaaactatcctgaaaaaactgatgcgcctttggatgatgaaactgctatcagtactcctcgcttagacttaagccatcgcgctgcttctgatgggcacaatgctgttggttctactgctgaagaaaatgttcaagagggagatattgctgtgaaacttagttctataaagactaccctacatgctgacaacgaactgagcataccacaacttcttcatcagataagcaacggtaccgaagtttcaagtttggaaaagcgggaagcattacagcagttggttaaagcttctgttgataatgacatctccatttgggcaaagtatttcaatcaaatcttaacggctgtgcttgaggtgctggatgattctgattcatctactagggagattgctctgtctttagttgccgagatgctcaacaatcagagtggtgctatggaagaatctattgaaattgttctggagaaacttctgcatgttaccaaagacatggtggcaaagatttcaaatgaggcaaaccagtgcttaaatgttctgttagcaaaatatgatcctttcagatgtcttgctgttgtggtgcctctattggtcagtgatgatgaaaagacacttgttgtgtgtatcaactccttgacaaagcttgttggacggctttccgaggaggaattgatgaatcagttgcccacatttttgccagcactgtttgatgcttttagtaaccaaagccctgatgttcgaaagactgttgtattctgcttggtggatatctacatcatgcttgggaaggcattcgtcccgtatttggaagggcttaacagcacgcagctgcgccttgtaactatctacgcaaaccggatttcacaagcaaggtctggcgctccgattgatgctaaccaatgacctgaggtgcaacacaacgccctgttattatttgtgttctgtatgaatacctgtttggcaggggtgcatttttgggtttcatttgtttgtgcatgtgtatagtataaacaaagccccttgtgtatcgagctcctgcccttctttttctctttgtgtgattatgtattccttttttttttcaacctcttctttttgtcagcatggtgagtgttaatgagtgttttccttttgtaccacttagtgcttacactgtacaaagaaaaaggatagtgtaggttcatggagagacctagtgtctgccccattttcatttgctgtatgatttccgttggaattgctaggtgtgaattctcagttgtcagcctcgttcttggttttgccttgcttatggaggtccc

SEQ ID NO: 16837 - DNA, 3551 bp, Oryza sativa
  ref <308>: DATABASE ACCESSION NUMBER: AK067307
  ref <309>: DATABASE ENTRY DATE: 2001-12-06
tattatccatattcgggtattttgatctaaacgttcagccagaacataggtgatccatattattctacacgattatgccttgtcattatctgcagttctatctgttaacctctaaatctttgcgtcgttctcttgttcattgaccgtaaaaactacactctttgagagtatggatcaatgcctaggtctaaaccatgaaaaagtggaaagatttaatgtatgcttttggcatgctttctagagagaaatgggaaaatagtgtaaaaacatttacttttgggaaggagtgaacaaatttatctagacagtagaatgaaaaagtcgcttgaactcttagactgattacatagacatatctgctccagttgttttgaacttcgaagacactggtatcatatctatgggcctattcattctgttcattttgttgccacgttctaccattgctattctaccaaaattggtagttctgaaagtttcccattcccactcataatgacacaaccaaaatttggaaagaaatctaacaaaacacatccaagtatccaacgctaccaaaacttgccacttcctaccctgccaaattttggtaaggttgtttttggcaccaaagtgaacaagccctatatacttcccaaatatgtttgatttgcaaatctattggtgaatgtgcatagcattttgaatggaacacagtgactgatgtattgctatgcacaattatgaagtatgtcagccacatttatggcactgtcatgtgcatatttttctagcaagcatgttcaacaagattcgtgagttgtctgtcatagtgtcatttagctcataatcgtcaactataattgactggaaatgatgctgaccatccgacccttccatattttcatcttaacactatctttttcacataaactctgtactattggataactttgtgagttattgcctataattgttttcttctatagttattctctgaaataagaaactttcatcaaagaccatagtacctgctattaccagtatgattgttttgaaactttccatttttaatcattttgatgcagtgaagtaggtggctgtgaatattatcctggtggtggtggctgtattatacttctttccagatccttgtgtgaacaccacacagatttggatttaaagaatgcgctgcttcatgaaatgattcatgcttatatgtgcatcaaagatagtaatgataaccataggtactttttagtaccatgactggcctcttcttgtattacacctgaatttctgtctacttttttttttctcgttttgactaatttaaaaactgtgatcaagcagtgaccatgggccaaaattccagaaactgatgaatacaatcaatttaaactctgtagccgatcctcatcgtcctcttggtggctacagcataactgtgttccatgagatcagaaagaaattttatatacacaaagtaagaacctgatctttaaaagtaaatcttattttctaatttcagattggcagctaacgatctctgtagtgtgaaagctgtggagatttgatcaagtcaaccaaaatcaaaggaccatcacaggatgactgcattgaggcaatgggtgctaatgacttgtgtgacagtttaatttgtcactggcattggtattagctatatatttctttgcattttttttgttccatgcatgccttattggtatatctctaaaggtgtgttcggaatccccagttcccaactcatccatctcgttttccgtgcgcacgcttttcaaactgtaaacagtgcgttttttacaaaaagtttctatacgaaagttgctttaaaaaatcatattgatccattttttaaaaaaagattagctaatacttaattaatcatgcgctaatgaaccgctccgttttccgtgcggaggggataggttcccatcctccattactgaacacagcctaagagtgcacataaatattcatagaaatataagctagatgtacattttaaagctaactgtgtaatttccaaaatgtgtaatttattactctctgccttgttagtgtatccttgcaatgtggggggtaggatgtaaacctcagtttgtgatgaacaaataaatcaactattattattgttaaatttgacaaagagagatgttaaactaagaaggtaatgatgggtgtctgcttcaatatctaacattttctttgtgttgtcctgtcactttggcaattgcataatctaaaaagtggtaaatgatctgacataaatttttctttattggaggtgaaatcgacatgtccagcagccaaacaagattagtaatacctgaacaactatcatgctctttctcctccttggggtcctgggatgcaacttactctaaatttagtgtcattgagttcatggatggagtcatgatttggctttctgtattaatatatatataggcacaagaagcggtgcactggtagctatcacagagttcaaggatcatcatcaggttgtgtagagggttcaaaagctttatctgtagaagcacctgattgcaaagttgaagaatcagcccctggaagttggcacaatgcgcatgcatcaattaagggtggaaaaggcaataagcatgaactggaagaaacctctgctgggtttcctcctgatgactctattggtatttctggaatggagtcctcttcaagagacacagctaataagaaaatcaaattgtcaaaggatattggtttggaccgtctaaccgccacaactgttcaggaagcaccgaagcgtccaagaacaacctcactaaagaagaatcaagagtgcagcagacagaagaaaagaaaaataagcaagtgggatggttcctactctgtaatcattgaatggttgaattactattctgtggatgagtcagatgaggatgaggtgcctttgataaataaaagaaccgaaagaagaaagcggcagaagttactgaaacttgttcttgctagggaatccaatagtggcagtgaaggtgctagttctacatcttttgtagaaaatggcagaaattctagcagtgctggctcttaccccctaagccagggggacaatgacaaatctgaaaatgtgcaagctaatcgagttgatgtaagttcattgccagatcatcctgtaagtagtcatgtagcagcagaggatcaagttggccaagctgcatcgtcaccattgaactcaccaactagaggtatcgttgttgacatttcagatggttgatggccagagttccattagtttctttcagctgaggcctggacgtacaattatccagactacagttgtaacacttacttttaattccttgcacctgtctactgctagacatgcaacgggacgatcctgtgaagcatgtgtcttgtacatgtcttcgtttcttcctttctcatttcaccttttcttttcttagcatagatcagttcagtatacttaactctgtcaggttgtgtgacccatcagtttctctccgtactagtctcttgaagaacagcaaagatcaggttttctcttt

SEQ ID NO: 16838 - DNA, 3493 bp, Oryza sativa
  ref <308>: DATABASE ACCESSION NUMBER: AK067308
  ref <309>: DATABASE ENTRY DATE: 2001-12-06
gactcgtccacgaaaaactcgccttctcaaaatctctcctcccccctcgtccagtccagcccaagcgccgaaccaaatcacgccacttaattttttttccgcgacgaatcgcctctggttttaatcgaacggatcgacgcattaaaccacaaatccgaaggggaaaaaaaaaggagaggaggaggaggaggaggagaggggaaggggaggaggccgccatcccattcgttgctagttcggcgggtccatttcgacggcggcggcggcgcgcgcgcgcgcagcggggagaggagagccgaggcgaggagatcttcgcggggtgaagcttcaaagccctcccctccgccgccgcgtcaggtgaggaagcatttagaatggtggacaagaacgatggatctgaagggctcaaattcaacacatcacacctgatgcaaacaactgaagaggtagcgagagcatttattgctgcagcttctgcagccactgtacagtcaacacgaccatctgtggtgtactcttccagagaagagagtggcagcccaatgcagaagctgcaacaacaattttcgaagatcctgaaagggttttcaacgtcacctgaagtgtctggatcttacaacccggaggttctcacaacacaaaagcgccagtggtccaggttccaactaaagtcgctgggtaataggtgcatcagagaaccatcacatcttttcgagagcattgtgattgttggactccctcctcaggcagatatccatgagctagaaaacattgcactagggagcaatgaggaagatgtaaagaaaccgagaaatatattcggtaacaatcaccaccaagttcatgcattgtcaaatttggaacctcaggttctttttgcataccctccagagaggcctctaccactcaagtacaaggatatcctctcgttctgtcttcctggaggtgtacaggtccatgcggttgaacggaccccctcattcagtgagctgaatgaaatcctcctaggacaggagcaacttaaagaaagcaaccagtctttcgtgttccgtttacaggttgctgatgactctacactatatggatgctgcgtgttagttgaagagattgtacagagaccttcgaagctggtttctatgctcacaagtgaaaaacctgtctttccacgccggagtcgttatgtaataactacaccgcgatgctattgcatcttttccaggctcccattctttgaactgcactttggggtgctacagagtattcttatggaagagcgtctcgaatggctcactgatggggttagcttgcttacatcattatcacctgaggaaacctgtgaggatgatgttgtctgcgaaggaactgaacttgcaacagaaaaacaatatttcgatggtcatgcagtagatctggaaaaatcctctgaatcaagtgtgggagtttgttcaaaggagctgtctgacactgacagcagttctgaatgtagagataaccaattggacttaaactgcaaagaagttcaacaggaatgtgtagtacaggatgatcttgtaacaggaacagctcctcagtgtgatactcttgaaaggcctgacaattgtttatcagaagatacaactgccgatcaatctgggattgagcttcatgaactggattctgtaccagttatcctgaaggaatctgataccacagaaaattgtggctattctttacaggatgatgtgaacgatgaacagcttgacatctttgttaatgatactattctacctctcatgcgctctcgcctttgtgaaggttctgaattatctccaggttcccaggactctccttctgaaggcataaatttcagaagcgatagccatgaatcggatttggaggagccatcatcaattggtcatggagacttagttggccacaacaatatatcgcaatgggctaaggcaaaaaaatatggatctctgcaagttgtttctcagtactatcagctgcagtgtcctgccaggggttcatcccttacttttcacccgttggatcaccttcatcctctaaggtttcaccggccaggtgaaacagttcttcatattgctggttctactattgatctgcggtcatgtgatacaagtttagaggtggctgagatgcgcaatgcgctatttgccgaggaggaatcgactgctttatcaacatgggctgtggcatccatttgtggatgcctcaggttggagcatgtaatgacactttttgctgcagcactgctggagaaacagattattattgtttgttctaatttgggaatgctttctgcttcagttttgtccatcatacctctgatacgcccatatcagtggcagagtctactcataccggtcttgccaaacgacatgatggactttcttgatgcacctgttccatacatagttggtgtgcagaacaagacatccgatgtacattccaggctagtgaacgccgtggttattgatgccaacaagaatcagatcaagtctacttctgtcccgcaactcccgcagcagaaggagttgctttctgccctgcgtccataccattccagactagtgggagagagttttctagcaagaaagaggcccgtttatgaatgtacagatgcccaggtggaagctgccaaaggtttcttggcagtgcttagatcctaccttgattcgctgtgttccaacttgagatctcatacgattactaatgtgcaatccaacaatgacaaggtttccttgcttttaagagagagcttcatcggttctttcccgacccgtgagaggccctttatgaagctctttgtggacacgcaattgttctcagtacatacagacctagttctctccttttatcagaaggactaagtctcttttaagaatttaaccatcttcagtgagctgatttgccaagtgttagatcccgatctcaactgtacatattgatcttgaaaagatgagctgcctttttattacattggcagctcaacgttgggttaccaaactgtatgggtgttcatatgtggttccaaagaaaccatactgaaccagacaaagagtccagttcatggctatgttaaggtactggcacggctcccataaaaatgaatacggctggtttggacgaaaccaccgatgactgttggagaaatggtatattattgagatccagatatggataattagccaaaatgatgttctagtagttatacattaatttggcatggctgttgcacacagcttgccatttaagattttgtaggtagtagttgtcccataggaaaacctcccaggtctctcccttcaacagtgactactaaatatgttaattctgcgttgcaaaatgtctgtaatctgaagtgttcattttgcagctgtaatgtaatctgtatatgagggggaaacaaaaatacgtactgttatttgaagatcgggttctttgaacctcgatctgttgagtgatggcatagtgtagagaagagttcggc

SEQ ID NO: 16839 - DNA, 1095 bp, Oryza sativa
  ref <308>: DATABASE ACCESSION NUMBER: AK067309
  ref <309>: DATABASE ENTRY DATE: 2001-12-06
gtagaaggacactaaagcagtagtctagtctcccggccaagcaagaaccaaaaagcaattaagatcgaactcgagcaaacatgtcgtcgactaacaacagttcaggcgagccgccgccggcggtgcgcgtgctgggcggttgggcgagccccttcacgaaccgcgtggtggtggcgctgaagctgaagggcgtggagcacgagatgttgcaggagacggtggggaagaagagcgagctgctgctccggtccaacccggtgcacaagaagttccccgtgctgctccaccacagcaagcccctccccgagtctctcgtcatcgtcgagtacatcgacgaggtctggccggcctccaatggcggcgccccggccattctccctcgcgacccccacggccgcgccgtcgagcggttctgggcacggtacgtcgatgacaagattctaccagggcttcgggttttgagaggatcggtggccggagacaaggaccaaaccgcaggtgaaatgtccacgactctacagcgtctggaggaagcatttgtcaagtgcagccaagggaaggaatacttcggcggcgacagcatcggctacctggatatcgctctgggttcgttcctcggatggatcaaggcggtggagaagatcgccggcgtcgagctcctcaacgaaaccaagcttccgatcctggctgtttgggcggatcgcttctgcgcgcacccagccgtggtggacgtcgtgcctgacgctgataaattggttgagttcaccgttcaatatggttctgtgctgaatactgtgaatgttcttcccaagtgatggatggtatgctgctttgtgcctgacgataaattggtttgagttcaccgtgcaacgtgcttcgtgttgccatttagtatggtcactagtgaaagatgatggtcatttacgttgttttgtttcgtttcttcggaactgtagtttccctttccgtctgagtctgtaattttgcttgtaagacttctctctgagtcttttattactacttctctcagtcttttattactactactactactgatgatgatgatgatattctaatgaccatcagccattcgcc

SEQ ID NO: 16840 - DNA, 2184 bp, Oryza sativa
  ref <308>: DATABASE ACCESSION NUMBER: AK067310
  ref <309>: DATABASE ENTRY DATE: 2001-12-06
ggccaaccacatcgggggggagtgtctcgcactctcgtctcgtctcacccaccgccccaaatctcgccgcctccatttctccccagatccaactccgaccatgtcatcctccgaccaggacgaccacgacgaggacgccccgctcttccgcgccagctccggcgacgacgacgaccacccgcacccgcgccgccgctcctccccggtcggcgaggtccccgtcgcgcagtcgatcatcaaggcggcgagcaacgtctgcttctcgctcttcgtcctcgccgtcctcgtcgtcaccgtcgtcgccgtcacctaccagccgcccgacccctggctccagtcctccgccgccatcaccacctccctctcccgcgtcctccccaactccaccttcctcctccccgacgactccctcctccccaccggcgaggacttcaactcctcctcctcgaccccctccgccccgcgccgcgacgacccagaccaggccaccgccaccgccaccgccgccgcggttaacggcacctgcgacccggacgcgccgctcaactgctccgacccacgcgtcctcgccgccgtcaaggcgttcaatgccaaggccttcttccgcaagtccatcgtcttcctcagctacgaggcgccggtgccgggacccaagcccggggagtgcgacgtcgcctggcggttcaggaaccggagggagaaatcttggcgcaggtacagggactaccgccgcttcgtccttgtccccggcgatggatgcgctctcgacattaacggcgtcggcaagttccgatccgggaccaatgcggctcgcccgcctcgtcagaagggttccaagaaccggaacccgcgcgtcgcgccgccgccagtggacgctgagatcaacgacaccatcccaattgttggttcagaggcagagttcaggagaggcaagtacttgtactacatgagaggtggtgaccattgcaagagcatgaaccagttcatatggagcttcttgtgtggccttggtgaggccaagttcttgaaccggactttcgtgatggatttgaacatgtgtctgtccggggcgcacacgaacaatgggaaggatgaggatgggaaggattttaggtactattttgatttcgagcacttgaaggagtcggtgtctgtggtggaggaaggggacttcttgaaagattggaagcgctgggacaagaagaagggtcctggccggatctcggtgcggaaggtaccgtcgtacaaggtgactccaatgcagcttaagagggacaagagcaacatcatttggaggctgtttgatgggcaggagcctgagaattactggtacagggtgtgtgaggggcgagccgctaaggtcatccagcggccttggtatgctatttggaagtcgaagaggctgatgaacattgtcactgagattgctggtaggatggactgggattatgatggtctgcatgtcatccgagggtggaaggcacagaacaagcaaatgtatccaaacctagatgccgatacatcacccgaggcacttgtagataaggttccaaaacttattaagcagccgatgagaaacctctacattgcgaccaatgagccgttctataactactttgataagctcaggtcatactttcatgtgcacttgcttgatgattacaaggagctttggtcgaatacaagtgagtggtacaatgaaacgacaacgctaagtggtgggaggccagtgccgttcgatgcatatatgagggtgattgtggacacagaggtattctatagagcaaagactcaagttgaaactttcaacaacttgacgagggattgcaaggatggaatcaatacatgcaacttgtgacacatgagttcgtgttgtgataattagcgatgtccatatactcttccttggctggcgcattggaattcagaggaacttcatccagggtttgtcattaggcatatcatcttaatgtatttcctgccgtaccatgttcaattcattacacgttgatctggattatgtgccatccattctttttgtgtaatttatgtattactcttgagaagtttcttgtaacttgttactggccccttcgcaaaatgttgccatctttattcccttggagttagccgggaacatctgttttgccacttatctgctattatacatgtatttctcatgcc

SEQ ID NO: 16841 - DNA, 1109 bp, Oryza sativa
  ref <308>: DATABASE ACCESSION NUMBER: AK067311
  ref <309>: DATABASE ENTRY DATE: 2001-12-06
ggatttttccacatactgctcgcacgttgctcgtgcttcgctcgccgccaatgaggccgggagccatggccgccgccgccgcgaagctcccgcgcctcaccacctccgccgcgctcttcccgaccccgaggccgttcggctcccccaggcccgccaaagccaggccgatgccgccgccgccgcccatcaccatctccatggaccctgccgccgtcgacccggcccacctccaggcgctcatgctcgcctgcgcacactcctgcgccatccgcccctcgccgccctccgccgcggaggaccccgtcgacctccgcaagctccgcgtcgcgctcgcgcacagcttcctcgtcgtgtccgtcttctgcagcgcgaggttcctggacgatggggatgggggtgtcgatggcgatggccggcggcggctgctgggcctggggctcgggctcgggcggcgagaggaccggcggctcgtcggatttggccgggccgtctccgacgtcgggctcaccgcgtccgtccacgacgtcgtgtgactaacaggtacatccgtcactacagaggagaggtataggccgacaaattgttgagagaatgacaagagtactccataacagaggtatatttgacatttccgcactatgtacagaaaaggagaggcccttttttgaagcatgtggatttggggacgatgcaatgggttcaacaacaatgatgtacacgggaaagatgcacagatagtacacaatgataattgtctcaaggaagatattgacagctcctctggtgggttaacagttgctgcttgaatatatcactgccagtaaaggaacagcagccggagtaaattatgcaatcctttctagctggttagaagagaaaataaccagaaggatatggcaaaactcatagcatactagtatttgtgaaggatagcagtacataccatgtttgataccccagaccagcatctgtatactctaccactgattgtaaaaactttgagatgagtgctaagatttcatttacaaacaaagaatgaaggaaggaaacaaatacatcaaacaagttattgaatctgcagtggaaatagcaattatccttcaaggctt

SEQ ID NO: 16842 - DNA, 2756 bp, Oryza sativa
  ref <308>: DATABASE ACCESSION NUMBER: AK067312
  ref <309>: DATABASE ENTRY DATE: 2001-12-06
gactgttcccccatccctcctcttcctttgccctgccctgccctagcgccgccgccgcttttccttccctccccggcttctcttcgccggcgacgacgatgcggtgcggtgtctccggctcagattctcaagaattctcgagctctccatgtcaagtagagggagtggacggtgcggtctgttccccgaaaccctagccaccactattcccccacccttctctcgctctctcccctgacctttgcgacggcgcagcctcgacctcgacttgccctcctcttctcaacgccgccgccgccagccttcctcgcatgccctcctctgacctaccccatatcctggagctctccctaccaatgctcccttctctctctctctctctctctctctctctctctctttctcccctcagttgagctagctccggggaatgtggtgatggagatcaatggtgagggggatcaatccgctagcccggtgcttgatttggtggataggcgcactcaatcttgaatccggtggtgttgtgctcagctcgggcatgagggggttgatccagaactgtggattgaactcaagatggtgatggtgaggcaagagctccacggtggggtggcatctcttgctcaagcttaaggatccgccgttgtgcgcgccatcatcactattcatcggttctacatctaggcggtaggtcagattgaaaccacatgccgtcgcatagaaaaacttcatttgcagttgggatgccgtcctcacttccggtgagtcaaagcatcaatctctttctctgtagacttgcctcatgtatagctggcatgcatcttctttttcctgcttccctgggttccctgctcacactgtgattctaacatcccaatctgaacaggcaaactgtcaaacttcgtttttttttcatgtatcattcttctattcacaatgataaacattgatagcctatcaaatttctttatcataagtgctagaatatttctgatttgtactgcatctcaaattgtacatgcgtgtgagctatcaagcttgatcaagtaacgggaatttcgtaatatttgtttaaatttgattaatttttgttcaaaatgttggaaatttcggaccgaaatttctagaaatttcgccatattggcactcccaatacaaataccgaaagcaaaaacgaaagattgaaccctggctatgagcctgtgagctgcttgctgtgcaaatccatgagttgtttttccactgaacaatcactaaagcgccgaaggaatcattcacaatgtccgtaaaacatttgccctgctttagatgctcagagtagctctctcgcatttactgaatgcatccatgtttcatactgtccagcacaaagatagggtgccgcaaaggtaaattctatttttaggtgccctctagctgtttgatgtatttctctacagaatcaaatgcaaatatgaagggtcatcgccacttcaaaattcaggtcagtttgagatcatgtcactgtgtccctattgactttgcctagccaacataaaacccttgacttgaaaagtatccatgacaactttattaaataaaaagggatgctctacactggcttgggtttcagagtagaaatttgattagatttgcaagatgttctttatgtgtttttcatgcatagttctctttaagggacttacaatttcatggttgctgttgatttaagtccataaaacttcttgcctaggagacgcaactcacacttttgccgagccattctcattagttaattaaagcatattactagatttgaatgtacattacagttgtgtttctatgtacaagaaggttaaatattgctaatatctatgttcttttccagtttgccttctactctagatggtagtttgaaattataagtagaatatgtttttagagagaaaaaagtgcaatctaattataaatgtgaatattgaatctggtaattatttttgtcttatctgtataaaaatgattggttgctaccatagaaggtgctcaggtttgtgaagactgtaggtgcatgcttggctatctattagccttgtggttcactgcttgtgctttctcagtcctaagcaattgcattgcaatctcattttataacaatctttgtatatgtgagaattgccatttagcttaagtatattaagggtgtcactgctaattagttgccatgacaagaacaaacaacttgacaatagagctttgctgcacaaattagttagctgggatgttcttctgtacctgtaagtttcatgtaagtaaggaaaatttcttatgacttatacaatgaattaattttcataggttcaatttttctagaagaggcaaaaatggatgagtatgtcttcttttgtttttagttctgaatagtgttttttatgagcctgtcaatgttattgtaacaggagtacacctcaggcactgtgggaagtgggacatatggatcaccagccatgccgcatggtcaacatcaaggccatggcattcgttcaaaaaaaaaaacatcaaggccatggccgttgaaggtggatcaccgtccaagcttagtcaacgtcaataatttcatatatctccataacaaactgtgtggttttgtataacttgcaaggaaccaataaacttaccctcctatgtttcgtatcttatattgtgctagctcaaactatctttgatgtatctttacatgagcatgcttagttctatcgtacttaattttatgatcc

SEQ ID NO: 16843 - DNA, 1429 bp, Oryza sativa
  ref <308>: DATABASE ACCESSION NUMBER: AK067313
  ref <309>: DATABASE ENTRY DATE: 2001-12-06
ggcccgtggcacaactcttgtgttgacccgcctcgcgctcgcctgccaccaccgccaccgccagcgagctggatgagccagcagccgcccccgcccgcggttgcttcccctccccaccacgtcaaaacccaaccccaaccatgatgctcctgcgccaccaccaccacccccacagcggcgccgccaccaccagcagcagctgcagcggcggcggcggctgttagagaggagggcacacaccaccaccgacaccgacacgctcgccatgccaccaagcgaggcggcggcgtgaggcgacgcagatctgaacggaggaggaataggaagaagggaggaggaggggagggagaggagttggaagagttggaggaggaggagatctctttcttgttcccgctcgatggagcggggggaggggaggaggggagattgctccgtgcaagtgaggaagaagagaacgcgaaggaaaagcgatggccctgattcaatcgctgaaaccatcaagtggtggaaggagcaaaaccagaagctccaggaggagaatagctccaggaaagcgccatccaaggggtccaagaaagggtgcatggctgggaaaggaggtccggaaaattcaaattgtgcttaccgcggtgtcaggcaacggacatggggtaagtgggtggctgagatccgtgaaccaaaccgtggaaggcgcctatggctaggatcatttcctactgcgctggaggctgcgcatgcatacgatgaggcggcaagggcaatgtatggtcccacagcacgtgtcaattttgcagataattccacagatgccaactctggctgcacatcagcaccttcattgatgatgtctaatgggccggccactataccttctgatgagaaggatgagctggaatctcctcctttcatcgtggctaatgggccagctgtgttgtatcagcctgataagaaggatgtgttggaacgtgtagtccctgaggtgcaggatgttaaaacagaagggagcaatggcttgaaacgtgtttgtcaggagcggaagaatatggaggtatgtgaatcagaagggatcgttttacacaaagaagtgaacataagttatgattatttcaatgtccatgaagttgttgagatgataattgttgaattaagtgctgatcagaaaacggaagtacatgaagagtaccaagagggagatgatgggtttagccttttctcctattagagtagtagtcatgctgcgggtcaataggaatatttcattctagctgctaggggatacttcaaatatctgcaacctgaagctttgtagtcatttacggttttcgtcttactgggtaatagctttatatatactataagccaactggtacaagaagttgtactgtgtgttgagtgcactgtggtaaaaatgaatctatatttaatg

SEQ ID NO: 16844 - DNA, 2555 bp, Oryza sativa
  ref <308>: DATABASE ACCESSION NUMBER: AK067314
  ref <309>: DATABASE ENTRY DATE: 2001-12-06
gggcgtgtgtagctactgctataaggagcgcgccgtgcaccgcctctcacaatgtcgaccgccgccgccgccgccgctgcccagagctggtgcttcgccactgtcaccccgcgctcccgcgccacagtcgtcgccagcctcgcctccccatcaccgtcctcctcctcctcctcctccaacagcagcaacctcccggcccccttccgcccccgcctcatccgcgactccggcgaggaggggcgaggggcggagctagcggcgggggaatggggggtggagtggaggagaggaaggtggtggacttggaggacggggacggggaggaaggggaggatgcggcggcggtggcggcggggtcgagcagggagacgcggatgctgccgaggatgccggtgcgggtgctgctcgctgagggcgacgactccacgcgccacatcatctgcgcgctgctccgcaagtgcgggtatcgagttgccgcagcctctgatggtgtgaaagcgtgggacatactaaaggaaaaatctttcaatatagaccttgttttaactgaagttgaacttcccttgatgtctgggttcctgctgctctccacgatcatggaacatgacgcatgcaagaatatccccgtcataatgatgtcttcaaatgattccgttagcatggttttcaaatgcatgctaaagggtgctgcagatttccttgttaagccaatacggaagaatgaattaaggaacttatggcagcatgtttggagaaaacaactgtccagcggtgttcttgatgtgcagcatactcaacaagaagataatcttacagaaaggcatgagcagaagaccggagtgacgaaagctgaacatgtgactgaaaatgttgtccacaagaacatggaatgcagtgaacaagaaagtgatgctcaaagttcatgtacaaggtcagaactggaggctgacagtaggcaaaccaacaatttactggaatataagcagccaatgggaaggcatttctccaagcctgaccacaagaacaccgagaaaaatggagggactaaaattcatgcatctaatgatggcaacttgattccacggagggaagaggatgcatcactgaggaggatgacatgttcaaatgatattaattgtgagaaagcttccagggatatggagctggttcatattattgacaatcagcagaagaataacacacatatggagatggatgttgcgagagcaaattcccgtggaaatgatgacaagtgcttttccattccagcacaccagttagaactttctctcagaagatctgactacagtagattagagagccaggagaaaaatgaacgaagaacactgaaccactcaacttcatctccattttccttgtacaactgcaggacagcatcatctaccattaatgctggtgatgctcaggcatgcagcacctcggcaacacatatagatcttgaaaacaaaaatggagattccaaaactccctctcaagacaagagggaaacaaaccaacctcccattagagttgtaccatttcctgttcctgttggaggactaacatttgatgggcagccattctggaacggtgcacctgtggcatcccttttctatccacaatcagctcctcccatttggaatagcaaaacatctacctggcaagacgcaaccacacaagcaatttctctgcagcagaatggtccaaaagatacggatactaagcaggttgaaaatgtagaggaacaaactgctcggagtcatctaagtgctaatcggaaacatctccgcattgaaattcctacagatgagccgcggcatgtttctccaaccaccggtgaaagtgggagcagcactgtgctggacagcgccagaaaaacgctcagtggcagtgtctgtgacagctcttccaaccacatgattgcccctactgaatcatcaaatgttgttcctgaaaatcctgatggtttacgccacctgagccaacgagaggctgcactgaacaagttccggcttaagaggaaagacaggtgctttgagaagaaggtgcgataccagagcaggaagctactagccgagcagcgaccgcgggttaagggtcagtttgttcggcaagatcatggtgtccaagggagctagggctgtccaaacttcaggagattgctgtgccacggttatcctggtggtcagtgtcagattttgtttgaagagtgaaagtatgattgccctgacctacagtcagcagtgtatggtggtgttgcatatatatacaggctaacttcgtgtgctaggttaggccatggacctcgtacattgtagagtttgtcagtagggatcatattttgcttcagatctagataagctgcgtttatcatgtagcacacgtatttatgttttctaaattgtatctagccaacagttaacgtgtaagctggacgtgtgtggatgtaaggtgtcaaggatatccaaagacaaagttcttttgtacagtttcttacactgaacatcgttggtgtagtttcatactttcagtaaagcttgtgatgcttccgaagg

SEQ ID NO: 16845 - DNA, 3653 bp, Oryza sativa
  ref <308>: DATABASE ACCESSION NUMBER: AK067315
  ref <309>: DATABASE ENTRY DATE: 2001-12-06
gagcctccccacccattccgctcgctcgtcgactcctcgtctccgcgagagagagaaagagagagaggggagggagcggaggtaaacccaaaaccctagcccgcgtcgtcgtcgtcgtcgtcgccggcggcgagatgtcggcggcggtgaacgaggagacctcggtctacgtcggcggcctgccgtacgaggccaacgaggacatgctccgcgacgccttcggccgattcggcaccatcgtctccgtcaaggttcccttccctacttcccacgccgcgcgccccccaccgctatcccgtcccgctctcccgtcgcaggggtttgcggcgttgaggagttttagctgttgacggttgtttggtccgagctccgaggtcaatcggcttgtttatttttttttctagggtttgttttgctgctgcccgctgtgatgtaaaagcacgcgagatgtcgcgagactcgttttggtggtcgagatagctgggttcaacaagggcgttgtttgttttagggtttttatttggatctacgtcctaatgcgagacatggagtggctgggtaattgggactctggagtgagggctcgggatttggtggggagatagttgtattatctaaagcgggaggggggaaatgaaggtgaatatgtagtgacatgctacttggttcagtcacacagtcacttattttgctgctaagatgaatagggaggcaagtagctcatatttcaaattagtttttagggtaaatttacactagaaggattcagggttccctttggatattagtttggatgcgttcctttttttgtgttattggtacttgatttaatacctagtagaatgagaggttcaataatgcaagtgatagatgtggttatattgtttctggttcaagtggaggaggcatggcattactgcaatgccaaagatgggtttaaagttttagttcccgagtttgccgatacaataacagaaaaggatttttgctttgaagcagtcaatgcactattttttccctcttaaagtagttacctgtcagataagattcaaattatgtgagagtacagaggaatctctttctgacctttgcaggtgataaatgatcagagagtcagaggcaagtgttacggttttgttactttcactcatgctgatgctgcacagcatgctatctcaggcatggacggcaaggtatgctcctatctggaacttaacaccttttattatctcttgtattaattacatttttgtttgcaacagagaataaatagacgtgttgttagagtgaatgaagtgcgtactagaggtgcccgagaattcgggcgtgaaggttttcggcgagaacctggaagcgcaagggatgcttattgggacagaagggatagagaaaggagctatgaccgtgacagagatccctaccatgacagggatagtgatagatctcgtgaccgtgatagagacagattttacgaacctagaggctttgatcaagaaattgactatcccatggatcaagatcatggggatgaaaggcgtagagactacgaccgtgcagcagaaatgcataatgttgattcggataatgacagagaaaaagaaaactctaaagactatgatagtgaaagagagaaagaaaaggagcagcgatcaagaaaaaggttcaggtattatcttctcattgtattttagctctgttaatattgctaatcatgcacttgggtggaaatagatcatgtatatatatattctagggaagatatttgtattgtgatgaaggcatgaagcttaattgaagttgcaaggcatctgagttgaatttccacaaaaaatatatttctggttgatgcatgtaattgtgtcagaaggttgtaatttctttagtggtgttatttagtttttaggactattgatgtggcatattttttgataaatctggataggatcctggtgtccttagtaaagtttcaaccacgaaaaccaattgttctattcttcttcttcttattattattattattttgccaacttacccaataatttatactgtatattcatttttatcaataatgtaaatttgcaattgttaatttactaattgactactccctgaatttaaagttgatggtcagtcttgtccaaatttgttagaatttgtgcagctgaaatgctgaatgcacctttgtagtgagtagtgacttgcagatatattgagtcttgtaagttgcttttacctgcatatgtcatctgtcagtcttgatttcaactgcaagtggctgattgtagattaaattgggttgacacctttgctatctcctagggggtgatggggatagacattggcacattgcaattaagtttaccccacagtgatcaagactaacagcacacataccaactgaatgggtttcacatattgagtatgctgaggatttaaaactgaaattatcgtatgtgccttgtcgccgtgattagcactttaaacaagtgttctgctggatctgaactgagatatgaaaccataaatagcgagcctggatccagggttgtctttctgttatctgcgcaataaaatagagtgtactttcgtatgtcatacttgaaatttgccagccaaatctcatttactggtatgacatctgttatgtacttatgttggctggtgcaaaatttacaaagagcactggtgagtttcgagtcttcatgtaatgtctacagtctattaccttctgctgtgtctgctttgaaacaaaatttgtatatgattaatatttttgcttgctaccaagtagtagagaagttaggattgagtcatctctttactttcctgacttcttctgtacagccgtccaaaagatcatgatagcagggatctatcagtttccagtgatgatcttcacagtgatgtaaatacatctctctttgttctgttacttcaaatggaaatttgtctatgagcttttctaaccatttattctattgcttctaatttttgttgggtttctcatttctcctttctttcttttcatgcatttatcaggcaaaacgacagttgaacaaagcaattcaaatgcgcgaggaccttgaaaatgaggttagtcagatcaaagataaagttgcagcaaaggaacaacacattgcagatttgcaaaagagatcccagaagttagaggatgaattgtctgctgcacggaaagtttcttcagaacgacaattggttgttacaaagctgtacaaatgttttctgcaacttcaagactacaatgacagggtgaagatgtctgaaaaggagctccagtctcttattgacgatgcaatgggtgaggttgacattggtgaagaagccacaaccaaagatggttcaatgtatgagaatggcgtagcatgaaaatctgcacatcacaaaaccggtattattagtttatcatggtgctaactttcctagaagtacaatataccatgaagaactgtaacaagtgattcatgtaagtgaaggctaggaaaccatgtattagtctgcagattgtttagtgtgaacttttgtcggtgtagattattagcccgaggaattcttgcctgactttgacaagtgataatgtgtatgctgtccgtaccatgccaactcgagcagttatctgactttgaaatttgtcc

SEQ ID NO: 16846 - DNA, 2224 bp, Oryza sativa
  ref <308>: DATABASE ACCESSION NUMBER: AK067316
  ref <309>: DATABASE ENTRY DATE: 2001-12-06
ggcagcaggcgaggagaggcaaccagagggagggtaggttggtttggaaggaaggaaggagaagagataaacaagttaggaggagacaagcatccgattccgaactttgatggatcccctccatatctatcttcccatccaatccaatctctgccctcaattgagattcgagagctaagctaagccacgccaaattaagccatggcgtgcacggcggcgcgcatgttcgcctccaacgccaccctctgcgcctgcgagccgggcttctacctctccgccgccatcaacggcacctgcctcggcctgcccgacggcggctggcaggtcggctccgtcggcgcctcccgcaaccagagcttctacttcctcacccccgtcctctccctcgacgtcgtcgcgccgcctcacccagtcccaggccctcctcctcgaggccaccatcgctgccctcctctcctggcttgccttttgtgccttcgccaggttcaccggacacgaccccaccggcaacaagaggctcttccgcgcgcgcttctgggtcagccgcctcgactgcatctacgacaccacccactgggcggatgaccagcaagtactgaggaaaagaaaaacagagttgggtggtacgtgctcagtagctagcttgatactcttcgttggattagtcactgtgctgctgtaccaagccatccaaagacgcaacattgaagtgcatcgggtcaaaccagccaatgctcctgatttgttgtcttttgtcaatgatatcgaattccacataaccaccatctctagcatgtcttgctctcagttggttgccccttctacaattgcaatgggaacacctggatctatggacttcaggctgctgcctttgtcaacattgttgacatacaattgccagaacacgagccaggggccatctgtttcactcaagtgcaatggctgcagaatcccgccaagagaccactacgtatcctggcaatttattgacctgccaaggcaaccagctgccgctgttggcttccagtttaatctcactgcgaagcaacatggagatgacaaacatgtgagctctgtcagtggaactataaactccgacaattttactgatgacaagctgaagacattcagagggagagattccaatgtgctcaagattcaattgtttcctcaaacatacatcaatcatcacaatttgaagcttctgcaacctctggttcaggacttcactcaaggttctaccttttcaaatgttagaaacttgaatgcttccttgcaaaaccctatggatggaataataaatactacactctacataagctatctttccaactacattgtggagattagcaacgaaaatgtgctaggcccagtcagtatacttgcaagtattggtggcctttatgccttcagtgtggcaatatttctttgccttatggctcaatgtgaagctaggataaaaaagcttcgagacgaggattccagaatgctaaaaatactgaggaaaagacgtgctcaacagaattgggataaggtgaggaagtttgtcatgtatacctggggccctagcaacttggatccaagtgatagaagtggcaaatggcctgaaagttcagtgatggattctctccatggatccttccacaagaaaagaaaaccgattagacgagcaacctcgaatggtaacaaacctaagagaaatcctgctgacgcgggagttattgacatcgaaagagttggggaaatgcaggagtcgagtagttctagacaggcttaatggatgaaagctgtggatgctattggtcattgaaatcatcattggagcggcataccgtggcttggctatatggcaggtccaacacaaccgtactaccagagaggttttcttgtatgtatgttgcaacaaatggggagaaatgtacggagttttaactattaatcagcatgttggctgctgccgaggtcaggccagaatcctctttgattttcatgggacttcgtttcttgagttgtcgaacactgtatataccttcaccagttaccaccctccacgtgcaattacagtggggaagaaacagaaagatgcctatcatttctctatatgaagcagatggtggcatttgtattttaatttattacatcgtgtcatcgtgtaaatcttcgtgttggtgtgattcgccgaccgttttctagccggctgattatatatgccaaacttatactc

SEQ ID NO: 16847 - DNA, 985 bp, Oryza sativa
  ref <308>: DATABASE ACCESSION NUMBER: AK067317
  ref <309>: DATABASE ENTRY DATE: 2001-12-06
ttggattgcgagaaaggaatagtaaagcagaggattaagaggcagaaaggcttagcttcacccagcctcgaagcaacactgcaactctcctcctctcttcctctctttctctcttctctgaccactcctccaagatggctaggtagatggctagctaaggcatatattggtgtgctttgcctctgcctgtttttcagcttggttatagctgcagcaacagcagcagcagcagctgaggtgaatgaatgcatggtaaggtgaattcagggtgcagaggtaggcgagtggtagtagctgggaccatgggctggctccagtctctcctcgcgcctctcaagaagctctggatccgcatgcattccgcccagaggaagaagagagggatctacatcctgtacgaggacgtgaagtcgtgcccgtgcgaggacgtgcagatactctggtccatcctcgtcgagtcctcccacggcggcggccatcaccaccaccacccgcagccgctgcggctgaagcagtgacaacgacggcggcgacggcgacgacgacgatgacgaactcttccgggccggcgtccgagcgacgagcacggcgctccgagacgtaaccgacggcggcgcggcgagcagcaaagaggtgtcggtgtacataagaagacgacgagcggtgttagcagcttcgccgtggtagggaacagagcgagagagtcgttttcatttcagtttctttcgcattttcgccaacgttttgagccacggaaatggcgtgcataagccgatgagctcctcctctctctcgcttagctcggatgtgtctcaccgacactgcgagctaggaagcgagtttttttttttttttttcctttggttgtcactctcctttacttttcgaaaaaggaacggcacatgtaacgctcggttggtgatcgccggggtcaatgggccacgcgtgccagtggctttgtacatacaagaagcaagaacatatc

SEQ ID NO: 16848 - DNA, 2329 bp, Oryza sativa
  ref <308>: DATABASE ACCESSION NUMBER: AK067318
  ref <309>: DATABASE ENTRY DATE: 2001-12-06
gatcgaaacaagccgtcggagagaaagagaaatattcgccaccggctgcaggcggcggcggcggctgaacccctaaacccaatgtcgccggcggcgaggagcctcctgctatcggccgcccgccgtcaacgccgccgcttctcgacggaggccccgtcgtcgactccgcagcagcagctcctccccaaggggaagcggtgggacgcggtggtgatcggcggcggccacaacgggctcgccgccgccgcctacctcgcccgcgccggccgctccgtcgccgtgctcgagcgccgtggcgtcatcggcggcgccgccgtctccgagtccgacctcgtcccgggcttccgcttctcccgctgcagctacctcctcagcctcctccgccccgccctgatccaggagctggagctggagaggcatgggctgaagctcttgccgcggagcccgtcgtcattcacgccatgcctagacggcaggtatctccttctcggccccgacgctgagctgaaccactcggagatcagcaagttctccgagaatgatgccagtgcatacccgaggtacgaggagaagctggagaagttctgcaaactcatggactttgtcatagactcgcctccccctgagatgaggcatgaataccacctctccatggtggacaggatgaaggataaggttgacaagtctgtgttctggagcaaacttcttgggattgtgatgcagcaggggcagaaggacatggtggatttctttgaccttctcctttcaccagcatccaagatcttgaacaactggtttgagggtgatgtgttgaaggcaactcttgcgactgatgctgtgataggttctatggctggtgtccacactccaggatctggttatgttcttctgcatcatgttatgggggaaactggtggccaacgtggagtatgggcgcctgaaaccatgtccaagcctttgtggccctagcgtcaggaattgttttgctggcgcatatctccactgtctagtcaaacagggcaaatgccatataatggtcatatggtttctagccaaatatgctagttttagcattgttggttcattagtagttggtttcttgattcttcttattttgcttgttgaaaaacttatgtggtaaaacaaaaacattcgcttcaggtatgttgaaggtggtatgggttcagtatcgtcagctataagcaaagcagctcttgaagcaggtttcccagatatctgttcatcacacttctgggaaggtacagggggtagttttggctgatggaacagaggtgctgacatcagttgttttatcaaatgcaacttcatatagaacatttgtggacctagtgcctgccaatgttcttccagacaacttcctctctgctatcaaaactgcagattatagctctgcaacaacgaaaattaatgtggctgttgacaggctgccacagttttcctgttgcaaagactttaatcctgaaggcggtccagaacacatgggcaccatacacattggatctgaaagcatggaggaaatcgatctagcgtacagggaagctgcaaatggcgtctcatccacaagacctgttatagaaatgacgattccttctgtgttggataagaccatctccccaccaggccagcatgttattaacctttttgttcagtacacaccatacaaactttcagaaggcagctggcaggattctaatgttagaaaatcctttgctgaaagatgcttttccttgattgatgaatatgcaccgggttttagctcatcagtggtaggctatgatatgctgactccacctgatcttgaaagggagtttggcctaacaggtggtaacatctttcatggcgcaatgggcttggattcacttttcctcatgaggcctgccaagggatggtcagattacagaactccagtgaagggattgtacctctgtggcagtggtgcacacccaggaggtggggtaatgggcgctccgggccgtaacgctgcctccgttgttttggaagatctcaggacaaaatagatggtgacccgaggaaacatggaaacggtgattgacaccaggctgggtctcgttcaagcactgcactgcaaaagcaaccgaattccatcagaatgaaaagcacctcatcagacatcaggtataaacacctgtgccatgtgagctcacatattaaggaaatggacaaacatttcttgaggagaggcacattttctgaattaattggccgactttctagtttagagaggggaacattctttgccacctgaccctatttcccagtatgaagatattttgcatttgttctcttc

SEQ ID NO: 16849 - DNA, 3334 bp, Oryza sativa
  ref <308>: DATABASE ACCESSION NUMBER: AK067319
  ref <309>: DATABASE ENTRY DATE: 2001-12-06
gtccagccacatttgatccccctccactccattctctcctcctcctctcccaccataatggccaagctcccctcccgctccccactcctgctcccgcctctcctcctcctcctcctcctcagccgccgcgtcgcctcctcctccaccgccgccgccgccgccgcagcgcggtctgagtgaagtgaggttcttgggtggaagcgaaggagaagatagatagatagagagagagagagagagagagagaggattaaggatggaggttgacccatcgtcgtctttgccgggcgcgggggaaggaggaggaggaggaatcggcggcgggggtggggatttgtggccgttcgactcgctcaccacgtcgctgctgttctcgtcggtgtcggcctcaccgcagccgctgccggcctcgtcgtcgtggctcacgccgccctcgccgctgtggctgttcgacgagcgccagctgctcccgctcgacatgggcgcccccgctgcccccgccaccgctccgcccgccgaggccgccgccgtggtcgaggaagtccatcggacccgctccgggaattctgacacgactagtaagagggttgatcagattaatagcaaatggcagtttcacctatctattgatgataacacggacagctcatgcttgtttaaggagaggcttacacaggctcttagatacttcaaggagtccacagatcagcatctgctggttcaagtttgggcaccggttaagagtggagaccggtatgtgcttactacttcaggacagccctttgtacttgaccagcagagtattgggcttcttcagtacagggctgtatccatgatgtacatgttctcggtggatggagaaaatgctggagagctggggctacctgggcgtgtgtacaaacaaaaggttcctgagtggacaccgaatgtgcagtattatagcagtactgagtacccacgccttaaccatgcaatcagttacaatgttcatggtactgtagccttgcctgtttttgatccttctgttcaaaattgtattgcggttgttgaacttataatgacatcaaagaagatcaactatgctggtgaggttgataaagtctgcaaagctcttgaggcagtaaatctcaaaagcactgagatattggaccatccgaatgtccagatatgcaatgaaggccgccaatctgctttggtggagatactggagatcttgacggtcgtatgtgaagagcacaagcttcctttggctcaaacctgggttccttgcaagtatcgaagtgtactggcacatggcggtggtgttaagaagagttgtttgagctttgatggaagttgcatgggggaggtttgcatgtcaaccagtgatgtggcatttcatgttatcgatgctcatatgtggggatttagagatgcatgtgtagaacatcacctacagaagggacaaggagtttctgggaaggcttttatctatcgtcgaccttgcttttctaaagatatcagtcaattctgcaagttggagtatccccttgtacactatgctcgaatgtttggtctagctggctgctttgcaatatgtttgcaaagtatgtatactggagatgatgattatatattagagttcttcctgccaccaaattgcaggaacgaagatgatcaaaatgccttgttggagtccatattagctcgaatgaagaagtgccttcgtaccctaaaggtagttggcaacggagacaccaatgaagtttgtctgcaaataagtaatgtgctaataattgagactgaagatttgaagacaaatgtgcactttgagaattctgaaggttgctttcgtgaatcgcctgaaagtaatggaagccaaagagtccacgaggttgataatgatggcaacaaagtttcaatcatgtcagagagacatttgctagctgatgacaactctcaaaacaatggggcatctgttggcaggccaaatggtagtggtgcttctgattcgcttcacaaaagtaataaaccccctgaaaggagacgaggaaaagctggaaaaacaatcagcttagatgttcttcagcaatatttctcaggaagcctaaaaaatgcagcaaaaagccttggtgtatgtcccacaaccatgaaacgcatctgcaggcaacatgggatttctcgttggccatctcgaaaaattaacaaggtcaaccggtctctctcaaaactaaagcaggtaattgagtctgttcaaggctcagatgcggcatttaatctcacgtctatcacaggtcctctccctattcctgttggaccttcatcagattctcagaatctagagaaagcaagtccaaataaagttgcagaactttcaaatctggctgttgagggggacagagattcatccttgcaaaagccaatagaaaatgacaacttagctatattgatgtcacagcaagggtttataggtgcaaacaataacttgcaacttgaagcagacaaagcttctcactcgagaagctcatctggagaaggcagtataaactcacgtacctcagaggcctcatgccatggaagtcctgcaaaccagacatttgtttgcaagccaattgcatcgacgttcgctgaaccacaattaattccagaggcgtttactaaagagccctttcaagaaccagcactaccgctttccaggatgctcattgaggattctggaagttccaaagatttgaagaatctcttcacttcagcagttgatcaaccatttttagcacgttcaagcaatttggcgctgatgcaaaattcagggacggtgaccataaaggctagctttaaggaagacattgtcaggttccacttcccatgttccggtagcgttactgcattgaaagatgaagtagccaaaaggctaaggatggatgttggcatgtttgatatcaagtatctcgacgatgatcatgagtgggtgaagttagcatgcaacgcggacttggaagaatgcatggagatctctggtagccatgtcatcaggctgttggttagcgatgttgcggcacaccttggtagttcctgtggaagctcaggttgataattcaggtcagcattttcgttccatgggtgcatacatgttctgcgaggtcagtctcacctgttgttaatctagttctcttgctagatagcagtagctacttcattgtgtttgattattgtatcaatttttggttcgaatacatgtacttgtgcaaaacggcacttgtagtcaatactgtacatattaagcccttggtgctggaaaattctgatgttcaagttacaaaggttaattggtgtaatactaatatcttcgctgtcc

SEQ ID NO: 16850 - DNA, 974 bp, Oryza sativa
  ref <308>: DATABASE ACCESSION NUMBER: AK067320
  ref <309>: DATABASE ENTRY DATE: 2001-12-06
ggtacgtttgttatgacgtcatcattatcatcatccacagcctctgctgctgcttgttgcaagagtagaagtcgtaatcctcctccggcgtcggcgccacacactagtactgcacgagtagttcgcagcaacaggcggaggcttctcttagtattcttctccgcagaggcggcggcggctgcgacgagcggtctcatccagaccccgtgtgggcaagcctaccctttcgctggcaccaacgtgaagaagccgcagccgccgtccaccccttactctcaatcccaatcgcagcagcagtttggcctcgacgccaaagggaggattagggcgtgcccgtcgacgaaccccggatgcgtgtccacaaaccccacggtgggcgcatcttgctccttggcatccccgctcattcgtcccgctaatacaacaaacggacaaggccgccgcttcgctgcgcaaggctatcctcaagacgcagaggaatgcggtgatcaaagccgatgaggagacggcgtacgggcattacatctaggcggaggtcgacggcggcgcaggccgcgatgtgatggagttctcctcaaggaatcccagtcccagtcccaggaggtggtggccgcgtaccgatgcgtcgccaccaaggttatattcgactaccccttcaccactgcgtcggcgattcaagagggcagagccagaggatcgccgccgtcgcccaggagctcggatggtacgcccaggacctactcaacgccgccaccgccgacgaccactctatcctcgactattaaccaaggccatacatatgcttgcttcattatctctagtctgtacaagtacaactcgtccaaattcattcatccatccatccatccacgacacatatacaaatactaaactattattactattaagtagtactagtagccaccgatatatatacacaacatttgtattaatcaaaatgctaatttattact

SEQ ID NO: 16851 - DNA, 1271 bp, Oryza sativa
  ref <308>: DATABASE ACCESSION NUMBER: AK067321
  ref <309>: DATABASE ENTRY DATE: 2001-12-06
tgaaacacattcagatattagtgcaactgcgccatgaccaccaaagaaattctccatatgaatgcagggcatggcgaaactagctatgctcgcaactccacagttcagagcaagatagaatgaagatgctgataaatgaggccatcacaggcttatgcgaaccgacgagcaccattctcccaaagagcatggcgattgcagacttgggctgctcctcaggcccgaacgcgctaacgcttgtctcggctgctctcgatgctatccaccatcactgtgcacagcagcaacagccaccgccagaggtgtgcgtcttcttgaacgatttgcccagcaacgattttaactccgtcgcgaaaagcttggcgactctgaagcacagccatggcgatctagacgatccggttgtgatcaccggaatcggaatgatacctgggtcattctacgagaggctattcccctgtggctctctgcattttgtttgctcgtcgaacagcttgcactggctatcaaaggctccagatgatcttaaggagggtaaaatacctatgtatgacatggttgaacatcttagggtgtcgaggcgtgcagctgttagggatgcttatgctcgccagttcaggaaggatttcacgcagttcttgagcttgagggctcaagaattggtgacgggaggccggatggttatctccttgtatggccggtgctcggaaaaccctatctcaagatccaatcaggcatggcaggtggtagcagtagctttgaatgacatggcatccaggggtatcattgacaaagaaaagctcgattccttctacataccactctacgcacctttggagaacgaggtgaacgaaatcattgaggatgagggttcatttgaaatcaacaagatgctagtgcgaaatccattcagcggcatggacgacgccacggtcagtccaaagatgatagcattatcgataagagcagtattcgagtcaacggttgttctgcattttggatcatcagaagaaattatggatgagtttgccaaaacggttgagcagaagttgagctctggatcagcctggcgagccgtacttgctgccgagtaccctctcgttttgttgtgtctttcactcacaagagtgatctgatatcttgttgtgcttcttttctttatgtcatgtgtggaacactgcccccatcttaaatgttttgtttagtcacatatatacttatcaaataaaagcctttttccgggctttctcaggagcatattaatcaatttt

SEQ ID NO: 16852 - DNA, 3431 bp, Oryza sativa
  ref <308>: DATABASE ACCESSION NUMBER: AK067322
  ref <309>: DATABASE ENTRY DATE: 2001-12-06
gtggtgaggaccatttccattagcacatgttttgaacttttaaatccatgcaaactattaaaactaattagctatgacactcccaagcaaaaacccaatagcaagtatgactcaccaattttaattcttttagcatacctatcaaatggagatgacatgtgaacggacactgctaccaactcaagactccaaaacacacagcttgcactcgtttgtatcccgaaagaacaaatttcttcttgtggggtaccacacagaacactgaatcagtcgccaatgacaagttaaacaggactccagaaatgagggacctcataactttgtaaacttgagttagcctaatttatttgttacatgatcaaaccaagaagatccaggctaacaatgcttgcttaaattcttaaactcataagggtatgacaactcccaacatattaacatcacatttagctgatatgcatggccagtagatatgagaaacctgcaaaaatactagtgatcatggtaaaagagtagtggtcaagatttaataagttggaattgtggtggaaacctggcacccacctctaaatcacaataacacaacaaaatattacatgttagatgcagtttaactaaaacgttgtccatgctaactttgtgataccatcttttaatctataattcaatgctagaattccagttgatcttcaactacctttgggtaacttttgtttctgatgacaacaaaaaatgcattttggtgcaggcacattttttgtttcctcataacttagacaactcgaggcatcccagcataagattatcctcaaagagcgcatctcaacattgtagagcctcaaattcagtatcagtgtcactaacactatcaatctaagatgaagaaaaaaaaattaccgtcggcaactcgtgcggcaagtccaaaatctgcgagctttatctttcctgccttggtgagcagtatattctccggcttaatgtccctgtgaacgacgcccatctcgtggcagtacttgaccacggacattagatctttgatcacaatggcggcgcgctgctcggagaacttgccctccctcgccatctcgtcgagcaggcggccgccgccgcagagctccatgacgaggtagaacttgtcggcgtcctcgaagacggccttgagcgtgacgatgccggggtggcccgagaggtgctgcatgatctccacctcccggtggacggtctcctccccgttcttggggagcgccttgcaggcgaactcctcgccgccaaccttggcgcggcagatccggacggagccgaacttgccctggccgatctcggcgccgagctcgtactcgctctcgagccgcttcttccgccccatccgggtggcggactcgatgcaccccagcttccgcttcagccccctgctggggctctccggcgcggcccggccgctcgcggggggcgccgtctggaccacgcccccgcctccgccccggccggaggcgtcatcggaggagggatccttcttcttcttctccgggcgaggcttgggctcgcggcaggcgcgcttgcgggcgacggtggttggctcgtgggaggatccgacgagggagcacgcggagcgcgcgcccttgcgcttccgcggcagcgacgactccatggactcccacccccccccccccaccccgggcgatcaggcggcgtgcttgcgccgcttgcgggtcatggggatgcggatcgggaggggaggggagggttggtggcggtggattggggcgggggaggggaggggctcgagggaggaaagggaggaaagaaagccaaagcgttggggagcggagaggagatgaggaggaggaggacgggggggggaatcgtgcgagggaggggagggttttttgggcgagatttgagttttggcaccctcccgcgcgccatggtgtccgaccaggagatcgccagctgcgtcgagtccgtcctccgctcgtcggggggcgccgccggggaggcctcgctcgccgccgtgctgtcgcaggcggaggccaagctcggcgtcgacctcgcacacaaggcgaccttcatccgcgaccagatggacctcttcttcggcccgcgcctccagccgccgctcgtcgccaaggcccaggcggcggcggcggcggctcctaatcctcctcctctggtcgccgctcccgcgcctgccatgccgcaggtgcaggtgcaggcgcagttgcagcagatgcagcagcagctcgcggtgctccagccccagctcatattccaggccatgccgcagctccccgctggtgtaccaggcggcgccgctggggcggtctccccgcagcctcccgtgccggccatggcgttctacccgccgcctcctctggccttccgcgtcaccagcggcttggctggggtcgccactggtgggaccgtctccttccagcagccagcccctggaaccggcggcactgcttcccccaccgccgcagtacaggccgcgggcgacaacaaggaaagtgcttcaaagcggaaacgaggtgggcctggtggtttaaataaagtttgtgcaatctcacctgaacttcagactattgttggtgagactgtcatgtcaagaactcagattgtcaagcagctttggcaatatattcggcagaataatcttcaagatcctgatgacaaaaggaagataatctgcaatgatgaacttcgtgtggtttttggaactgacacaactgacatgtttaagatgaataaattgttggcgagacatataactccacttgacccaaaggatcaaattcgggaagcaaagaaatttaagccctccaatgtagctactcagcctatgcctctgattaatcaaccctctgtggtgatttctgatgcactagccaagtttattggaatggaaggcacagtgcctcaagatgatgctttgaggtacctttgggattacataaaagcaaaccaacttgaggatgctattactggatcaatattatgtgactcaaaacttcaggagctgttcggctgcgagagcattcctagttctggattatcagagttgcttgctcaccacttcattaaggaaacatagcatatcctcattaactgatctaggattgcagtggtgccagataggcctaactttacaatatggtgttcttgacaaaaaaatggacagctagcttatgtatcttttctatgctctggattatgaagtttgtcagagaaaaccagattatttgtggtagcctgtaattttaattctacgtagtggctactgccgcagtactttggtgtaacctctacagaattcgtagcgttagtttctaaatgtcaaaatgtctttggctgactatgtaaagttaagctttttatttgagtgccaggttgaactttttaaaaagctgtaatggattcacgacctcttggtt

SEQ ID NO: 16853 - DNA, 4228 bp, Oryza sativa
  ref <308>: DATABASE ACCESSION NUMBER: AK067323
  ref <309>: DATABASE ENTRY DATE: 2001-12-06
ggccctcctcttgcgtagggaaaaggaagaacacaagagcaagcgagagcccagaaatcctatcctcgactggaggtttttgtgtattgtatagtggtagatttttttactgacttgggagttgtgtgatagtgtgggttgcgttctttttttagtgtgtaaacgatgtcgtctttagtgtcgacgccgttcacgacggcaaccggggtgcagaagaagctgggggcgcccgtgccgctccactcgttcttgcttcctcgacgctggtatctggcacccgctggcgcccaccatgtacgacgacgtcaaggagtacctcaactggtacggcacccgccgcgacaccaacgacaagctcaaggaccccaacgcgccggtgatcggcctcgttttgcagaggagccacattgtcaccggagacgacggtcactacgtcgccgtgatcatggagctggaggccaagggtgccaaggtcataccgatcttcgccggcgggctggacttctcgggacccacgcagcggtacctcgtcgacccgatcaccggaaagccgttcgtgaacgcggtggtgtcgctcaccgggttcgcgctcgtcggagggccagcgaggcaggaccatcccaaggcgatcgccgcgctgcagaagctcgacgtgccgtacatcgtggcactgccgctcgtgttccagacgacagaggagtggctgaacagcacattgggcctgcacccgattcaggtggcgctgcaggttgcgctcccggagcttgacggtggcatggagcccattgtgttcgccggccgtgaccccagaacagggaagtcacatgcgttgcacaagagggtggagcagctctgcactagagcaatcagatgggcagagctgaagaggaaaactaaggaggagaagaaactggcaatcactgttttcagcttcccaccagacaaaggcaatgttggcacagcagcatacctgaatgttttcaactccatctactccgtcctccaagatctgaagaaggatggctacaatgttgagggtcttccagacacagctgaggccctcatcgaggaggttattcatgataaggaggcccaattcaatagccccaacctcaatgttgcttaccgcatgaacgtgcgggagtaccagtcactcacttcctatgcctccttgctggaggagaactggggcaagccacctgggaaccttaattctgatggtgaaaacctccttgtctatgggaaacagtacggcaatgtattcattggagttcagcccacttttggctatgaaggagatccgatgcggcttctgttctcaaaatctgctagccctcaccatggctttgcagcatactacacctttgttgagaagatcttccaggctgatgctgttcttcactttggtacccatgggtctcttgagttcatgccagggaagcaggttgggatgagtgatgcatgctatcctgacagtctcattggcaacatccccaatatctactactatgcagcaaacaatccatcagaagcaactgttgccaagcgcagaagctatgcaaacaccataagctacctgacaccaccagctgaaaatgctggtctctacaaggggctcaagcagctttcagagctcatctcttcttaccaatctctcaaggacacaggacgtggtccgcagattgtgagctcaatcattagcactgcaaaacagtgtaatcttgacaaggatgttcccttgcctgaggaaggtgtggagcttccaccaaatgagcgtgaccttattgttggaaaggtgtatgccaagatcatggaaatagaatcacgcctcctaccatgcggtctgcatgtgataggtgagccaccaagtgccatcgaggctgtggccaccttggtgaacatagcttcccttgatcgcccagaggatgaaatatactcactgcctaacatacttgctcagacagtgggcaggaacattgaagatgtgtacagaggaagtgacaagggaatactggcggatgttgaactgttgaggcagataacagaagcttcacgtggtgccatcactacctttgttgagaggactacaaacaacaaagggcaagttgttgatgttacaaacaaacttagtaccatgcttggttttggtttatcagaaccatgggtacaacacttgtccaagaccaagttcatcagagcagacagagagaaattgagaaccttgtttactttcttgggagaatgcttgaagctaattgtggcagataatgagctgggaagcttgaaacttgccctcgagggaagctatgttgaacctggccctggtggtgatccaatccgtaacccgaaggttctcccgacagggaagaacatccatgctcttgaccctcaggcaatcccaactacagctgccttgaagagcgccaaaattattgtagaccgtctgctggagcggcaaaaggttgacaatggtggcaagtatcctgagacaattgcacttgtcttgtggggcaccgataacatcaagacctatggtgagtcattggcccaggtgctgtggatgattggtgtgcgcccggttgctgacacctttggccgtgtcaaccgtgtggaacctgtcagccttgaggagcttggacgtcccaggattgacgttgttatcaactgctcgggtgtcttcagagatcttttcatcaaccagatgaatctactggaccgggcagtgaagatggttgccgaactggatgagccagaagagatgaactacgtgcgtaagcatgcacaagagcaggcacgggaacttggcgtttcattaagagaggcggcaacaagggtgttctcaaatgcatcaggctcttactcatcgaatgtgaacttggcagtggagaatgcatcatggactgatgagaagcagctccaggacatgtacctgagtcgcaagtcttttgcatttgattgtgatgctccaggggcaggcatgcgagagcaacgcaagacatttgagcttgctctagcaacagcagatgccacattccagaacctagactcatcagagatttcactaacagatgtgagccactactttgactcagacccgacaaagctggtgcaaggactgcgcaaggatgggcgggcaccttcctcatacatagcagatacaaccacagcaaatgcacaggtgaggacattgtcagagacagtgcgccttgatgcaaggacaaagctactgaaccctaagtggtacgaggggatgatgaaaagtggctacgagggagttagagagattgagaagcggctgacaaatactgttggatggagtgcaacatctggacaggttgacaactgggtttatgaggaggcaaatgccacatttattgaagatgaggctatgaggaagaggctcatggacaccaaccccaattcattcaggaagctagttcagaccttcctagaagccagtggcagaggctactgggagacatcagaggaaaacttggaaaagctcagggagctctactctgaggttgaagacaagattgaaggaattgaccggtaaatttatttgatctatcagatcctgcattcaaccaaggaggagaaatccttctgtctcactgaatctagagttgagacttgtacactttgtataatttataaaaagttgtaacatgacatacacgaggataccgtgttttaacaaagagggtggctgtgaatgaaaatggagcatgggtagaagtacttgaatgaatgaaaatggcgttccccaacttcaccgatgtcgccggcgccgtcgtgctcctcttcctcgccgactcgtcgccagcgccgtccccgcctccacctcctcccactgttaggtactacttccgcgcaacactcccgtttctccattaggtgttcggcgcgacgagtcggcaacggagacggccatccgggcggccgtcggcgacaatgctgggaccagcaaggccctgcgcttgttgctgaagcatggggggtgcttgaggtgtaatgacactggtggccgcagtgatccgtatgtttacatggtatgtgaaacttatgctaactgtttgaattgagacgggaataccaaattcgatgcatgttctgtgttgttgaatgatggtggctcattgtattgtatcttaagagatattcagaatggagtagtattacccttttatagtgtgcaaattttttgaatcgagatagtgaacttagt

SEQ ID NO: 16854 - DNA, 1732 bp, Oryza sativa
  ref <308>: DATABASE ACCESSION NUMBER: AK067324
  ref <309>: DATABASE ENTRY DATE: 2001-12-06
ggggtcgtgtgttcgtgtccacccctatcccctcatcaccctcttctctcggctctcgcttcacttcctccactccccgcgacgccgacgacgacgaccacgacgccggcgacggcgacctcccggcagcttatattcctccccccgcttgcttgcttcctccccacctcgcctccatcctaggtgagcccagccacacgaccagagctgtgcgagggctagcttaagctagccttcgccttcggggtcctcctcgcggtctccggcgatcccgccctccgccgccaccgccatgtcggagcacctcgcgctgcggagctccgtcgggagccacagctccgcgctgccgccgtcctaccaccaccaccgccgcctcccgccgccgcagcagcagcaccccgacccgctcaactccgtctggatccgccgcctccacctcctcccccaccagccgccccctcccccgcccccgcctccgctcccgcagccgcagcaccaccacgacgccgtctccaccgacgagtcccgcacgccgccgccgccgcctcccccgatgggcgcccccggattcggtcccttccgctggagcccgcgcccgctgcgtggcgcgccgctcgccgcgtgggacgccgcctcccccgtccgcagcggcggcggcggcggcggcggaactggaccacctatgctctcgccgttcttccgcctacccgcgccgtcgccgtcgccgccggtgaccgacttcggggagttctcgcctaccatgccacttttcgaggttggcagcagcagcggcagcggcgggttcccggggccgtcgtcgcggatgattcccggcggcagctcatctccttttgcaatgggagttgcagctgctgcttaccctagccatgctgtggacatggttcccataagaactcttcaggtgagttatatcaagttagatcaaaaggaaggtgtgcaagatctatatgtggtgaattgaagatgttcagtgcttcaagcggatatccatgaccgacagcaaagtgtgataccaagaaattttgctatgcgttctcctagttctggaagccaacatgatggattctcatattggaacatggggaggtttcggcgaaacaccaccacttccttggtctcaccgactggtgtcacacctagcagttttggcaagaagaggaacgccgattcaagcaatttcctccctctgaagttcaggaaaatgagcggggcaacttgacagccggccaatgcatcattgagggcataaattctctgctctctggaatagcatgcagtaactcaattcacaacgtaatactatagcttaaggaggctggagctggcggcatttttggggcaacctgtaaattgtaaatttgccccatatccgttgcatggtatccaaatccaacacaccgatgtgtttggtcattggtgctgggtgccactactaacctgcatgtttgtagaatctggtggcaccatatatagccgtatagatagggagatgcaatgtgccacatctctcacgatgcttgtatacctcggaaataaagcattgcgtgcacttatacaacagttttgccatgagaaaggctctatgttgctgaacattttttgtttgcccctcttgtatttatgatgtaatcgacttgattaatactctctccggttctgtaattcttcttgttttggataaagttgtggttaaactattagaactttgacg

SEQ ID NO: 16855 - DNA, 1365 bp, Oryza sativa
  misc_feature (91)..(91): "n"=any one base of a, t, c, or g
  misc_feature (332)..(332): "n"=any one base of a, t, c, or g
  ref <308>: DATABASE ACCESSION NUMBER: AK067325
  ref <309>: DATABASE ENTRY DATE: 2001-12-06
ggcttatccttctcgtcttcccttccatcccccaacccaacccaccaccgcctcgccgcggtcgccggcgagaggcgccgcgctgcgcgtntcgagaggatcgcctcctcctcctccgcctcctccggcagccatgtcctccatccacttcttcccggccacctcccaaaacgccgccccgtcgcgccgccccctcaccaaaccctccccaaaaccccccgccgccaccgccgcgtaccaccgcggcggagacaacgagccggtgctcttcccgcgcctcttcctcaggaggcgtgcccggtccgccgcggcgccggccgaggcgccccggntgggccccgacggcagcagcagcggcggcgggggaggaggaggggaggggggcgggggcggaggggacgacgaggaggatgaggggacgaggaaggggctgctgccggagtggctcagcgtcacgacggacgacgccaagacggtgctggccgccatcgccatctcgctcgccttccgctccttcgtcgccgagccgcgcttcatcccctcgctctccatgttccccaccttcgacgtcggcgaccgcattgtcgccgagaaggttacatactactttagaaagccatgtataaatgacatagtaatcttcaaaagtccaccagtgctgcaggaggtcggttatactgacaatgatgttttcatcaaacgaattgttgccagggagggagatgttgttgaggttcataaaggaaaactagttgtcaatggtgaagttagaaatgaagagttcattcttgagccaccttcttatgacatgaacccagtgcaagtacctgagaactcagtttttgtaatgggagataaccgaaacaacagttatgattcacatgtgtggggccctcttccttctaagaacatattggggagatccattttccggtattggcctcctggccgaatagggagcactactactgattgcctcatccctgagacaaatccaagctcgcttattgatgtcaaactggcaaagtagaagttcaggcattgattattgcagtgtgaagtttgcgcttcatgtaagctcctattctttaatattccctctctcctggaaattcggaggaatatttgacagcaggccacgtagaaattagaaaggagaacacatttggttctccttgatgtcacaaagaatgctagcaactagcatgagcatagaaaccattttgtttcaaggtttctgcgactctcgctctttgttgtatattaagactgtaaggatgttgccttagtgattcgcatcaaatgattcttcttgtacatcacgttttgtagcaccacgtgtgtatcatcctcatacagtgcttg

SEQ ID NO: 16856 - DNA, 1281 bp, Oryza sativa
  ref <308>: DATABASE ACCESSION NUMBER: AK067326
  ref <309>: DATABASE ENTRY DATE: 2001-12-06
ggcggattccttccttcctccctccgtcgccgccttctcttctcttctcttctcttcccccgcgaggccgcgacgcactcggtcgccgccggatctcgacccccatccgctcgccgacttcgcctcctcccccccggatctccactcgcacccaacggatctctccctcctccgccttctccgccgccactgggacgcatataggtccataggggagaagatccatatgagtttgttgtgctatgaaaaggggcaaaaactgcgcagcaagaaattatgggcaaaattaacaatagaagaaacagtatattctttcagtcctgactcctgagttgatttaggaacatcacatatagtgagaaggtggcacattttccatggataaggctggaggcaatcagggaggcaaggtgttgaagaaagggaaaaagaagcatgcaaaagatgagctggatcgccaaaagcaagcggagaagaaaaggcgccggttagagaaagcacttgcaaactcggctgctattatttcagaactggagaagaaacggcagcagaaaagggaagagcaacagaggctagatgatgaaggtgctgcaatagctgaagcagtggctcttcatgttctcatagacgaagactccgaggaaccctgccatttgatgttgaacaaccttagaatatgcaaccactgggaggattttgtgggctttggatttgctccagattcacaaggagtagatgcttatccttctggcaaaccaacaagtgtctctcatgcttatgttccccaattgagatggaccaattggggcatgtcccagacattttcatcatgggagcaattgacggattgtgaagcaccactctatcaagaagcacttgctcagtcagatatccaccctggccctatagccattgtctcaccattgcagaagaggagggaggatccatttaccatccaaggagaagcagtagcggcagcatcttcagccactgagtctgaaagtggtcagtggaaccaacaataggctgaacagaaatacagagaggattataaacataccaaatgcataatctgtatgtagtcacataagatgcatctttttatcagagtgatacttagtttttttttcttttctttagaaaccaaagtttggtataggaaagccatttttactgttgcatgttacgagttcaaagacaaaaatgtttggtgtcagttaattatataggtgttgtaatgggccctccttgccttatttgattgaaagtgtttgtggtgtg

SEQ ID NO: 16857 - DNA, 1059 bp, Oryza sativa
  ref <308>: DATABASE ACCESSION NUMBER: AK067327
  ref <309>: DATABASE ENTRY DATE: 2001-12-06
gagctcacacacaacctcttcaatactctcactgcaatttctggagctcacactgcatgcgccggccaataatggcgacgacgacggcgaggttgctcctcctgctcacggtggcgggcttctgcctctgccacaccacctgccaggaggcggcgccgccgccgccgccgtactgcggcagcctgaggacggccgtggaggcgcggaacatcatcgggtggaagacggtgccgccgccgtgcgccaagtacgtcgccgactacatcaccggcgagcggtacggccgcgacgccgacgtggtgatcaacgaggccatcgcctacgccgagagcctcaagctctccggcaccggcaaggagatctgggtgttcgacgtcgacgacaccgccctctccaccgtgccctaccaagccaaccatggctacggagttcaaccgttcgacaaccagagcttcctcaagtacgtggtgcagggaagcgcgccagcactgcagagtacactgcggctttaccgacggttactccagcttggtataaagccggtgttcctgacagaccgcaccgaggaccagaggacggtcacaaccaacaaccttattaagcagggctactgcaattgggagaagcttgtgctgcagccggttaggcttcagacctcgacgttggcgttcaagacctgcgaacgacagaagctggtgaatgatggctacatcatcgtcggcaacattggcgaccagtggaacgacatccgccgctcgccggatggttgccgcacctttaagttccccaaccccatgtactatgtcgactagctagctagctatccatggatatataccttgtttgtgtctgtttcatctactcgttttttgtcatgaatttgcatctagtaattaatctttgacgcgtgcatatgtttgatatgtttgttaatttttcgtgagatgaaaattgaatttgtaataacgcttgtttggcagttggccattgattggtcaatgtactgtgttgagcaagcttgttgtatttttacagaattaataatggaactgatgggcc

SEQ ID NO: 16858 - DNA, 1814 bp, Oryza sativa
  ref <308>: DATABASE ACCESSION NUMBER: AK067328
  ref <309>: DATABASE ENTRY DATE: 2001-12-06
gactcgagtttattcttccatgctccacagctccagccagctgcgggggtcgatggtgcttcactccccaatccccacagcagtagggtttggagaacttggcgtcgatcgactctcctcctccggtgcggcggccgaggctgccgactgcgagtctgcgaggcctccatctcttcttgctcgcatcctccattgtgagttccaagctatttgctgctcgcgctgcagcctcgacgcacgccgcctgttcgacggaatgcctccgggggaagccccacctccgaccggcggcgataggatagggggtctgccggatggtgtcctccaacacatcctcggcttcctcccgccgcatgaggccgtgcggacctgcgtgctcgcgcggcgctggcgccacctctggaagtccgtcgcggccttgcgcatcaccaactgggactggaggaaggtggtgcccatggaggagttccggtatttcgtgcaccacctcctgctccgccgcgggcgcgctcctatcgacgaattcgagctcgatctcgccgagctgtccgaccgggacaccctccgcgtgaaccgctggttccggcatgcagtgatgtgccaggcccgggtgctacggctggatatccgtgtgagcaggggatccgagctcgagctagaaaacctgcctgtcgtctcccggcacttgcaaaagctagatctttatggtgtcaaattgatgcacaatttccttgatttctcgagctgtccggtgctgcaacatctagagattgctggttgcgacttgtctgattccaatgccaggaagatctcttccctatccataaaacacctaaacatctccggttgcaatttcagcgatactttccacacacacatttatgcgccgaatctcctctcacttggtctagttaattatatgaaccagtctcctgtgtttgagggtataccgtccggaagctttatcacaggccaagaagttggtgttgttagttcaggaacaagattttaatttcgaaatgtactggcaacggtgccctacatttagcaagttgaagactttgttaatcagtgcatgcgcatctgctgttcttgactttgaagctgttagttgcatccttcgacactcaccagttctagagaatctcactcttcagtttcatcgcatgggacatggaccggatagggtggaaatgaaaggaagctatagtcgaatggataggtcatctgcaatatcagaatatcttaagatagttgtagtcagatttgatgagattgatgatttagttatcaaagttttgaagttcctctctgcattcagtattcgtttcagtttcgagtagcgtttaaaagtttagctgtccatggatctactactctatcaccattcagagggttggttcttaatttgcagtgactgacgagggtgccgtgttctgtctgtaggtatcatgtcagttccagccatagcccgtagggacggtttagaactgacgaaatgacctagtcagaatttgtaattgcagggccctaaaagggatgtggaagtgtaggtaatctagttaggccttatataccacccaactattctatgctatgtcttttggactctagtttaactcggattcattctctctgggaagatatgaatctgctaccttgagcatagctggctctgtcaatattgctccgcctgaaatgtttaatgaggggagtagtatgcacatttgataccctctatcccaaaatataaaaacctatagtactatatgtgatattcttgtccatattcgaagttgtcttgtcttggttct

SEQ ID NO: 16859 - DNA, 1233 bp, Oryza sativa
  ref <308>: DATABASE ACCESSION NUMBER: AK067329
  ref <309>: DATABASE ENTRY DATE: 2001-12-06
gatccgtgcgcgatactgcgcttagtttgtgggtggggggagtgatcatcaccaaagccacaaagggggcgcggagagatattatatattctttgggaaagcgttggattagtttttctcgctttgggctttttatccggagttggagtgtgtgtgcgccgggagtggtggtggtgatggcggccggagaggaggtgatggatcggtcgacgtcggccgaggacgggtactgcagcgccggcacggactcgccgcgggcggagtccgtcgacgagcaaggggccgccgaggagtcgtcgccccggggagggcagaagcgggagctcccctcgccgtcggcttcgccgtcgtccccgctgccacctgccgcgaagcgcagccggaggtcagtggagaagcgggtggtgtccgtgccgatcgcggagtgcggcgaccggccgaagggcgccggggaggggccgccgccgtcggactcgtgggcctggcgcaagtacggccagaagcccatcaagggctctccctacccaagggggtactacaggtgcagtagctccaaggggtgtccggcgaggaagcaggtggagcgcagccgcgccgaccccaccgtgctgctcgtcacctactccttcgagcacaaccacccgtggccgcagcccaagagcagcagctgccacgcgagcaagtcgtctccccggtcgacggcgccaaagcctgagccggtggctgacggacagcaccccgagccagcggagaacgaatcgtcggcgtcggcggagctggaggtaccggagccggagccggagcaggaatctgagccggttgtgaagcaggaggaggagcagaaggaggaacagaaggctgtggttgagccggcggcggtcacaaccacggtggcgccggcgccggcggtcgaggaggaggatgagaacttcgacttcggatggatcgaccagtaccacccgacgtggcaccggtcgtacgcgccgctgctgccgccggaggagtgggagcgcgagctgcaaggggacgacgcgctgttcgcggggctcggcgagctcccggagtgcgccgtcgtgttcggccgccggcgcgagctcggcctggcggccaccgcgccgtgctcctgatgatcacctcctcttttctttttcctccccttttacaatttccctttttttttttttttttgcttttctttagttctccttggagtaatttggattggaggttagt

SEQ ID NO: 16860 - DNA, 1058 bp, Oryza sativa
  ref <308>: DATABASE ACCESSION NUMBER: AK067330
  ref <309>: DATABASE ENTRY DATE: 2001-12-06
gatgatttgcctccgagccgccttccccttgacctcctcccctctccgccgcctcgccctcaagccctcctcctcccgcgccgccgccgccgccatgtcgtccgccatcgccgcgccggtcgagcacatcgtgctcatcaaggtccgcccggaggcggcgtcgtcgggcgccgccgcggcgatggtgtcatcgctgcaggcgctgtccacggcggtgcccgggctgtcgtacatccacgtcggccccgtgctccgcctccggtcgccggcggcggaggcgctgggtccgacccacgtcctccactcccgctacgccaccaagcccgacctggcggcgtacgcggcgcacccggcgcacgtcgccgccgtgcaggggcacgtcctccccaacgcgctcgactccaccgccatcgactgggtcaacgccgccctggtgccgtccccggtgaacccgggctccgccgtgcggctctccctggcgaagttgaaggagggtgtggaggcgcaccagctcgcggagaagctcgccgcggcgacggcggcggccggggaggcgaagggcgccaaggtgagcttcggggagaacttctcccccgcgcgggccaaggggtaccagttcgggatggtggcggtgttcgacagcgtggaggggctcgacgcggtggacggggacgggaaggtggaggcggccaaggccatagtcaggccgctgctcgacgacgtgctcgagctggaattcgtcgtcggacctgccgccgcggaggctccggcgccggccaacctctgagaggtttgcctttggttcgaaaactctagttgccttgtttgatcggttgagaataatacaatccttgtgattgggtgtgctgtggcctgtggttagcaatggcaattgattttgaaatgaataagaattgtacctgactacctgaactaggaattaggatggccgctcttgcttggacgtctaccgaacaagagcttgctgtcttcagtgttcatcttttcttctcgctctgcaactgcaaatttgtatgtcagataattttaagactcgc

SEQ ID NO: 16861 - DNA, 1898 bp, Oryza sativa
  ref <308>: DATABASE ACCESSION NUMBER: AK067331
  ref <309>: DATABASE ENTRY DATE: 2001-12-06
agtagtgggaaattagtgttattggacaagctgttggtaagactgcgggagactaatcatcgtgtgcttatcttctctcagatggttaggatgttggacatccttgctgagtatctatccctccgaggattccagtttcagaggcttgatggcagtacgagagcagatcttcgtcaccaggccatggagcattttaatgctcctggaagtgatgacttctgttttcttctgtctacacgtgctggtgggcttggtattaatcttgcaacagcagataccgtgatcatttttgattcagactggaatccgcaaaatgatttacaggcaatgagtagggcacacaggattgggcaacaagaaactgttaacatatatcgtttcgtgacatgcaaaagtgttgaagaggatatattggaacgtgcaaagaaaaaaatggttcttgatcacctagtgattcagaagctaaatgctgagggcaggctcgagaagaaagaatcaaaaaaaggtggttccatgtttgacaagaatgaactttcagcgatattgagatttggagcagaagagttattcaaagaagataagactgatgaagagaccaagaagaagcttgaaagcatggacattgatgaaattctcgagagagctgagaaagttgaaacaaagggtggtgaaggggaggaaggaaatgaacttcttagtgcattcaaggttgccaacttttctagtggtgaggatgatgccacattctggagcagattaattcaaccagatgcttcagatatggttgaggagactttagcacctcgtgctgcaagaaataagaagagctatgttgaagatcaccaacttgataagaatagcaacaggaaaaggcgaggaatcgatgcacaagaaaagccaaggaggcgttctagcagaacaatggacacagctgtgtcattaccactcatagatggttcagcacatcaagtacgagaatggtcatttggaaatttgtcaaagaaagatgctacccgatttgttcgagcggttaaaaaatttggaaacccaagccaaattgggttaatcgtggatgatgttggtggtgcaatagcaaagtcttcggttgatcaacagcttgagctgtttactctactcattgagggttgtcaagatgctgttaaaaataatatggatgccaagggcacagtgttggatttttttggtgtagcagttaaggcgcatgagttgatagcccgtgtggaagagctacagttcctggcaaggcgcattgcacgttacaaagatccagttagacaataccggatccaggcaccttacaaaaagccacagtggtcagcaagctgtggttggactgaaactgatgatgcaagattgatggttggaattcattggtatggctatggaaattgggagaagatacgattagatccaaaacttagcttgacagcgaaaattgcaccagcaacccttggtgaacgagagacgtttttaccgcgtgcaccgaacttggataatcgtgctagtgctcttctacaaaaggaatttgccaatcttcgtggtaagagctcgaaagccaagggaggtcctcgtcaagcaattgataatgaaagcaatggtggagctcgttcattaagaggccggcaaaaagacacaaaaataaaagaagataataattcaattaaagatgactttaagaaacgcaaggtggtggaacctgaagcaagggaagaaggtgaaatttcagaatctgaagcagagactaaatatcgtcaggacaaggaagaaaagtggctggaatggtgttctgaagttttggatgacgagcaggagatattaaagcggctggataggcttcagaatactagtgtaaatctgccaaaggaaaaggttctttc

SEQ ID NO: 16862 - DNA, 2898 bp, Oryza sativa
  ref <308>: DATABASE ACCESSION NUMBER: AK067332
  ref <309>: DATABASE ENTRY DATE: 2001-12-06
gatgtaccgcaaaacgtccgaacacacactagacctccacagctcgagcgagcccgacgcggcgcggcgcggcgcgcgtgggggcggaggaaccgggagctcgggccccgcgccgccctcggcctcgccgccgccgcttcgattgctcactcgcgcccctcgccgccaccgccaacaccgggaatgccgtcgtcgcgcgggcaacggccgccgccgctgcagctcgcggtcgcgtgcgggtttgtccacctcatctgcctcgccgcggtcgcggggggaggcggaccctgcgagttctccgtcgctcgcggaggcaagctctacagcttcagcctcgcgtcgccgacgacggcgcaccgccacggcgtcctcagcgaggacgggttttacaaggtggctgtgaataattcagtgctctggttccagctgtgcgatcagatgatattcaactttgacccgccagtttgtcttaactgtgaggactgtggtggtccacaaaggtgtggtactcaatgcagtgcccttgtgtcaaataaccgtggaggatatgatgtttgcacaactatcggaagagcatctaaatctcatatatctctaattgatgatattaatcctcagaagggtgttgttgtctagatgttctcatcaaagtgctctatctctgtttacatctattgtgattcaactgtagcccatgtatcggatcaatttgtactatcaggaagttgtgactatgctacaacacttagacatccttctggttgtgcacaatccatgtctgcttctggaaatggatggggctggttagccacttcatttgtaacaattctgtgccttctcggagggtacattttgattggttcaatctatagatattatttccttggcattcattctgtagaggccataccaaacctggaattttggatcagcttgccacaaactataaaggtaagttcgctatgtttctgtttttgaattgtttttggtgtttaaaattgtccctgttgagacaactacaatcgtgcttttataagatgttcttatccttatcaaatgtatcgttatgccttgttcatccatctgtccagagcatgttattacctgcagcacgaggtcgtaacagacagagtagagatacatatgctcttgtagaccattgagaaataggcatccaatggaactgtactgctcaccgtacagttgacaaacatatatggactgggaaggagaaatttttatatgccattatgtcaggaagatgacattgcaatcttcatcaacaatcattttgttcagaggaatttatacagatatgtagcagtacgttttttacagttgtgggcaactgcttgtgctgtacgcgtgggcaagagaaaagataagattgggacctccaatggcttgttataaatttgttctattataacgtgtggaagccacacacttttgccttggccacaactttttggcagataaattgtgaagtctagaaatcagtgcatagaggacggatgaatcactcttgtgaggacatagtgaagtagcatgatgtgactgtattctcagtagtggaccagattatcagagaaggatggtaattttcttccttccttgtcattcctttagcttggaaagtgatgcaattatttttcatgaactagcacaataaggaatcttttttaagtttttttatccttgttttattgtctatctttcaagcttggagcttgccttttcgtttagataaagatgcttgcttctactattgtgatatttgtgcattggttgttttcagaatatatgaacactcacaagatcacttcactactctgaattgctgttgcgtgattgcgtgatgcactgctttggatgctggtgcagatgcaccgttctgatgtgatggggtggtcgaaaatgagattttattgctttcagtctagtagatacccttattatggttccatgaaattttagtagtcactcattcttgagtttgtactttgtactgttctgttttgtcctaggcagggcttgaacctttttgttctgagttatattgagggtttcatatagaaagaacctatctagtatggtctttgaatttgttgatctacagtaacaattacacactaatgtgttgctgcataaactaaccgaaaaaggctcatttctatgttgatacctcagaaccttgagatttcttgtagcttgcaacagttgtgttgccgaatattctgctaggcagatatcagaatggctggagatttactggcgtccacgagctgacaatatctgcagctgacctagtaaattttactcttgtttgcatacaattgctatgagcttctctccgctatttttccatggatagcactgtactagtttgtagaggtttttctttttttcttttctttctttctcttttgggtgtgtgtgttggggaataactattgtgtgcgctaccaaccaaggcccaacttggtcactagatctgggttgtgtattgctgcatatgctagcagtatagtattactcctccgttgtttttggaggaacatccggtaagcctcacctcccaatgcattagcaagttgctacctgccagcagtatcactctgattagccttcttttctaaagatcatgtgatttcaaagcaacaacttttcggtgtatatagtaactaatcgctgcaaatttttatattgttgacctgcagatccttatgttggacttgcctttcttccgtccacttgcacaaggcagatggaggttgtacagctattattatttcaagagaagttagcgtcgtggtgacaactgggcaattaatttttcgttagaaatcaacggatagccaggtccaaacaccataataaaatcagcatatacaaatc

SEQ ID NO: 16863 - DNA, 3359 bp, Oryza sativa
  ref <308>: DATABASE ACCESSION NUMBER: AK067333
  ref <309>: DATABASE ENTRY DATE: 2001-12-06
gctccttttcctagcgaccggtagcgggggagaggagctgggcacggcgggtgaggatgggcgaccgcccgacggagaggagctagacacggaaggccgatgcggcgggcgtgggcggcggtcggcgggagaggagctgggtggtggtgctcaggcgagggcggtggcgtcactgagctcgaccggccgtccccatcttctcgacggcgacgcatggagagaagggccggcaggctggtgcgcggctgtgggcgacgttgtcaccgagctcaaccggtcgcacgacagagagaagctgggcgtggaagaccggtgcggcgggcacgggcggcggccggctggggaggagctgggtggtggcgctcaggcacgagcggcgatgtcaccaagctcgaccggccgtccccatcttctcgatgatggggcatggggagaagggccggcaggccggtgcgcgcggcgtcgtcaccgagctcgaccagccatccccattttctcaccaaggaacacgcaagaggggcggtcattgtcgccggtgagctcgcgggagcttggggagtctggcgatggtggcttgcctcgacctcccgacgagctaggcaccatcgcggcgccacgatccgcggctctttcgcctggttggagtcgaagctggagcgggcgcgaccgctggaggggaccgctccacatcggtgtcggtgtccagcggccatggtgatgatggcggcgggcgtccgtcagcgcccgcacaggaggagctggcggctctggtggcagagagtgcgaggaaccaccgcccgtgtgtcgctcctccctgcccgccctgcgcagctcctcccaccgccgcctgtgcccgcctcccgcgcccagctagccagccgctccctcgctgtccgccgcctgtgcttgctgcccgcgcccaagctagccagctgctcccctgccgtccgccgcccacacctagctgctccccccctcccccgccgcccgtgtataggagaggagaggagagatgaagagaggaaagaggaagaagaggctgacgggtggggctcacatgggtcccactctaagtcagctgctacattggacaaaacagagtcaaaatcaccgagggatcagtttgcactgattttataagttggaggatgcgttgtatccggtttggttttgtggttcaaggacgattttatatctcgatgacaagttgagggaccttcagcgtactttttccactgcaaaatggaagcccgtgtatggaacacggtccggcccagcccagcacggtccactaccttgtcgccgcgcggggcaccggtcagatcagtttgactccgtttccgtccccaccaaactgagacagactcggagcccctccccccttctagctaaccggcgccacgtcacgccagtactccaccgcgcctcggcctcggcctcgctctcgtcgcctcccccgctccgcccaaaacggaaccgaaccaaaccaaaaccctacgaagagggggagagcagagcagcagcggcggcggcggcgaaggcggagagagcgcgctcggcgcacggcatgggtgtctccgccgacggcctcgtgctcaaggcggcgtgcgagcgctgcggctcgtcgtcggacctccacggcacggggtgccgccacgccaccctctgcgtctcctgcggcagcgccatggctcgctgccggcgattgctgccccgtctgcgccgcccccatcgccagcctcatccgggagtacaatgtcctggtggataccaccggagagaagcaatatacgatcggcaaattcaccaccggtgtgccgcccttctccgatagggagaatgcggggagccgcagctggtctcttcatcccgagggacagcaaggacggcaacctaccggcaatatatgggagaattgcagcaacagaaagtcatgtattttggaagatgatacaggtgactatcagtaccaaggtcaaattcagggcttacaatctgcagcctcgacatattatttgttgatgatgcatggcaaggatgtacacgctgttcccgctgattcctggtataacttcagtaaaatttcacagtacaaacagctgactttggaagaagctgaagagaagatgagcaggaggagaagcacagcaactgggtatggacggtggatgatgaaggcggctacaaatggagctgctgcttttagttcagatgtgacgcagctcgatgatgctaatgaaggagaaacagatcaggttcacctgaagaaaggcaacaagaatggggatgaaaatagatctgataaaggcagtggggaagaaagagcgcatgtgcctatgacaaagggtagggaggaggaaggtagtaaagacagagactttgatttggatgatgaaattgaaaagggtgatgattgggaacatgaagagatctttactgatgatgatgaagctgtggacgttgacccagaggaaggaggtgatttagctgatcctgaaatccctgctccaccagaaattaagcaggatgataatgagaaacatggaggggtaggcctgagcaaatctggtaaggaactaaagaagttgctccgccgtgccgcgggacaaaacgagtctgatgatgacgatgaagacacggatgaagatgagtcaccatcgccagtacttgctccgaaacagcaggatcaactcaaaattgaaccacaggaagacaaccattctaaaccaacagttctcggacatccttatagcactccacatgtttccaaatccaatcaaaagaggagacaaaggggtgatgattcaaaaacttgtgctacccctaaaaagccgaagatagagcctgataccaagaagatagtcgtgaaggaggagacctcgtgttccttggaaccaacttcagaaccatttgcctcagcgagaagtgatacaaatgtatctcctattacagtggaggaaatcagggtggtacttcgtttatatgcacctatcgcaatgcgagatttttcaaaagattttatgcccagattttcgcctcgactaagaagtccagaggacagggaagtttttctcgccaatctgaggaaaatctcacacctgcagaagatcaatggccagaagtacatcatccttctagaggaatataaataaaatgacaaaacctgcagagttgtgtatgctgttatgctccccttggctcgagcttagcatgcctgcccttctatcctgaaaattagtagatgcttgcagttgcagaacgtgacaggcttaacacatattcttgattgacctcatatttttcatactagtatacccccttgtaagttgtaacaacaaatgatagtttgtcatactatt

SEQ ID NO: 16864 - DNA, 1087 bp, Oryza sativa
  ref <308>: DATABASE ACCESSION NUMBER: AK067334
  ref <309>: DATABASE ENTRY DATE: 2001-12-06
cgcagttcatccatggggacatggggtgcgcgtcgtcccgcttccaccgtggtacgtaccgcgcctagtacggtcgctgcatgcacgcgcacgcatcgcatccgcattccaccatcttcttcttccccccaacccaacaacggttttggtgtttcgctccgccttccgcttccgccgctacgcgttcgcctcccctgctcatcctctcctctcctctccactccaccgccaccgccaccgccaccgccgccgccgcaacacgttctcgctttccgatctcgcggtgcgggcgcccacatgaggttcaggttccgcaacaaggctgcggcggcgggagacggcagccggccggcctcttctcctcctaacgccggcaagttcgcggcgcctgttgccggcggcggaggggcggcggacgtcgccggcgagagcccggatcaggacagcacaaggaatggaagcaaagatgaatcgttcttcgaggcaagaccctggttagactccgacagtgaagatgatttccacagtgtgagaggagatttcactccatcaagaggcaccaccccagatcatcagagacagtcaccattcgcggggcgaatatcggtggacagatcggagccttctctgatcgagaagaagcagaggctcctcgaacttctccaggagaagcagcagtacgacgatgacagcgtcgctgatgtcggtagcgagatcgagaacggcgctgtccatgctgaagagtatctgaaatcatcgaggaaaggcgcaaaggcgaacagggcatccaagtccaggggaggctgcttcccaagctctttttggaagatcaaattcaggagctgcaggaagaagagaaaagagcagaatgattagctgaattttagcagcattgtgatgttgaattttgtttttctacttcctgtgaaaattgctttttacgacagcgaggggaatatatatactttttacccctgaaatgcttcagctggaaacgacaaaaagaagttttgaagtggccgcttattgtgctgtaaaaaaacaagcaatgcaaatataatgtagggaaaaagtatacatgtttact

SEQ ID NO: 16865 - DNA, 3091 bp, Oryza sativa
  ref <308>: DATABASE ACCESSION NUMBER: AK067335
  ref <309>: DATABASE ENTRY DATE: 2001-12-06
gatcccaatccccactcccgtcgtctaccccgagatggccggctctgcctcctccccgtacgtcgcgcccctcatctcctcccggatcaccggtcgcctccgccccgcctcggcgcggacggatcccctcggcctagccgccgccgccgccgctgtcagagtccgttcctggaggcgcttcgcgggtgcccgctgcgaagtcgcgctcctcccggcccggaggatcagcgcgcagccccgtcgccggaacgccctgcgcgagaaggcatcgccgccgctgccagccgatccgcaggtactagaagaatctggttctttggatgtgcagcggctgccggatcttgatcgcgagccgggaatttctggtggtctggatgccgttacaagtggaaatattgtttcgaaatggaacttggaaggtgggagtgatgtggttggacttggagttgcacagactggtcctggaatcgttggcaggggtggcaatacagaggtacaagggcgcggtggcaatgtggaggaggttatgatctctcgtgcaggagcaatggctaatcaatttggaagtggtgaatgtgaggttccaacgcttagctcatcatttccgtttctcacagttgaggcgaaggaaccgctggttgtagatgctcagtttttggctgtgcaaatagacaagcctcgtttgaggagcattgcatggagcggttttgctgcgctgtgtgctgcttgtgttttgcttgcggtgtccaagttgatttggggaaatggtaagaaatacctgtcaaggaacatgtttgacattcttaggcctcggatgaacaagggtgaatcgggcaaaggtggaatcaaggttctcaagaatgtaaaatgtccagaagatttattgggaagaccacaattagacaggcacaaattgatgaataacatcaaaagagccaagcaatctagagaattgtttgacctcagtagtgtatttggttactgtagtgttgctacttgttatgatgtaattataacagagaccagaagaatggtaacaaatgttcacacgttacttgaaggaatccttgaacaaagcaaaacaaagagcaaacattctgtgttgtttccacaccctgctgctaccaatggccaagaggtttctgcaagtcatggtcagtgttctgtatatctcaatgatgtcttaggctgtgctgaattacctgatatcagtatatccaataatattattggggaaactgtggagtcgtctgtggatttcaaaagcagtgcacaagtcatggacaatagtgtaaaaaatcagaataatgttggagatattgaaccacctgtggacacacctactaatgatatgccgactgatgcaaaggatagtatacccatggtgcacgtggttgaaatagaagaacagattggttctccagatgaatgtattgacggtcttaatagtatcagcatcccatcatctgaatttgaaggacaaaaacaatttccagacataagtgtgaagaatgtggatggcatttttggaataaaatcatcacagatcagtagtgatacagatgtgattggtacaaatgataattcacacaagtttagcattaatgttgcctcaaaaacaactggtgatttgtcatctggctgttccaacagcataccatctgaatcagaaagtaaggaaatacccgtggatattaatcggaatgatctcaattactttcaagaaattgaagcacaaagtacctttgcaaattatgatgctcagacagttcagtacgaagaaatttctcatagagtaagcatgataactaaagaagcttgtataaatccagcaatggctgatattttgattacaaaatcacctcagagaatcggtgaggagcctgtggatctgatgagaggtaatgcacaatccatgcaagaactagaaccatccagctctattagggatcacaaacagatagttcttgcaaatcagaaaaacaacataataagtagaagtcacaatgaaacacaggctagttcagaaatagacagtattgggacaaatgataatgctagcacatcttcagtttatgacctgccggaagaatcaatacaccaaagtgcaaaaaattcaacagagaacacatcttataacgaagagcctgaagaatctattattaaaaggaaaatcaaattacatcaagaaatgtgcaacgataaggatgctcaaacaaagcacaaagtagaaggtgtatctgaaattggccctgagtttggtccatcaaatgatgtatgtaaaactgaaacagtggcaaagaaacggtcaaagaaaacgccatgtgataagggacttaaagtgccagaacaggatatagttcaatgtaacagcatggctgataagaaaagcagtagcaagaatgtcaaaaggacaaggaaaaatctgaaaagtgcacttcgcaaccaaggaactcaaacaacacaagaaatttctgaaacagcactcgtggtaaattcgcctgatgatgcacccagagctgaaaacataagaccttttggtgggtcaggttcatcgacagaaacacaatctccaatgttttcagatacattcagtgaagctcggcctaatggcttcagtattagtacgatgaggaaggaaaaatcaaaacacaatttccaacctctggaaagtgtagaggcagcagcagtaaaatttaaaaccaataggcatggtgacaatatcatgaacgagagagcaattgatttcgacatatcaaatttgggtgtaaccaccaccaagaaaatgacaaagagaaggtcattgtcaaagcgtaaaaagcctgctaatggactcggaggagccactgacgtgccaccagatgtataaattgttccgtttattgtccttcttgtatagggcttttcggcagagtggcagcacctagttaatgtgcaacaaattgcttgatgagcgattgtgtcaatattgcacatgaagccatcagctaaagaggataaatcatctcaacaatctgagcaataatttcatgtttcttgttgcaagaaaaacttggtaatgtattgcctgactggatctcttttttagtcc

SEQ ID NO: 16866 - DNA, 977 bp, Oryza sativa
  ref <308>: DATABASE ACCESSION NUMBER: AK067336
  ref <309>: DATABASE ENTRY DATE: 2001-12-06
gggtctccctcaccgccgcatcctcctccgccgcatctcccctcctcccgtcgcctccccagcaacctccgccgccgccgccacgacgacgagcctccgagtccgaccaccggcaatggcgccaaccctgccttccgcacgccgcacctccgcaccgcctaccgcaagccggtgccacccgtggcggcgacgggggagggcgaggcggtcctcgccgccgctcctcaccttcctcttccccatcggccttctccccgatcgcctccctcgtccaactactcctcccttccagagaagcgctgccactgtgatccttttccagacgcgagctcgaaggcgctggttgcccccaagctcgaagaggtcgaggaggtggttaggttttgcgccgccgagctcagcgaagaggccaaggagatgaggcacacctcctccccctcccccttttctccggttggtggtcaggctttgggctgttcgatctggcgccgctgagctcagcacgatgaaggccgaggaggcgaggcgcacctccaccgttgcccctcgcctccccatcttcctctccctgcccgatctggcccgaggactcgaggagtggagagggggaggagccacggtgatgttgtggtcgctcgccgagtcgccgttgtctgcagcttctggaaagaaatcaagatcttggattattgccttaagcgaggaaaagggaaaagtatacaggtctgatctttgttgatcttgcacttaccttggtggttacatgcattttggggtgtgcctttggcgattttgaacaggcctagatatattgctttgctatgttgacgtttattagagtagataattgtatttctcgtaatgtggaaatggcaaagattatgtattgctacaaaattgtatagttgctcttcccaattccatgtacaaggcatttctcattgaatggcaagatcatgtattgctggaacgtgatc

SEQ ID NO: 16867 - DNA, 3221 bp, Oryza sativa
  ref <308>: DATABASE ACCESSION NUMBER: AK067337
  ref <309>: DATABASE ENTRY DATE: 2001-12-06
gggaaaagctctccattctccgcaccgcaccccgtcgccgggaagcctcgaacaatgagcgccgccgccgccgccgcagccgcctcggctgccaatgtcgccgtcatcgggggcggaatatcgggcgctgtatgcgcgtcgctgctggcggtgacgctcttcgactccggccgcggggccggtggccgcatggcgcagcggagggaggtgatggaggacggcacggagctgcgattcgaccacggcgcgccatacttcaccgtgagcaacgacgaggttgctcgggtcgtgagcgggtgggaggcgcgggggctcgtcgccgagtggaaggccatgttcgcgtgcttcgatcgggaggccggcaaattcactgatttcgagaaggagggaacaattaagaagtatgtgggagtgccaggcatgaactcaatatgcaaatcactttgtctagaggatggtgtggtggccaaatttggtgtcaccattggcaggatggactggattcaagataggagttcatggttactggctagtttggatgggagagatcttggccattttgattatgttgtagcaaccgataagaatatagcatcaccaagattttctgggctaactggaagaccaccgcctcttgatttgtcattgcttccacaattgtcaatgatgattcaggatatccctgttcgcccctgttttgctcttatgttagcattctcagagcctttgactaaggtacctgttcaaggtttctcattcaataattctgactacctaagctgggccttttgtgatagtagcaagccaggacgtgctcatgtaccgcttaacagtcagtcttgggtattgcattcgacagctgagtatgcttcaaaggtaatcaataatattggtccacggaaaccttcagctgatgcccttgctaaagtggcagaggaattgctcaaagaatttcaggctacaggattgaacataccacagccaatctttatgaaagcccacagatggggcagtgctttcccagccatcgctataagtggagacgacaagtgtgtttgggataagagcatgaaattggctatttgcggagatttttgcacaagtccaagtgtggaaggagcagtccttagtggcatgagaggagcctccaaaatactacggtgtttaaactttccgtcagggttgtgacttgtgagttgtggctaacctcctacaattcttccatttcctccttggtttgtatttatgtgcatccactttacagaaacagttaatcaaaccccaactgagagttgagggccatattgtttaccgaccaattaggtatgaaataagaaatcagtaccgatggcaatgttattttttatgaagtttatttgctttattatctattccatgtcatatagaaaagccaggttccactggaagtgctgtttctctgttggcctactatgccttggactaaaacacactaactacaagtctaggttgtctgccagacagaaccttgtatgagtgcacaagatgaaatgcatgatggatattgtaaagaagccatacaccaaccactcctgttatctggttgtgtatcatggaatgtcaccaaatattactagggggttagggaacatgcttgtcatgcaagtgatgtagcagaatagcctttggagaatgcttgctgaacatattaatttgacagaaatgaaggaacaatagttataattgatcaagatttgttctgtcagttggtctcaatctcaattcggtgatactttatacagatatgtggaaatgtctgcataccctttatattggattctacttcctaaaagttcagaagtctaactgtagcacattcaaggtgacatgattataatacggtcatgtaatgcttgaaatgtgagtttaaatatactttacagttacaattttagatcccatttcattgaggacaaagttttgcactccaacaatttcttagcatcaggaaaggctatgatttttgtggtccataggtcctgtaaggaccatcatatctttaaactgtcatatttagatattccttatagcttttttgtgttcaagtcttctacccttgcaatgatatcagatgctgcccagcgacctaatataataaatgtctaagtgcactgttgggagaaatcttttccaaccagacttcatattcttatagctttgtttttaatctaatttgcccaacagagcaactttcagtttagtttggtagtgtctactgatgtattttggtacaatatgtgctctattgtgagtgaataaataggttagtaaattcacactactatttggagctagaaatgctcaaagcaattgtatcgctgcacataatggttccacatcttcaacagaaacaggtacgattttcagtttaaaagaaggctttgcatggtttgttccctatgtaatcatttcaattatctgttgcatattctctgagttcatcttattagcctttacattcctatatccttgcatccaccttttccttttcttgttgaagaattttgggtttgtcccacaggaaattttcatgtgcaaattggtcacccttcatgagcatctgtgaaaaaggtataggcagtctgcatgcgttgctcgtgcgctatgcagactgattgttcttgcaggtgagcagcacattttctgaaagcttcatccagggtcccaactgaatcgaagtacgctacgctgctcacaacagtcacagcagatgcatggtcctggcatggtggcgtacgtgtggccacccaatcatatatatctatcaacctgtcaacaagcagcagggagggagggggacaagactatagtgtgggcatgcagtactcaaagcctcagctgtactaactgggagtgtctggtcctcccagtgaatgcctgaatggtgcagtgaatggtgataccgagctcatgccatctggtgcacaagtgctggtttctcatcagtgatctatcttcacactgtagcatgcagtacaaattactgctttgatctttggaaaaaggctggttggtgtggctggagtgaaattttatattccctcctttgtcttaggcattgtcctgactcctgagtagtacctgtttatcaccccctggagctacttttgcaccaccagcactactttgtagcctgtaagttgtaacctagatcattatgctttatgcatgcctatttacct

SEQ ID NO: 16868 - DNA, 1823 bp, Oryza sativa
  ref <308>: DATABASE ACCESSION NUMBER: AK067338
  ref <309>: DATABASE ENTRY DATE: 2001-12-06
tgcctacgacatatggatgtttacgcccaccccttggaaaacatcgtttgaagattgtggagttcatctcagttctgctgacaattggcagtgaaactgctgagaaagagcttatcaggcaatcggcaataaagcgatctgttgatttattcttcgagtacccatataacaattttttgcaccatcatgttgagaatattattgtctcttgcctggagggtaaaagaactgaacttgttgagcatgttcttaatgactgtgacattgttggtaaaattcttgccgcggaaaaactttcttctttgtcaacagagtctactgggcctactataccttcagatggtaaatcgattcccaaaattgggaatattggtcacatgacaagaataaccaacaagcttattcagttgggaagcagtaacggcacaatccagattcacttgcaggaaaatagtgagtgggttgactggcaaacagatgttctagtcaagcgtaatgagtggagaatgtttatcattgggcttgtgggcgcccaacatcacttcatgaccgtggtagggatagtgatgatgatgacttccgagacagggattatgatgtggcagctcttgctaataacttgagccaggcattccgatatgggatatatagcaatgatgatatggaagagaatcaagggacacttgaacgggatgatgaggatgtctattttgatgatgaatcagcagaggtcgtaatatcttcactgcgactgggagatgatcaggatggttccctctttacaaattcgaattggtttacatttgatggagagagaggtattactgaccgtttggctgcggttccttcgtcttcacctaattcagaggagatttccccagacactgaggaaactgatgatggtgaagtcgtcattggtactgaggatcatatggatactgtcaatcttgggaatggtcctatcgaggaggcagaagatgcagcggaatttactaaacacccggctactagcacggaggatgagcaactacaaaacgctgaagggattgagcgacacctggatgtttcaaatggtgatgctgaagctagtacagaagctgcagaggcagcaccagtatcttcagccccatcttctgatgaggtgcagacagagagaactgcagatgaacccactggctcatctgattcgggtaattctgtctcagaagttttgccagatcctgaagatagtagcattgatccagccaacacagcagtatcgtctgaacaaactgtggataacgaagacgtggagttaccaactaaggaagttccgtctgtggatgttgaaactaaaaccgatgaaatcaaagcaaatgagtgaaggggcaggaaatctcatgggctaaaatggcatagttgaccagaacagttgttagtcagatcggtcagaaagacaagcaagcctcacctgctcatcaggcatggacatgtccgaagcaaactgctgtacaataaaaagagtgtactatttttgccatccattgtggtctatccctgtacaaaaatgatcaccatcatctaaccgcacgctcgtcatcgcaacatctgaaactggtcaaaatttgtttcaagttcgcctccagttcatgggaaaaataggttggtgccaaacgtcatttgtcagttagtctctgtgtcgtgtcttgatatatggaaaagaacattctttggatggcagctagttttgtcaacgtggtcttttgtttccttttaggtttaacactttgaactgtaatatgggatgtgctatttatttatagcctagctattatttgtaattt

SEQ ID NO: 16869 - DNA, 1490 bp, Oryza sativa
  ref <308>: DATABASE ACCESSION NUMBER: AK067339
  ref <309>: DATABASE ENTRY DATE: 2001-12-06
gagcgatcacaaattgtgccaattcacaaaccgccgcccccttccctttttaatagctgccttcgcctctcgtcccctctccctcatcgccttgctgtctctgcgaatcgagagagagtcagataaggtcgttaattaggtttgtcaattcggctgcttgcggcgagagaagaggaggagggattagggatggacggggcgccggtggcggagttcaggccgacgatgacgcacggcggccggtacctgctctacgacatcttcgggaacaagttcgaggtgacgaacaagtaccagccgcccatcatgcccattggccgcggcgcctacgggatcgtctgctccgtgatgaactttgagacgagggagatggtggcgataaagaagatcgccaacgcgttcaacaacgacatggacgccaagcgcacgctccgggagatcaagctcctcaggcacctcgaccacgagaacatcataggcatcagggatgtgatcccgccgccgatccctcaggcgttcaacgacgtctacatcgccacggagctcatggacaccgacctccatcacatcatccgctccaaccaagaactgtcagaagagcactgccagtatttcctgtaccagatcctgcgggggctcaagtacatccactcggcgaacgtgatccaccgcgacctgaagccgagcaacctgctgctgaacgccaactgcgacctcaagatctgcgacttcgggctggcgcggccgtcgtcggagagcgacatgatgacggagtacgtggtcacccggtggtaccgcgcgccggagctgctgctcaactccaccgactactccgccgccatcgacgtctggtccgtcggctgcatcttcatggagctcatcaaccgccagccgctcttccccggcagggaccacatgcaccagatgcgcctcatcaccgaggtgatcgggacgccgacggacgacgagctggggttcatacggaacgaggacgcgaggaagtacatgaggcacctgccgcagtacccgcgccggacgttcgcgagcatgttcccgcgggtgcagcccgccgcgctcgacctcatcgagaggatgctcaccttcaacccgctgcagagaatcacagttgaggaggcgctcgatcatccttacctagagagattgcacgacatcgccgatgagcccatctgcctggagcccttctccttcgacttcgagcagaaggctctaaacgaggaccaaatgaagcagctgatcttcaacgaagcgatcgagatgaacccaaacatccggtactagattgaatcaccatggaaatgagatcccgtctatacctgctttgtacatatgatcaagattgagagccgggtagactgaacattgcatttgtttgtttgttgatgttcgaaacccacattctctgcaagttgtggctgctttgtatgatatatggtactatgttcgaataaaagggtttggaactttggatt

SEQ ID NO: 16870 - DNA, 4100 bp, Oryza sativa
  ref <308>: DATABASE ACCESSION NUMBER: AK067340
  ref <309>: DATABASE ENTRY DATE: 2001-12-06
gattctcccccaccccacctcctcccgtgcaaaacctccaccaccaccgccaccaccgccgcgcaaaaccctccatcgctgccatgccgccgccgccgccgccgctgccgctgcaccaccagattatcaaggtggcaagggacgaggatttccgctcgcgtatcgggaacgatggccgctacttcgatcttgtcgacttcagcgcaatcgacgtattctacgttccgaatagcttgaccgtctacgagttcaagggtacgctcatggagaaatttggaacccctgtgcaatgtcaacacctctggtggtgggctagacgactaaacaaaacataccgtgtagacaggccattgacaaccgaagaggagaaactatctctatggcttcgttcgttgctgggtgattgggagagaaagcccctcgttttccgtgcgcacgcttcccgaactactaaacggtatcaagcctaaggcatggtggcgatcatctaaactttttcttggaggtgctccaccctcattcccaaccactcagagatcaacgaagatgatgcgctggtgtttctaaagctttttgacccagaaaaagcacagctacagtcagcacttttttgttacaacttattttgtcttatttatcagttgatgatactaaattttgctcctcttctgaacgaggaattaagtatgttggctcgctgtatgtgaaagtttcatcgaggccttcagatattcttccaaaactaagaagtctagctggtttttgtgcaagcgaaccaatagaattgtatgaggtcaggttttgtaccgatgcaaataggttccctgactctgaaataaacagatttatctcatttgtactggtttctcactttgataagcaggagataaaatttgatccatcagtgatgtgtgaagctattgacattcatttaaccttttcagatagtggggtttgtttcttttaacctatcctctcttagtctcttttgcactccccatccatgtattattttctttctacagattacaactggggacattatttgctaccagaaaagcctgccacaaaactggcgaatatattcttctgttgcatcttttctccagcatgtttgtgatcataaggaagaagaatggaagagacacattttagaagaggagattgctgtgttaaaacgccaggctgatacagatcggcttcagaaagatgagagcatgacagtgtgtgatcagttgaaacatgaacgagacaatgctgtgcgacaagtgaatgaattatgtgatcagagcacacctgtcattctcaatttctctcgcaaggacttggagcaagcaatagaacatttcaaaaatactggtgattttggtgatactgaatatgggcacttatataaaggcatgatacactataccatcgtggcaatcaagctgtctagttcccaaagcttatttcaacaagaggtaacctggtccacttgtgatgcttggtgttagttgattccattagtaatgtgagattattgcacatttctattcttcggcaatggagacatccaaatattatcacaatcatcggagcgtgctcagaggccttcgctctaatatatgaatggttacctaatgggaatcttgaagaccgcattgtttgcacaaataattctccacctctctcatggcacaaccgcacacagatcattggggagatttgttgtgctctgcttttccttcattcgaacaagcctactgccttggtccatagtgatctcaggccttgcaacatcctcattgatgccaactacagaagcaagctctgcaactttggtttgtccaacctgtttctgcagcctgggacctgcccgccaaacctgatggcgaggctgccatacatggaccctgagttcaacaccaccggggagctcacaacactctctgatgtctactcgctgggtgttatcatcctacagctcttgaccgaaatgccccccttaactctatcagagaaagttgcagaggcattggagagtgatagcttgcacttgctgatagataaatctgcaggggactggccgtacattcaagccaaacagttagcactcattggccttagctgcactgaaatgacgaggaagaaacggcctgatctcttaaccaaagtgtggaaagttgttgagcccctgacgaggaagcctcttgcagccacctggccatacttgcaatcagcaacaggagatagttgtgtcccttctgctttcatttgtccaatcagcctggagatcatgaaagatcctcaaatggcatctgatggattcacctatgaagcagaagccataagaagctggtttgatagagggaatatattaggtctccgatgacaaacttggtccttcccaatctcactctcatccctaatcttgtcctcttctcttccatccatgagtatcttcagcagcagcagcagccggattcctgaccctgcttaccaacaacagctgtttggtacctaatttcttaaatgagaattttccttttgaaagtaacaacatgagggctgttgtgatctcagattctcagttaggtaggaaactgtgaagaacaaatggaatgttgagcaaatcaggggaaaatttgttagacaaatgttcaaacaaaaaaaatagaatttttgactggtaaccaggcattatagtttcaactttaaaatttagagtagattttagttaaccccatatttaatagccaaagtgcagaaatcctttggtattataacttgtagcgcacataaccattatggtcctaaggtttgataaagtacactcctgtttaaattccagagaatataagtatatactgattacatgtctgcgcatacatactttttcgtgcatagtgcctataaagtttttgaattatttatttttatatggagattactaatttaactcttcattatttataaacaatattagtgttcaagtctttaagatatgctctgttgtgtgaaaccttagaacataaaaaccttaggatccgggattctccacaactttgatcataacacttggttcttaaaccttttaaatttgaattcatgacttaatattgtataagtattacatggccagaagtgtccagatgtgctgggaacgtttgctggcaattcagaagtgctacgatttttggaactatattcagacctcattgtttcggttatgcttatgattataagccaaaatttgaattttcaaattttaattttgaagttgattttgttgtttttcttgttgtagtttattttacagaatttgcttttgaatcgctatggacacatatataaaagttttacccacaaattaattttttggttgctaataaacgggcggataagcatataaataaacaaacgatgaggcctgaaagtatcaaagagtagtaggctcttaactagctctggatgttgttatgattctgatatccatacttaactagtaatttcttaggcataataacaagactgtaattgcgcgtgtgggaatattggaatagtattatatgcggttcttaatcgagaacatcacttctccactcagagatgtttttctttccgtatctgatgaccggactattactgttgttctttactttgcgatgaattagaatgtcttatgcggtatcagctatttatctatgtatacatataattttattggagacattaatttttcctaaactgtaggttactaggcatcgaagagacaaggaaagctagagacaatggtgacttcgctgcaggtggctgtggaaacttttgaggccttcctgaactgtaggctgatgttcagtgtagttttagttagtttagttggtaattgagatagaattgatagagagatcattagtttagttcccgcgtgaccggtgaaactgctgttttggtggtatcctctgcttgtaatcaatggtgcagtagtagggctgttaacaagtcgtgttatgcttttgtttagtgttgcacttagcatgtaattaagctggtgtcccttgcatgaactttgcctcccatcatttgcttttcagcttaattattataagccgttgccg

SEQ ID NO: 16871 - DNA, 3081 bp, Oryza sativa
  ref <308>: DATABASE ACCESSION NUMBER: AK067341
  ref <309>: DATABASE ENTRY DATE: 2001-12-06
gcccgccgttctcccgccccgcctccggccgccctccgccgccgcctccctccccggccctccgcccacccgcccggcgaccgctgagcgcagtccacaggcccccgctccggtccctgtgctggtctcccgcgtcgcctggacagcaaaggcgccgccgaccggccaggcggcagagccgaaagcaagggggagtccatcggcggaggaagcagccacgccgcgggagaacgcgtttccagtgagaaaaagttactgtcgaggtgcatctttaccatggtttgttttgggtcaaaggctcttcgacggaagggtgacaaacaaaggtgtttgcctgagggagatattgatgacagcttaccgatgaggagaggaaggaaggataagagtgagaagcctcgaaaagggggttctagttcaagcaacagaccttcagctgagaaagctaaacatgggaggaagaagagtggggatgggaagaagagcaaagggcgtgggaagagttgccattcagatagttccatagagatgaatcctggccatatgaagaatgataatacattactgccctccaaggcatcaaagccagtaacaaattttctcaggaaaagggttgatccagaaactgcaaagtactttttggagatttcttacctatttgacaataaggaaattgatttggaggagcgtgcaactatatgtgccaatgcattagaagaaactaaagggaaagagcttgaacttgctactgacggtccaataagccacactttgcaggttcttgtagaaggttgtgaattggagcagctatgtgtgttccttcacaattccatcgaatcttttcatattattgccgtcgataaatttggatcacacgtggctgaagcagctctcaagtctctagcaacacatcttgaagatgaggcctccaggggcattatagaagatatattgattaggatatgcaaggtcattgctggagatgctgctaatgtgatgtcaagctgctatggatcacatgtgttacggacgcttctttgtctttgtaagggagttcccttgcaatcactgcaagacttccacactacaaagagatctgcagttctcgctgagagattaagttgtggttcaactcgatcaggtggaagcgatcccaagaaccaaggatgtgggttttcagacatttttaagtcttttgtcagggaaatgctgcaaaatgcaaaagatgatattgcgagtttagaaactgacaaaaacagtagccttgtgttacagactgcacttaaattatcagctggtgatgatcatgaattgaattatataatatcaattcttcttggttttgatgaggatgacactgcacagaaaaaagatcgtagtgaacaaaagaatgaaattattgctttacttgaagatactgcttacagccatctcttggaggtcatcgtggaggttgcccctgaggaactgcgcaacaatatgctgacaggtactcttaagggtgcactatttgcgatctcatctcaccactgtggtaactatgtggtgcaagccttggtagcatcagctaaaacctcagaccagatggagcaaatttgggatgaacttggttccagaatcaatgagttgcttgaactagggaaagcgggggttgtagcttctatcttagcggcatgccaaaggctcgaaacaaaacgccttgagagttcccaagttctttctgcagcattaagttcaaattctgaatcttctgatagcattgttgcacatatgctttttcttgagaactacctccaccagaaatcatcttgggaatggcctcttggtgcaaagatgagtgtcctgggttgcctgatgctgcaatcaattctgcaatacccacatcaatatattcgaccatatgttgcaagtttgctggctatggatgataacaagatcctccaaatttccaaggattcaggaggtagccgtgttcttgaggcttttctatgttctagtgctactgcaaagcggaaatttaaagtttttgcaaagttgcaaggccactatggagagattgctatgaatccttctggttcattcttagttgagaagtgctttactgccagtaatttttctcataaagaggctattgtggttgagctgttggctgtgcaaactgaactttctaggacaagacatgggttccacttgttaaagaagttggatgtagacagatattcaaggcgacctgatcagtggagggccagccaaacatcgaaggaaactactcagagagaatttcaagtggagtttggcttgagcagtaaaggcgctgggcagaacattgaagaacttctcacttctcgaagtccttccaagaagcgtaaacagaaagacaagactgatgttactactgaagatgcgagtaccaacaagcaggatttatcccacgtaggcaaaaccaagaggataaagtccgagaagacaacttgtgagaaagaatcaagcaacaagaaacccacgaacgaagattctgggaccagcatggcattcctgaagaactctgccaagaggaaatcaccaggcttcctttcagacaaaccaagtttcaaaaggcaaaaacatcataaacccaatgctggcaattcctctggcaagatgttcgttcgggacagtgctggcacaccatttgtcaggaatagcggcaaacagaaacggtcgatcgccgagcttgctgatctggctggtaaggagaaactgtctgcgagtgaagtgcgcaaacttcttaagactgaaatgcctggcaagagctagccaattcatatatcttttgggtgcagctgtagaaaacatgaacatctgagctaattttcccctttctttcaaaggttgggaagcagcgattttgtttactatttctcctcaactgttgcgagtcatgagcttgtaagatcctaggaatagattgttaactggtaacacgtgaatgctgagatagttttttttttttttgttcaagtggggattttctgaaaagttcatcaaaccatcacagcatgtctttgctgaacatctgaaaataactcgtactaactccgt

SEQ ID NO: 16872 - DNA, 1626 bp, Oryza sativa
  ref <308>: DATABASE ACCESSION NUMBER: AK067342
  ref <309>: DATABASE ENTRY DATE: 2001-12-06
ggcgggtgagcctcaggaaaggaagggggcgagtccggccgccgtcgccatgtccaagccacagcagcagtcgcccccttccaccaccaccacctcacctcctccaccaccgccctccactccgccccccgcctcctcctcccgctccctcctctccgcgctgcgccgctccccggtcaccaccctcgtcgccgccttcttcctcctcgccctcttcatgtacggcgaggacgtccgcaccctcgccgagctctccatcgacgactacctctaccccgacgccgatttctacaacgtctccgcccttccccctctcctcctccccccgcccacctgcgacctctcccgcggccgatgggtattcgacaacacctccctcccggcctacagggagaaggaatgcaccttcctcaccaagcaggtctcctgcctcgccaatggccgccccgacgacctatggcagtactggcgctggcaacccaacaactgctcgctccccacgttcgacgcgcggcggttcatggagaagatgcgggggaagaggatgatgttcgtgggggactcgctgaatcggaaccagtgggagtcgctggtgtgcctggtgcagcccatcctatccaagggcaggaagaagatcgtcaagcgcggttccttcaacatcttctacgccaaggagtatcgcgccaccctcgagttctactgggctccattcctcgtcgagtccaactccgacaaccccaatttccaccacatcgaccagcgcatcatcagccctgagcggatcgagagccatgccaacaactggaaggacgttgattacctcatcttcaacacctacatctggtggatgaacaacgaagacatcaaagtcaggaggccaaattcaacttcttggtcagatcacgacgaggtgccaaggatcgagacctatggccgtgtgttcaagacttggtcgacctggctggaacagaatgttgatcctgccaggacttcggtgttcttcatgacaatttctcctcttcacaacagcccagcacaatgggggaacccgaacgggatcaaatgcgtaaaggagacacttccagtcctcaactacaccaagccactggatctcaaccatgacatgcggatgtacgacctggtagcaaaagttgctaaaaacatgaagaatgttccagtgtcgttgatcgacatcacaaggatgtcagattacaggaaggatgcccacacatcattgtattccatccgtcagggtaaactgttgacaccggagcagaaggctgacccacagaagtacgctgactgcatccattggtgccttcctggggtaccagacgtctggaaccagatactctacaccaggatcctctccaaatcctcccctccatccacacatccctctctccctccacaatgacaagcagggagcatgatttttttttttgccccatcgtatactatataggaaatgtatcattactattcaatttttttggtagtttggtgaagaaaatcaagctagagagagaaaggatggagtgggctgtttactggtggcatgtaaaatcgttcaattgaattgtaaattagttttgagctaaccaattgagcaaacagcactgttgt

SEQ ID NO: 16873 - DNA, 2078 bp, Oryza sativa
  ref <308>: DATABASE ACCESSION NUMBER: AK067343
  ref <309>: DATABASE ENTRY DATE: 2001-12-06
ggggtggcatcgctcacgctgtcccccgcccatctccgcctttcttcctccgcccatccccgccgccgtcacccagccaccttttccctcctttcttcctccatgattacagtcgaccaggtgattggacggtgcggcgccaaatcaatggtgtgggggatcgatgttctggtcttgattccttttctctcttatcttccctcctttcttgctgatggcatgccaaatcgatggtgtggggatcgatcgatgttctggtctcgatttgctggttccccttctgttcaagctcgagtctttgccatcgtgcggcaccaagctccgccgttctgcgccgccagcgctgtttgccgattacagatatgatgatattggttggcttcccatattcacttttggttggagacatcaccaggtttgttgtgctctatatggtctgtgctgtgctcccctctgtgcctggttcgctgtggggatgtgcgtgggtgcctgtctaccaacggagctgacgctcgatggcccacctggtagtcactttggtccatggtgcgccggtgctaggtagttccttccctgcctgacaggctttccttttggtacaccgcccacttttactcaggacaatgcactgtctctctgtgtgagacacgtctattcgtggttctcctaccaacgtggtgcaccatggtcccccatcacacaggtgctttcctatatgcgtgttccgtgcgctaggagcacgttcacctaacaccactgaaagtagctgagaaattatccgctggttaataccacaaaaatcctgatgcacatgcatctattcgttgcagtcagcgataggtggggtcaatttcgtgtgcttccccacctgccatacactatgcccatccgggaggttatagctgtatgatgccatgtttttttgtgagcgccgcgcgctacgccaccgcgtgaggcaccatcaaatcgacgtccatacacaccgtaccggcgtgcgcgcgagcaccgatgcccacgtcatggtcttagcctttccttctcctcttcatacccggttcgttagttctgctcgaggctgttgctggttcggttcgttggtgtgctttgctcccgttttgccccttttcgctgttgcgcacatggcgagcaccaggtgatatgctgccccatatgtctttcgttctccctgactgctattctgaatgtgtatgcgtgtgcaggggacattgtggatactgcgtcgacacttaggatttgccccgctcatctagtgtacgactttagctcctcgacgccctgttcatttcgctcgaaggtcttggtggggttcgcgctgtaggccaggacgctcggccgaggtgactctgcccattggcttcttcgctagcccatgtctgcacgcgttcctcgatcctacgagttttggtatttggtttgtgcctgccccccttcctgtcgagcaacttacccagtttaggattttccctatacacgatgtcgggtagctcttcccagcgtgtacagcgggcacgggaaagtcgaacgcgccgacgtgcttctataggccagggattcttgcaggctcctgtgttcagcaatgttagccctacagcccctaggctcaccactgtcctcccaggtctatcaggttctataccgagtgtgccgaaacctgctctcagcttgcctactatctcggacgtgggtgttgagtctcagaccgggtcgattggcagcacgtcgtgtcctgtgcatgactcacaacccgctcctagcagaaaaagaacactcttagatgtgccacggcatgccgctacagcaaatagagaacgacgccgtttgaagagagcaggaggtgactcgggtcatttgctgcagaaaattctggatggtaaacctgctgcatagccattttttctttcttcttttttccccttggtacaagtgtgttgtttgatagccgtcatggcttaatgaggtctccttgctgtactttcaactacataggtccagtgcctactcttgatgatgtcctgcccttgcctaaggactatattgcatcattgaaaggtctgtcc

SEQ ID NO: 16874 - DNA, 1391 bp, Oryza sativa
  ref <308>: DATABASE ACCESSION NUMBER: AK067344
  ref <309>: DATABASE ENTRY DATE: 2001-12-06
ggagtttcctccccacaccgcaacccttctctctctctctctctcccctctcgacttctctcctctccgccgcctccgagtcccgccgcgccgcgcgcccgtcttccccggcggccgatgtgtctgcctcgtcggcacgaaaccctagaggtgcggtgcagttgaggggtcccgatcggagatggcggcggcggcggccatggcggcgcaccgggccagcttcccgctccggctgcagcagatcctgtccgggagccgcgccgtgtcgccgtcgatcaaggtggagtccgagccgccagcaaaagttaaagcatttattgatcgtgtaatcagtattccactacatgacattgctataccattgtcaggcttccgttgggagttcaataagggaaatttccaccattggaagcctctttttatgcattttgatacatatttcaagacacaaatttcttcgaggaaggatcttcttttatctgatgatatggctgagggtgatcctttgcctaaaaataccatcctgcagattttgagagtaatgcagattgttttggaaaattgccagaacaaaacatcgtttgctggtcttgagcattttaggcttctgctggcatcatcagatcctgagatagttgtggctgctttagagacacttgctgcattggttaaaataaatccttcgaagttgcatatgaacggaaagctcataaattgtggagctataaacagtcatcttctatcattggcacaaggatggggtagcaaggaggaaggtttgggcttatattcttgtgttgtggcaaatgaaagaaaccagcaggagggtttgtgcttattcccagcagacatggagaacaaatacgatgagtgaggtggatatgagtatgtggcctagctatgtgcctcagtggcagaggaagagtggaagtgatagtttcttcacgtcatcgatgcagcaatcttcaggcaccgaatctagtgtgccatcaagctcaggaaacaaaacaaaatcccaaggggaaaccttcccacttgttttgtcggctaattctatcagtgagtttgctgagggaaggtgatagataagtacccaagggtgctgtttttaagtttgagtgaatcttggtccctttttctccttcaaacattgtgcccttcattaactttccatgagaactagacatgttgggtttcatatcttagggttataattcatataatcatgtttgcctaatttttcttacttcagaacaatttgtgtatttcttttcttccatgtatagtagatcaaacactggatgcacatggtgttgtaatatctggtctgtaattcctgaccaattacatttgaaacataaacaatctatgggtacagcaaattttgtagg

SEQ ID NO: 16875 - DNA, 1706 bp, Oryza sativa
  ref <308>: DATABASE ACCESSION NUMBER: AK067345
  ref <309>: DATABASE ENTRY DATE: 2001-12-06
gagcttcttcttcctgcttcctctctctctcttctctcctcctcctcccactgagatccctctcccctccccgccatcgccatggctcccccaccgccgccgccgccgccgtcggaggaagagacgagacactagaaaagacggttcttgaccgagtttgcggccgatccgggcttggatttgccacgggaaaggaaggagtttcgggggctgatagagtgaaaggcgacgagggagaagatggcctcggaaatggttaaggcggcgacgagtgagaagctcaaggagatggattgggccaagaacatcgaaatctgcgagctcgtcgctcaggatcctgggaaagcgaaggatgtgatcaagccgataaagaagtatttaggtagcaggagcaagaacactcaactttatgctgttatgctgttagaaatgctcatgaataactgcggagaacctatccacaagcaggtcattgataacggtcttctcccgatacttgtgaagattgtgaagaaaaagacagaattaccagttcgtgaaaaaatatttcttttgctggatgcgacccaaacatcccttggtggagttaaagggaaattccctcagtactatggggcatattatgagttggtgtctgctggcgttcagttttcgaatcgcccaaatgttgttgttacacaagcacaagctccagtcccggtcccagaaccaacaatcgaaccaaataataacagtttatctaggagattggacgaaggacagaaggaagtgcatgcgcagcctgtttccgagtcaagtataattcggaaagcttctagtgtcatggaagttctaaaggacgtgcttgattcgatggatcctagacaccctgagggagcaactgatgagtttgtgttggatcttgtggagcaatgcacatttcaaaaacagcgaataatgcatctagttatgacatcaagggatgaagtggtggtatcacaagcaatagaactgaacgagagcttcacaaggtccttgtacggcatgatgcgttgctttcagttcagccaactacaacagtagcttctactctcaaggaggaagaggaagaagatgccgaaagcctttaccggaggcttcgaaagggaaaagcattatcggaagattatacagatgactccataccatcatttcgatctatacctgaagacaagatgcgccgcccactcaccattgagccatccaacactgataagaaactgggggcactgaatattcgctcgccatatcctgaagcgaggcctgacgtgctgattccaccaccgcctgccaagcacgccgagagggagaggttctttcgggagaagagcatggatgccaacttgctgggccatcttaggggcttatcattgcacagccgggacggcagtagctcgtgtagcggcagcacagattatggagactgaggtgtaggtatatgcggtacataaaggattattttttgttcttcaggatgatattctgcttgcccggcaattgatgttgagagaggcagcctcagcctcatcgtcgtcatcttctcgctgaccattgtacacttggttttctaattcttttataattcttcccccttccgcttacctgacattatcggaaagttgaacaatgctgtgttgtgagctttcagttctatagagatgcttgtgtggcaagctgtgtgagtgacc

SEQ ID NO: 16876 - DNA, 2150 bp, Oryza sativa
  ref <308>: DATABASE ACCESSION NUMBER: AK067346
  ref <309>: DATABASE ENTRY DATE: 2001-12-06
ggattactctctcctctgttctgctctgctgttcgtcgcccagcctagattagggatgatcagggattagattagtgacagaggcccgattaaacaagtgatcaaactcactgttaatttgtttaatcactgctgattgatgctgctgctgctgctgtgatttttttagggctaaagagtccaagacgagagatttggagttgttgcgaaatttcttggggaggagaggaggaagagtgtgactctgaatctctgtctctgaaactcagagagggagagagagagagagagagagagagagagagagagagagagagagagagaagatggcaggagggttcggcggcggcggcggcgaggcgatcgccgggagggcggagcagtacgaggggaagatcaccggatacttcatcctcgcctgcatcgtcggctccttcggcgggtcactcttcggctacgatcttggagtctccagtggtgtgacggccatggacgatttcttgatcaagttcttcccggaggtgtacgcgcggaagagcgcgcacctgcacgagacggactactgcaagtacgacaaccaggtgctgaccctcttcacctcctccctctacttcgccggcctcgtctccaccttcgccgcctcccacctcaccaggcgccgcggccgccgcgccaccatcatggtcggcgccgtcagcttcttcctcggcggcgccgtcaacgccgccgccgccaacgtcgccatgctcatcgccggccgcctcctcctcggcgtcggcatcggcttcggcaaccaggccgtccccctctacctctccgagatcgccccctacaacatccgcggcgccgtcaaccagctcttccagctcaccacctgcctcggcatcctcgtcgccgacgtcatcaactacttcaccgacaagatccacccgtgggggtggaggctgtcgctggggctcgccatgggccccgccaccgcgatcttcgtcggcgcgctgttcttgccggagacgcccaacagcctcgtcgagatggggcggctggaggaggcgaggcgggtgctggagaaggtgagggggacgaggaaggtggacgccgagttcgaggatttgagggaggcgagcgaggcggcgagggcggtgcgcggcacgttcaggagcctgctcgccgcgcgcaaccggccgcagctcatcattggggcgctcgggatcccggcgttccagcagctgtccgggatgaactccatactcttctactcgccggtcatcttccagagcctcggcttcggcaactccgccgcgctctactcctccatcatcacgggatccatgctcgtcgtcggcgcgctcgtctccatggtcgtcgtcgaccgcctcggccgcagattcctcttcatcgaggccggcatccagatgatctcctccatggtggtggtggcggtgatcctggcgctcaagttcgggcacggcgaggagctatcgaagggcgtgggcacggtgctggtggtggcgatctgcctgttcgtggtggcctacgggtggtcgtgggggccgctggggtggctggtgccgagcgagctgttcccgctggagatgaggtcggcggggcagagcgtggtggtgtgcgtcaacctgttctggacggcggcggtggcgcagtgcttcctcgccgccatgtgccacctccggtggggggtgttcatcctcttcgccgcgctcatcgtcgtcatgtccatcttcgtcatcctcctcctgccggagaccaagcaggtgcccatcgaggagatctggatgctcttcgacaagcactggtattggaagcgcatcgtcaggaaggaccccaagtatcagggccaccaccaccaccagatggccgccatgccaaccgccgccgccaagtccggctcgtcggaggtttagatgatgatgataatgaattgatgatggtttaataaggttttagtgggtggtgattaagacttgatcttgaattgttcatgtggcagtagcttttttgatcttcgattgatgcaaaagaagaggtcagagggttaatgcatgtgtgtgctcgtgtgtctatagttttagtttcatgttcttcagaattcgattcagtgtagtggtgggctgattaatggatcttgatgatgc

SEQ ID NO: 16877 - DNA, 3325 bp, Oryza sativa
  ref <308>: DATABASE ACCESSION NUMBER: AK067347
  ref <309>: DATABASE ENTRY DATE: 2001-12-06
ggaagagcggttgccatcgccagccacagcagccgcggctactataatggtgggagagacaaactagagagagaaagaaaccaccaccgccccaagaagagagagagaggacgcgacggttgccaggaggaggcagccaacggcgctcgaggcaagaaacgacgcggccatggtgggcttgccttgggagtcgtgacgcgctgtgtttgctgccgttgagagatgaaggtagtatccaagaagcatcatcagcaaggaggagggacgacgacgatggaggagggcgccatggacggcgctggcggaggagtggcggaggaagggtgctccggggaggagagggagggagtcgccgacgtcgctgttggcggcggcggcggcgagggggagcgggaggggaggacgctggtggtgggcgtgcgggcggacgccgcgagccggacgctgctcacgtggacgttcatcaatgtcgccgcccccggcgaccgcatcgtcgccgtccacgtcgtgctcgcctccgcgcccgtggccgccgccaccaccgccgtcgacttcgacaccatgctcgccgtctacgagggcttctgcaatctcaagcagatcaatctaaagctcaagatttgcaaggactcctcggtccgcaaggcgctagttcgtgaggccaacctgtttggggcatccaaggttatcgtcggcatcgccaagaagaagcgcgggatttcgtccctgcactccgtcgccaaatactgctccaagaagctgccggccaagtgcgcggtgctcgccgtggacagcggcaagatagtgttcaggagagaatccaatgtccactcaggcaaggtctccgcggagattcctggatgtggtgataatgagttgtattgcgaggtgccgttcctagcccgtcagtgtaaagaggaacctttacctttacatgaaccacccagagatggtggtggtagtgcgggcgaggaagaagaagagcacgatgttggcacaaaggagaccgagccggtgaatgccgtctccggtgaacagcagccttccggtgtggatcctgctgagttgtctccggatcaggttcagggtgatgttgatccatctgacaagggtgaagagtggactgccgaccagaaagatgagatttctgagcttccgggtgagggtgctagtgttttgtactgtgtgttaccagagaggaatggccattcagctgcaagcacgtccagtcggcaatccaatgattcgaccgagccaccgactgaagggaatggggagctgtactgtattttgcccccaagaaatgatcattcaggcaggagtagcggtgattctagccgttcaactgcgagtcggaaacacgatgattctgccagtctgtctgctgaaggagatggtgaactgtactgccgattgccaaggactggccattcaggtagaagttctgggggatcaaagcgttccttcggtgcaaaaggtttgattaggcgcagcagtagtttctccagtgatattcaaaaggatgtctcagtttgcacgactacaactgaacagacttcgtccatggtatctacagaagctgaggattcaccaaagaacgctgcacgtgatgtcgatacaccctccagctctccaatgtctctaagaaggatgatagagggaaggcccgaccgctgtcgacttcgaaggaggatcttcaatcatcaaagaagctcatcttttgaatgggccaaaatttccatggttcagtgggcaatgaggcttccaagccgttatacttcagttgcagacaacaaatcatttaaatcagatgcaagtccaaggttgaattgtgattccgaatgtgaatccacttcagctgttgacacagaatctatgttttcgttctctttatatgatatatcatggcctccaaatgaagtggaatcgcttcaagagaagtactcttcaacgtgtaggctgtttacctatgaagagctgaaacttgctacgtcaaacttctcaccagatatgttaattggaaagggaggaacaagccaagtttacaaggcacaactatttgatggcacattatcagctgtaaagattctgaaaccttcagttgatgcaatacaagagtttgttacagaggtggagattgcaaccagcttgcaacatgacaatattgtttcactaagaggattcagttctgataactacagtcttgtgttggtatatgattacatgctccagggaagcttagacaaagcacttcatggcaagcatgacagcaaggatagccttagctgggagaagagaaacaaaatagcaattggcatagcaaaggcacttgaatatctacatcatggaagtgtcacccaatctgtgattcatggaaatgttaagtcttcgaatatcctcctctcagaggattttcaggcacagctttgtgattttgggttggcaaagcaagtctcagcttcaaccccccacctaacatgtactgacatcacgggaacgtttggatacttggctcccgagtatttttcgcacgggaaggtcaatgagaagattgatgtctatgcatttggagttgtaattctggagattatttcaggaagaagacctattagaacaggatgttcaaagggtcaggaaagcctagttggatgggcaaagccattactatcaagtggggaaattaaacaattggttgatccattcttgggaaatgattatgactgtgatgaaatggagaggatgactctcgcagcttcgctgtgcacaaggacatcttctcattcccgacccgaaatgtcacagatgttgaaactgcttgaaggagacgacgagacgatccactgggcaagaacccaggtcaccgcgagcttcgacggatcggacgaggaggctgtggcggctcctgactcaaacatgcagtcacacctgaacctcgcgttgctgggcgtggaggatgacaccctctcgcactgcagcactgaacagaccatggacacttcagctgacgggtactggagccggtcatcgagcttcgactaacctcctgcttttttcttaaccaccatttgttctgattttgagccatgtgaatggggagctgtgtgtatagagtctctcaattctcataactttgctgctgctgttgtgtcgattggttggaatggtgaatgcaaattgaaaggaagtggatgatatgcacattcggatggcagatgtagtagcttaggaattgtggtagatctaaccctgctggcctttggccctacttggtaggagtatgtatcactgatgggcttcatggtgcatcaagatttgattcttttcc

SEQ ID NO: 16878 - DNA, 2705 bp, Oryza sativa
  ref <308>: DATABASE ACCESSION NUMBER: AK067348
  ref <309>: DATABASE ENTRY DATE: 2001-12-06
ggcctttcttctcccaacgctttcccttcttccctcccaatcccaatccctcccaagaacgctccccccgtgtcctcctcgatcccaatcctctcctcgcttggccctcctcgtgctcgcggatcgacccacccaacccagctgatgatttgctccggccgccttctcatgcttccttttgcctgatttgttagggaggctggaagccaaaaggcagcggcaatgccggagtgtccagcgagggagcggttctccgcgctccgcggcgcccggtggcgcgccgatctcggcgtcctccccgactgcgcctccgtgtccaccgaggagttccgccgagccgccgccgactcccgccgcaggtatgctaatttgcggcggcggctgttaatagatccccatctctctaaggatgaagaaaacgctcctgaccttgctgtggaaaatccactatcacagaacccagaaagcacttggggccaatatttcagaaatgcagaactagagaaaatgttgaaccaagatttgtctcggctctaccctgaattgggaaatttcttccaaacaaccatatgtcagtccatgcttggacgtatactgttagtttggagccttaggtacccagagctcggttacaaacaaggaatgcatgagctcttagctcctcttctctatgtcctccatgctgatgtgcattacttcaaacaagtcagggagcttcatgatgagctttttagtgatgattttgatggccaaacatttccagataggataaaactgaacaggagtgacaggacaaacacaattgagggtagtgcagctaaaataagaagtttggatgatcttgattctgatacgagggaccttttcttgattaatgatgcttatggagcagaaggggagctgggtattattttgtctgaaaagttcatggagcatgacgcttattgtatgtttgagagtttgatgcatggttcgatgaatggtgcacaaggtgtggttgctattactgacttctattctctcagtcctgcaccagaatcaagcacaggtttaacacctgtaagggaggcatcatctgcaatatatcacttgcttgctagtgtggattcccctcttcacagtcatttgatggagttgggagtagagcctcagtactttgcgctacgatggctgagagttctattcggtcgtgaattttcacttgacaatcttctgtttatttgggatgagatcttctcatctcctaaccattcatattgtgcagacataaagaatcaatcagactatcagtttaagattttatgttctcatcgtggtgccctgattttgtcaatggcagtttcaatgatgctccatctcagatcttccttgctaggaagtgaacatgcaacttcatgcctagtaagattgttaaattttcctggagacactgacttaaagagcttgattgataaagccaaattattgcaaccttttgctcttgaagcaaatcttccttcatctcctctcagaggaaaatctcccttgaatccacccaactactgggaagagacatggaagatactccagatgtcagaagagaaaagaagtggtggttcaattaataggatgaaggtaagaggtttgttcagaagaagttcccccaacactgaatcaaatgtttcgagaaccaaggatgctaattttgaagatagcaattcgacttcaggtacgcaatctactgctgatgaacatcacagatctggtatagttccagtaaatttggtaaatggtacacttcacacgcctataagagaacgaacaagtcatgttgaacaatgtactgcagagaatatgatcaccacctcaaacaatgtattggaggcagggcagcctgaagttcaccgctccagttctgttgatgttagagatgctcttggagttgcatgtggaaatttatcaagagacagcagtacctcgttatcatgtggtacggagtatgaccatgagactcatcatgcagatgagccatgtgcttcccatgatgataaggtggttagtgagcctgatccactccctgtgcataatgataagattgatgaagtgacaatcgcagccattcaaacatgtgcattggtcgattatcagcaatcacaacagaataaaccgtgttctgttaatgggaaatcagaggtaaaatatcaacaaaattttgctgtgcatgaagttggccgcaaagaaacatttgaactaggttcaagctcagatgtggctgataaagagctacttggaacattaaggttacttggggaatctatggttgaaaacattgaggttattgacttgttgtttcaaccaaatttgcactctacctcactggataaatcagaggaaattgttcttggtagtatagagcaagctaaagcaaaagcagctctagaaggtctcaagaagattagtgaacttctacgacgaatctaacgtgtatatttgtggaaactcgcaagagtagctctaactacctgttccatacttccatgatatattttcattttttttcacacaagttctaacttaacagaattgttgtactgaacgaacaatggataaatggtccaattgctttgtagatattttgtacatgttccatgtaagctgatgaaatcatcactgtatatttgaacaactcttggctgattttgaagtgctgctggccttccgatttt

SEQ ID NO: 16879 - DNA, 1679 bp, Oryza sativa
  ref <308>: DATABASE ACCESSION NUMBER: AK067349
  ref <309>: DATABASE ENTRY DATE: 2001-12-06
ttgggtgcggctggtgacacgagaggcaacggcgtgcggtgcgaggagacggcgtggcggcgcactgacgttgacggcgacggcgacaacttcccatccgacgtccgcgctctccgctaccttctcgccgattgtaccagcaattcctagaattggtgaagacgagccgcctccttcctgggactttgttttgactccgaaagctatggttggaagaggttcaccaaaactcagtatgattccaaagggatctcctaagtttggtaggatgctatctgcagcaagtactaggatgaagacagtctctcctcaaagcatacttgctaagaagactgcaagctctccaaaaggcaaccaagtcaagcagagagcaatttggaacgcggagttggagaagtcacttgttgaaatccttttcgagtacaaagtcaatggttgtagaggagataatggctggaccactaaaggttggaatagaatggtgaaggaattccacgcagggaacaaatgcgtatcattcaccaaaaatcaagttcaagaggagggtcaactgaaaagagattacaagatgttgaaagcggtcagacaacaaagcgggtcttcttggaacgagaagagatgcatggtcgagggatcgccagctatgtggcaaaacttgcaaattataagtggatttgtgatcaatatcttcctttgcatgtgatttgtgatttctttgatgccttacaatgatttgtggttatgcttttgcatgtgtagacattcccaaagatcaaaaagtttcgcaacaacaaggccagctttcccttgtatgatgcacttggtgagctatatgacggccatcttgctgagggaaaacacaactgcacctcctttgattcaatggaagatgagaaacccctgaggctagtacaggagttggaagatgatagtcaagagcaagatgatgttgtgctgctcgaagaccaaagaaactcaagagaggaagaaactgatgttgtgctgcttggagaccaaagaaacccgagagacaaagaaactcaagctgaggattcaagaattgttactgaagagcaaagaagacaggctttaatagcaaagaggagacaaaaaaagaagataacaagactagtaagaattcaagagtggagagcatgatggagcgataccttgagatgaggagtaaacaagccgaggaagaagttgcagctagagagaaggtatgttcacaagcaacagattattttgtcaagtgtgtatttattgagctcaatggatgttaccaaacaagagaaggcaaaggattatgcagttcttaagaccccagcaaatagagaagtctttatgtgtgcttgcgaagatgacttagagtctgctttaatttagctgagaagtgaaatggcctagcatcaccaaagttgacacatttgatgaaggaaaacaatggaagtacatggtccaaggtcgccagggtgacagaatggatccaaggtcaatactcaaagctactagactgccataggagaaggacatggtctgagtacaagaggatttatttgctgctctgacaatatagaatatttatgttttcaaactggttacaaaattatgctttggacttatgcactttgggtgtaattgtaatttattttttggatctagtgaccattttcatgttt

SEQ ID NO: 16880 - DNA, 3967 bp, Oryza sativa
  ref <308>: DATABASE ACCESSION NUMBER: AK067350
  ref <309>: DATABASE ENTRY DATE: 2001-12-06
gattgtgctcgcatagtacgatgaatcaacaacatcgatcgatgtgctatttaaccagctaagctagatagatagcctccgtgtttgtttccggtgagagaaatcaagagatgggtggccacgtcatcgtgtggatattgctctcggtgtgctcatggcggatttcagctgctcaggctcagcaaccaccaagaaccgatcctgtagaagtggcggcgctggaggcgatcctggggagatggaacaagaccaattcgccggtgtggagcatgagcggcgagccatgccgcggcgtccccgtcgacggcgtcaccggcctcgacggcaaccccaagaacaaccccggcatcaagtgcgactgctcctacatcaacggcaccgtctgccatatcacccagctgaaggtatacgccttgaacgttgtcggtcagatacctgcagaattacagaacctcacctacctaaattacctggacctggatcaaaattacttgtcaggccccataccatcattcatagggcaattgactgccttgacagaattgcatgtgggattcaatgcactctcaggaccaattccgaaggaacttgggaatctcacgaacctcaacttgctaggcatcagtttgaccaattttactggtcaacttcctgaagaattgggcaacctgaccaaacttcaacgattgtacactgatagtgctggcttgagtggtccattcccttcaacgttctcaaagcttaagaacctgaagctcctgcgggcatcagataacgattttacaggaaaaatacctgattatattgggagcttgactaatttggaagatctgtaagagtaatttttaactttttatcacatcaatgattttatcctattcacaagacaagtggaactgcaacagaaattttctgcatatgttgtttccaattgaattcgaactgtagcgtgttttttttcttttaagtcatcactatgaacagaaatgtgcatacctgtatgccattactctggtcccaacagtgtcttaatatgtagaggttactttttctaatattcaaataaacttggcattttcatacttttttcttaaattatgaactcacagggctttccaaggaaattcttttgaaggaccgattccggaaagtttgtctaatctaaccaaattgacaaccttgtaagtactttgttctatggcaacattgccatcccctcttgtcatgatgactgatgtgctaaatacaaatgagcagacggattggagatattgtaagtgggagctcttcatttgcctttgtcagtagtctgacgtctttgaatatcctgtatgtgacacttaaattctaactatacatcttgcaattttatatattgacaaagtaataacttgctaataccgaatactttttacagtgtattgaggaactgcaggatatctggagaccttggagcagtagacttttcaaagttcacaaaattagccttcctgtacgtttttcattatgggtcatagcacaatccatgaaactcttggtgttttttctgaaatttcatgtgaagtgtctgttcaagtatgctgtcttgtggcacagggacttgagttttaacaatatctcgggcaaagttcctcaatcaattctgaatctacaaatgcttacagacctgtttcttgggaacaatagcctaaccggaggactgccagatgggataagcccttcactaaaaaacttgtgtgtaaacaattcaacattgcagtacagctaaaattagaatgatgcatttatttcatatttgcagagatttttcatacaaccagctcactggaagctttccctcctgggctacccagaacaacttgcaattgaatttggtggcaaacaactttgatcttggcagcaccaacaacggtattctacctccagggctaaactgcctccagaaagacactccatgtttacgaggttctccagaatattattcctttgcggtagactgtggtagtaacagatctatcagaggctcagataatactatgtatgaattggatttcacagaccttggcagctcatcatattacgttaccagtgaaacaagatggggtgttagcaatgtaggaaaatatttccagtctccaaatgacagtaagatcatatatagcaatgagaagattcagaatgcagtggtttcagaactactccaaactgcaaggatgtcaccatcgtctctgagatactttggccttggacttgagaatggaaattacactgttctgcttcaatttgcagagttaggttatccagactcaccaacttggaaaagcttaggaaggagagtttttgacatatatatccagggtgacctaaaagaaaaggacttcgatataaggaagatggctggtggaaaatctttcactgctgtttacaagagttacacggcaactgtgtcgaaaaacttcctcgaaatccatctgttctgggctggaaagggcacttgttgcattcctattcaaggttactacgggccattgatctcagcattaagcatcactccaaattttactcctactgtgcgaaacggtgtacccaaaaggaaaagtaaagtaggtgcaattgctggaatatcgattggtgcctcagttgtaggattagcagccctatttggaatatttatgttcataaagaagagaagaagacttgcacaacagcaaggagaactgtacaacctagttggacggcctgatgtcttcagtaatgctgaactcaagttagctacaaataattacagttcccaaaacattcttggggaaggtggatatggaccagtctataagggtatgctacctgatggaagagttatagctgtaaaacaactttctcaatcatcccatcaggggaaaaaccagtttgtgacagaggttgcaacaatttcttctgtgcaacaccggaatcttgtcaaattgcatggttgttgcattgacagtaatacacctttgttagtttatgagtaccttgaaaatggaagcctagatcaagcactcttcaggaagaatagcttaaaactggactgggcaactcgcttcgagatcattttaggaatcgcaagaggactaacttatcttcatgaggagtcaagtgtgcgcattgtgcatagggacatcaaggccagcaatgtcctacttgacaccgacctcaccccaaagatatcagactttggactcgctaggctctatgatgagaagaagactcatgtcagcacggggattgcgggcacatttggttatctggctcctgagtatgcaatgagacgtcatttgactgaaaaggttgatgtttatgcattcggggtggtcgcattagagactgtcgctggtcgatcgaacactaataactccatcgaggaaagcaagatctatcttttagagtgggcctgggacctgtacgaaaaggagcaagcacaaagaatcgttgatccaagacttgaggatttcaataaagatgaagttctcagagtcattcatgttgcgctcctctgcacacagggctcaccaaatcagcgaccgccaatgtcgagggtcatggcagtgctcactggagatgctgaggtagttgagatggtgacgaaaccgagctacatcactgagtggcaatatagagatggaaacagcaccaactcagaatctaccacctcagagttcagcaggcagaaggagatcgaccctctcaccatgtcgccaacaatcaccggatctagtcatgatggaaggtgaatgctgcaacctgcaggtgatcttggtttgaaatgattgtatgtaaatgtaagacggagctaatagtggaacttaattattctgaagtatgtatgatgataaaagtatttactccttgtaatttgtaacaggtcaaatagagtagtatcctagtatatatcttagaaattaatcaacgtattcgcatgtttatgagc

SEQ ID NO: 16881 - DNA, 1379 bp, Oryza sativa
  ref <308>: DATABASE ACCESSION NUMBER: AK067351
  ref <309>: DATABASE ENTRY DATE: 2001-12-06
ggccatctgcctctctccgctagtccgcttcccaaactgtagcaagcaagcaagcagtgcgagacaacgtgcagctcccactcccagccaatggaatcgagggaaagtttggcacgcccgcctccgtaccaccactagctcccccccaccgatcgtcggcggctgcggcggcgacgccaccatgctccagctgcggctccagcccccgcgcttcacgccgctcccccgccgcagggtcgctggcggggggcaccaccgtcgccgccgcgccgcggcacccccgccgcccctcgccctccgctcccagtggcggatccccgacgtcgacgcagatgcggtgcaggagcgggtgcggtcgtggctgtcgcgggcgaggggcgccatcgccgacgcggcgaacgcggcgcgggagaaggggaggagcaaggaggaggcggaggggaggaagaagcggcggaaggaggcgctggaggagcaggcgctcgtcgcggtgccggagatcaccgtcgaacggcgggtcggtcgtggctggctctcgctagacgctgtcgtcaccatcgagcagtttgccaggttgaatgggttaacggggaggaaggtgcagaggatctttgaagctcttgctcctagtcatgttcagaatgatgctcgaaatctggttgagtattgttgcttccgctatttgtcaagagataactctgatttgcatccaagtttaaaggagcttgcattccaaaggctaatatttatgactatgcttgcgtgggaagatccatatggtgaagatgatgacacagagtcttcactagataactattctatactgggaagacttgttggagaagatgcctttgtccgaattgcccctgctgtggcaggtgtagctgatgtttcaacggctcattatctcttcagggcccttgtcggttctgaaaaggggctttctttagatatatggacaacataccttggtgaacttctgaaagttcatcatgggaggcaaacacataaaagtggagatcattttttgtccgatgagcaagtcctatgcataggctctagtagaaaaagacctgttctgaaatgggaagaaaacactgcgtggcctggacacttaaccttgaccaacaaggcactctattttgagatgtgatgactttgggcccaactcctccacctttacattgatattggcaggccattggactgacaagtaccaataaaccattgaagcttgaccttacagatcgtaattcaagggttgagaaagcaaaggttggaccatttggatccagattgttcgactctgccgtatctgtttcatctggttcagtgtgagtatgcctggttactctctagaggaaccattttcactattg

SEQ ID NO: 16882 - DNA, 1308 bp, Oryza sativa
  ref <308>: DATABASE ACCESSION NUMBER: AK098998
  ref <309>: DATABASE ENTRY DATE: 2002-08-28
gcgccatactgaccagagaggctcacatggatccgtacactagcagggctccggcgagtggtggtgtcgccgccggcgacgacgaggaggaggcggcgtgcctgcaggcgtttgagctaatgtgcatcttcaccgtccccatgacactgaaggcggcgatcgagctcggcctcctcgacgcactagccgccgccggcgacggccgcgcactgaccgcggacgagctggccgccgcgcggctcccggacgcggcgccggacaaggccgaggcggcgtcctcggtggaccggatgctgcggctcctcgcgtcgttcgacgtcgtcaagtgctcgacggaggccgggcccggcggcgaacctccccggagacgatactcgccggcgcccgtctgcaggttgttcaccgccggcggcaacagccaccgtggatctctggccccctcggtcttgttcggcgtcgacgaggactacctgtgcacctggcgtcagttggcggcggcggtgggcggcggcgggccgtcggcgttcgagagggcgcacgggatgcggatgttcgagtacatggggacgaaccgccggctgaacacgctgttcaacaaggccatggcgcagcagtccatgattgtgattgacaagctgctcgaccgcttccatgggttcgacggcgtcggcgtcctcgtcgacgtcggcgggggcaccggcgccaccctggagatgatcacctcccggtacaagcatatcaccggcgttaacttcgacctaccccatgtcatctctcaggctccatctattccgggtgtgaaacatatagctggaaatatgtttgagagcatatctaatattggagatgcaattttcttaaagatgatcctccacatgcaaaacgatgaggactgcatcaagatcctcaagaattgccaccaagccctgccggacaatggcaaggtgattgctgttgagattgtcctcccgacgatcccagatctggcccaaacagcacgatacccgttccagatggacatgatcatgctcagcaattcccggggaggaaaggagaggacagagctggagttcgccaagctagccacggactctggtttcagtggtgccttgcgaacaacctacatcttggccaactattgggttcttgagttcagcaagtagctctgaaaaatcatgtcaagttcaatttgctaagcattttaatgtgtgcatggttatttcaataccatacaaatggtgatcagaatcgctatatatactgaacaatatatgtcaaatatacaatataaaatgtaaagtgtccctt

SEQ ID NO: 16883 - DNA, 1408 bp, Oryza sativa
  ref <308>: DATABASE ACCESSION NUMBER: AK067352
  ref <309>: DATABASE ENTRY DATE: 2001-12-06
gagaacacgaaagatgatcatgttgtggctgcccgccgccgtctcgctcctcctctcgtcgtcgctgcatgtcgccggtgacgccggcggcggcgtcgcctccctctccgtccggcgctacgacgccatcttcagcttcggcgactccttggccgacaccggcaacaaccccgtcgtcttcgactggtactccatcttcgaccccgtcacccgccctccctacggctccaccttcttcggccgccccaccggccgcaactgcgacggccgcctcgtcctcgacttcgtcgccgaacgcctgggcctgccgttggtgccgccgttcttggcttacaacgggagcttccggcacggcgccaacttcgccgtcggcgccgccaccgcactcgactccagcttcttccacggcgccggcgatcccccgggcgccagcccgttccctctcaacaccagcctaagcgtgcagctgagctggttcgattcactcaagccctcactctgcagcacaactcaagaatgcaaggatttcttcggcagatcgctcttcttcgtcggcgaattcggcatcaacgactaccactcctccttcgggaggaggagcatgcaagaaatcagatcgttcgtcccggacatcatccgtaccatctccatggccgtcgagaagctgattggcgacggggcgaccacggtggtggttccgggcatgatcccgtcgggatgctcgccgccggtgctcgtcaccttcgccgacgccggcgcggcggagtacgacgcgagcaccggctgcctgagggagcccaacgaggtagcgacgctgcacaactcgctgcttctggacgccgtcgaggagctccgggagaagcacccggatgtcgccatcatgcacaccgatttgttcagacacgtctcggagatggtccagaatcctgacaagtttgggtttcaaaaggatgttctcagcgtttgctgtggaggtcccggaaaataccactacaacaccaggataatctgcggcgatgaaggtgcgaccacctgtgtggatccatccaagagcttgtactgggacggcgtccacttaaccgaggcagcttaccactacatcgccgatgattggcttcatgccataaccttatctgcaagagctacctcctaaaattgatatggcacgaacgtcggatacacacatgtaatgctagttttttttttaaaaagaactacatgtaatgttagttgttggtcgattttccttcgtgaaggaacatcagccttgcagatgatccgagtaaaattgtggagaaaaaactcctctattcaattaaattggcggtctcatcgattcgttcaaaaaaaattatgaaaaaaactgctgaacggatggatatttgaataaaattcgttcttgttgtgc

SEQ ID NO: 16884 - DNA, 2422 bp, Oryza sativa
  ref <308>: DATABASE ACCESSION NUMBER: AK067353
  ref <309>: DATABASE ENTRY DATE: 2001-12-06
gaatcaaattcacctgaagcacctaaggttcacatggacttgccatcctcacagctcaccaatcttggaggcaccgatacattgtgatggaatttcagccacttcctcagggagttcacccaaacacttcagaaccagccatggagcccatggcaagtgagtcatctgtgcccatagggacagcttttgcagacttgctgctgcaagggccagagcacccaagcctgtggaatgatctcaccggcatgttcaggaaggcattccgttggcaaggtgcagacaagcgcttcacactgtctgtgtatgtgatgtctgttctacagggtctgtttccaatacttgactggtggaaaacctacaatctgaaattctttcgaagtgacctcatggctggcctaactcttgcaagccttagcattccacagagcattggatatgcaactctggcaaaactggatcctcagtatggtctttatacaagtgttgtgccacctcttgtatatgctgtgacggggtcctctagggagatagccattggaccagttgccattgtgtcattattgctttcatcaatgattcagaagatagttgacccatctgttgatccagcgttctaccgaaaaatggtctttaccgtgacattccttactggtgtctttcagtttgcatttggtctgttcagactgggatttcttgtggattttctatcacatgctgctatcgtcgggttcatgggaggagctgctattgtgattggattacagcagctgaaggggctgcttggacttagtcattttacaaatagaactgatgtcgtctctgtcaccaaggcagtctgggtttcagttcacgaaacatggcatccggagaacgtcttcattggatgttcctttttcatgttcattcttgccatgagattcattggaaggaagtacaagaaactcttttgggtctctgccattgcacctgtactatcagttgcactatctactctgtttgtctatgcgacaagagcggataagcacggcgtgaagattatacaaaaagtgaattcaggtattaatgcaagttctgtcgagcagatagatctcaaaggaggctatgctgccgaatgtgcaaagattgctcttgtttgtgctgtgattgctctgacggaagctgttgctgttggccgctctttttcagcgatcaatggatatcggttggacggaaataaggaaatggtagcaatgggcttcatgaatatagcaggatccttatcatcatgctatgtagcaacaggttcattctcgcgcacagctgtgaacttcgctgctggttgcaagacaaccgtttcaaacattatcatggctgccactgtgatggttgccttggagcttctcacaaagctcctgtactacacacctgtgtccatccttgcatcaatcattctgtcagctcttccaggattgatcaatgtgcaggaagtccgcttcctgtggaaagtcgacaagatggacttcctcacatgcatgggatcattccttggtgttctattcggatcagtggagattggtctttcagttgcacttcttgtttcctttgcaaagatcattatacagtcgatttggcctcaagtagagattcttgggaggcttcagggcacagaaatcttctgtaacgtcaagcagtatccagtggttcacgaaacaccgactgtactgaccgtacgcattgaaacatcattcctttgcttcgtcaactccagttccatcaaagaaaagatcatgggatgggtaaccgatgagcgcgaggcattttgctcggtcgttcttgacatgtcaaatgtggtaaacatggatacttcaggtcttgtggcgctggaagaactgcacaaggagctggcgtgtctcggcatccagatggctatagccaagcctggatggcaggtgatccacaagatgaaactggcacggctcgtcgacggaatcggagaaggatggttcttcctcacggtgggcgaagccgtggaagcttgcctggcaaacaaggcgggaaacgccctggaatgctgctgaatcgaatccaccgtgtgcatggtctctccggtggttgaataaagagagacactagtgcttcgtggtacgctacaaaaggattgtgttgtgtgctagtgctgcacgatgatgcagcttcagctgtagtgtggtgcttcatggattgtgcgacgtgcaactgttgggggaagacgaactgtgtctgtctgaacttagtatgccgagttcgtctaaattccccactatagctgtaggtttgtgatgtatcggatgcatttgtgaagagcaaatgccaggttttaagtgttggaactgatgattgtgtaatattattatattaatcgagtttgtataattaatttgtactcgagtttgtgcgttttggc

SEQ ID NO: 16885 - DNA, 2238 bp, Oryza sativa
  ref <308>: DATABASE ACCESSION NUMBER: AK067354
  ref <309>: DATABASE ENTRY DATE: 2001-12-06
gagcccctcctttccttccatcgctgcaccaccgccgccaccgccaggttcgcgtcgccgacgtgccctacgccgctgctgttcgtcgcccggtctctagtttggctgacttctcgccgcagccggtcacatcacgcgtccttatcacacgctgctcttcaatctcctcctcccgccgccgccgccgccgccgtcatccgcctccccagaagctgcatctctagtccggaggacgcaatttggagcaattcaagaagtcctgataggaaaaaggactcccattatcttaacgattttctataggagggcgcaatttggagcaattcaagaagtcctgataggaaaaggaagggaataaaaagagtccaggttcctcttgctcgtaccagggccatcgcaatcctttttatgcctagtcgaattttccgaaattgaggtcaaaattcaagtacaaaaacagatagtagtagataggagagaaatagtgatctgaaggaggggaaacggaagtgatttctcggtgagatctgacgaagaagagtcgtcgtcgacctactagttccacatgcctgcgaaacgcaaccagaagcggcgccgccgccaaatcagagcccagaatgaactgattaggtggtgtaaaagaaagggatcaccttgtcagcatggtgattctcgagctgtcaaaacaatgagacgttctaccccatacccatgccttcctgaggacatctggcatcatatacattccctaatgccaatgcgtgatgctgcccgtgctgcttgtttgtctagaacctttttacagtcctggagaagtcatcccaatctcattttaaataaggatacaattggcttgaatgcgagtgcttgtggagggaatttcagccgcaaagttgaccatattatgaggaaccactcaggcattggcgtgaaaatattcaggcttgaataccttggcgtcgtggggtttgatgccagtcgctatcttgacagttggcttcaggtggttgttaagccagggattgaagagctgacccttgtgttgtgtaaaaccaagagagagtacaatttcccatgctcacttttatctgatgggattcaaaattcaattaggtacctcagactcgattggtgtgcccttcgtcccactgctgaactcggccccttgcaaagccttacaagcctgcgtctgcgttcggtgagtatcaggggggaagaattgcagtgtcttctttccaattctcctgcgttggagcagttgcgcatttctagttgcacggagatagtttgcttgaagataccttgctccctgcagaagctcagcaaccttactgttattggatgtgacagcctgaaagtattagagaacaaagctccaaatctctccagtttttttgtttctggatgctctaacctgagaatattagagaataaaactccaaatctctccagttttttctgtagaggagtcggggcaaagctctcacttggagaaacactgaaaatgaagaagctaggcatgggccgtgcgaatgctgtgcattatgctcgtgctgagctgccttccattatgccaaatcttgaaactcttaacatacgttcaggacctgaggtatgtatatatatatccagaagctttaggtgttatagactagtattacatatatatgcgtattacattagtcatacctgtgtatgattttagacgtgtcatatttgttatacaggcggtaaatacaccagtgctgcctaccaaattcctctacctcaagcacctgagcattagtttgatagcagtatcgacactttccccgtcctatgattatttttctctggtttctttccttgacgcttctccttcgttggaaacttttatcttggatgtaaggcactgtccattaactctgtcctgctaacatagctgttcactctgggtccatttatctcaatcgtgttctcctttccatcttcaggtgcagcagcgaagcatggagcatgaatcggtttttgcaaaatcctcgggtttgaggcaaattcctgaaaaccgccatgacagcctcaagactgtgaagatctctggtttctgctctgcaaagagcttggttgagctaacttgttatattctgaagaacgtggtgtcactcgagtctcttacattggacaccattcatggtgattgtaggtgttacctaaaaacttctccattttgtaatcacatagaggaggatattctcatgg

SEQ ID NO: 16886 - DNA, 1829 bp, Oryza sativa
  ref <308>: DATABASE ACCESSION NUMBER: AK067355
  ref <309>: DATABASE ENTRY DATE: 2001-12-06
gagttgtttggaggtagagacaggaattcagaacacaaacactttaagtggctatccagtagccaacagaagatgtagctgggagagcattcggcttttcaacagagaattacactcatctgagaagtcttttgcgcccatcgcatctgattcaataagcttggttatatctgttgaagatactggcgtcggcatcccatttgaagcccaatcccgtgtgttcacccctttcatgcaggtaggtccatccattgcccgcatccatgggggcactggcattggattaagcatcagcaagtgcttggttggtctcatgaagggagaaatcggttttgcaagtaagccccatgttggttctactttcaccttcaccgcggtgcttatgagggcacactgcaaaggaaatgacatcaaatcatcagaatttaaagggatcaatgcattggttgttgatcataggccagtccgtgcaaaggttaccaagtatcacttgcaaagacttggagttaagaccgaactgacagctgagctaaatcagttcatttctaaattaaactctggatcactgactgcaaagctagtgctaatagacaaggaaacctggcttaaggaatcccattgcacgcctcttctggttaacaaattgaggaataatgacaagccagactctcctaagttatttcttttggggagctctgcaagttctcccaagggcggttcagatacatccagggaacataacttgaatgtaataatgaagccgcttcgtgcaagcatgcttcaggtctcactacgacgagcactaggtggggtcgataaggtgcactgcaggaatggagtagttggcaattcaacattgggcagccttcttcacaagaagcaaatcattgttgtcgacgacaatatcgttaacctgaaggtggctgctggtgctcttaagaagtatggtgccgaagttacttgtgcagacagcgggaaaaaagcaatcacattgctaaaacccccgcacaattttgatgcttgtttcatggacatacagatgccagaaatggatgggtttgaagccactagaaggattagagtgatggaaagagatctaaatgagcgaatagaacgcggagaggcgccaccagaatgtgctagtattcagaggtggcgaactcctatattggcgatgacggcagatgttatacaggcaacacacgaggagtgcctgaaaagcgaaatggatggctatgtctccaagccatttgaaggggagcagctgtacagcgaagtagcgcggtttttccaaaatcatgaccaagttgaataggaaggtttatatggaatgtaaattggtggaggatgttgccacgcaccgatcacatgccatggcacagaattttgtccaagatgctgtgttcccaagagaatgaagcacaaaaggtgtcgagatggaaccgcccatgttctgatctgtagtacaccatctgacctagaggcaaaattaactgcgcaattacatgagaacaagatacatgtgcagcaaaggtactcaaacaatttcttgaagtcaaggcgtgtgaaaatggcagctgcatattcactaactgcagaagaagcagaagtcgttctcgtagatgccctctgcctttgtaatataaacgtagggagagaaaatttttccttcttctttttttttcctcgggaattttacggtgtacatattaggtgttggtgatatgtgcaggcaattccttggtatatttggatgtgttttttttttctgcaaggtttgtggaagctgtaaatgacacaattcaaaggtgaagcctttggtttcttcc

SEQ ID NO: 16887 - DNA, 1315 bp, Oryza sativa
  ref <308>: DATABASE ACCESSION NUMBER: AK067356
  ref <309>: DATABASE ENTRY DATE: 2001-12-06
gtcccccctccgcctcgcactctctctcgctatagcctatagcgtctctcccgaatgctcgagacaccacacctctcttctctttggctcctctcctcgctgcattgcgatcccaagagctgtgagctttaggagcttgttcatcacgacctgaaaatcatggagttcgaagaccgctgccacaaggtccaggagcccaaattcgactgcctgctgtttgacctcgatgacactctgtatccactgagctcggggatcgcgtcccatgtcaagaagaacattggagattacatggttgagaagctgggtattgaggagagcaagattgagaaccttggcaatctgctgtacaagaactacggcacgacgatggccggactcagggcaataggctacagcttcgattacgatgagtaccacagttttgtccatggaagactagccctacgagaacatcaagccggaccctgtcctgaagcacattctcaagaacctgcgcatccgcaaactcatattcaccaacggcgacaaggaccacgccgtgagagccctcaagaggctggggctggaagactgcttcgaggggatcatctgcttcgagaccctcaacccgccgtgcccgtcgccgccgtgcgacggggaggccagcatcttcgacatcgccggacacttctccatgcccggcgccgccgccgacgagcttcccaggacacccgtcctctgcaagcccaacgtcgacgccatggaggaggccctcaggatcgccaacgtgaaccctcacaaggcgattttcttcgacgacagcgtgaggaacatccaggcggggaagaggatcgggctccacacggtgctggtgggcacgccgcagcgggtgaagggcgcggaccacgcgctggagagcatccacaacatcagggaggcgctgccggagctgtgggaggagtccgagaaggcggaggacgtgctcatctactccgaccgcgtcgccatcgagacatcggtgaccgcttaggccacacctactgtctctcccgactccggcgaatcgctcagaacgagcaaccatccatccatccatgtccatccctggccgggcaggtgatcatcaggtgggaatttcagaattggccgggacaacaatacgttccaagaaaaaaagaggagggtgttccgtggaagttcaggattcagaatgtaacagcaatgttggaacgggtcctgtagtatatatatgtatcggtcagatctttgcatgtaaattagtactcctagaagtaataataataatatttaataaagagaatgaggattattt

SEQ ID NO: 16888 - DNA, 3920 bp, Oryza sativa
  ref <308>: DATABASE ACCESSION NUMBER: AK067357
  ref <309>: DATABASE ENTRY DATE: 2001-12-06
gtatcgcaacgcgagcgttcctcaagaacccgacgaacaagcatgaactgcctcaccatccaccgccgccgcgtcgccccttccccaatcccatccaaaattcctccgatccccgccggaatcgaagacaggagccgaccacatcaccaccccggcggcgcatcgatcgcgtatgcgctggatgcggccaaaaaaaaatcccaaaaatcagcacggatcggagagaagttatgagtcatcgtcgtcatcatcatcccatcgcggatgcaagcgcgacaaggggaggcgtgctagggatatctccaccgcggcggcatcagtagcagcatcagcagccgtagcaatgtgaggaatccgtgcgccgttcgatctccactggctcggttcgtcactctcctctcatttttttttttgccgttacgatattaccttttttgcttgcttctggggattaattggcgttttcccctcatttttggctctattaaatgcttggagaggggatttgtgctagggttcatcacattctcgccctaacatcccagctctaccctctcctcttcctccgccgccgccgccgccgccgccaaatcgagcccgctttgcgcctccgccagcgtcctagcgtctcccttgcagcgttcaagttcaaccatgtctcatttcaagagcggctcaagggtgaagtgcacgatgcttgcagttctgtgcggtaaggtaggcaagcagcggacgccacctggtccagtgcccgagtcccagcggccgcggccgtcattcccattcctggagttgatctcgtccgggaggttggatgtgcacacgctgatcaatcctacggttgatcaatttctggaggcacaacgggctttgcagccccgcttcatatacctccagggacagctgcttgacaatgaggaagaaatcggcgcacttgtttggggcgatgctgatgtttctgatccacagacatttagttcactcatttgttcgccttttcctaccatagtttatttggaagttccaagtggagaaaagattgctcaatctcttcaatcgaaggggatttcatatataatgtattggagatattcattatcatcctatgcggcatctcattttcgccattccttattgtcagttgttcggagctcctgcagccatgcatgggatgcatttcagcttgcatatgcttcttttgaacaatactgtgtaagaaataatgacgtgcaacgtcttatgcttgggcctcatcttcttggggatgctccaaggatatatatcacccctcctggaaacaaaatggctgaggaagaagatacctctgaatactttccagacataaagatatacgatgaagatgtgcacttaaagcttcttatctgtggagcacattgcacccctgattcatctatattgaactcactagaggatggtttgaatgctcttctcaatattgaatttcggtggtgcaaactccaggatagagtcagcgctgctcctcctcttcatgttgattcagctctgttagacggggtggttacaatatgttgtgatatcactacatccagttcttcacacgtgtcactgcttctttctggcagtccacaaacctgttttgatgacgagcttttggagaagcatattaagaaagaacttattgagagccgccggttagttcgtgttgtctcggttagcgaggatgatggaccatcttcagccgagcctttgacttcaatgtccgtggcttctggagcttctacttttgaagtgttgatgaccttacctaagtgggcagcacaggttttgaaatatcttgctcaagaaacgtcttacaaaagcctggttccacttggaattgcttctgtaaatgatactccagtttcttcgttcgataaagaagatgtggatcggcttcttttcttttgcacaaaccaagatgaagatgaagctattggaaatggtctatatcaccatctgccaagatggtctgcatcccttgcgaaggacagagtgaagagaaattttgtgtcaaaaccagctaggtgaaggatacaagggcaacggcaatttgtagttgtgcaaaggtgttgccagtgctgaatgttgagagaatgcacaactcacttgcacatcaacaagcatcgcaagggcgaggctctatgttgagcgaatccaaatttcggaaagcaaaacaggctgtgcagcccaacttgatgtacctccagggtcagcagcttgagaatgaggaagaaattggtacacttgtctggggcgaggctgatgtatctgatccatagatatttagttcactcactagtccaccttttccgaccatagatgctatgtgatccgctgcggcggcagcattagcatccgcagcagctgtagcaatgtgaggaattggggagatccctgcttccttgcgcagttcgatctccactggctcgagcggcctttgcagggttcaacggttgcggatctgtggtgtttttttgttcaaccatgcctcatttcctgagcagctcaagggtgaagtgcacgatgcttgcagtgctgtgcggtaaggtaggcaagcagcggacgccacctggtccaatgcccgagtcccagcggctgtggccgtcattcccattcccggagttgatctcgtctggaaggatgctagttagttgggctaaattagcagcaattaaatcttgccagaagagcagaaatgttcccgacacattaagccggtgtttgaactgcacacaacgaggaagccagtcctgtggacacaagcaaaagcccaatatacttaccccgtagaaaatgttaggcgattttcttagggcttctataagaatttgtgggacacacatatttcccgaaacactttttaccatgcaccctacggcggcatcagcatccgcggcagctatagctatgtgatccgtgcaccatttgatctcccgtggcttgagagatggcacttcagtttcttcattcgatagacaaggcgtggatcggcttcttcttttttgcacgaaccaagatgaagatgaaggctattggaaatgatttatattccgatctgccagatggtctgcatcccttgcgaaggacagagtgaagagaagtatagctttcaattaaatgatgactgataccacattaagcttctgtttcaatgcgctgtaggactttatttatgtgacggacatttatactccgtagaaaatgttaggtgattttcttagagcttctataagaatttgtgggacacatatttccccggaacacttcttaccatgcacccgacatccgcaacagccgtagctatgtgatccgtgcaccatttgatctcctgtggcttgagaggttttgaaatatcctgctccagaaacagaacaaaagcctgattccacttggaattgcttgtgtagatggcactctagtttgttcattcaatagacaaggcgtgggtccacttcttttcttttgcacaaaccaagatgaagatgaagatattgaaaatgatttatattccgatctgccaagatggtctgcatcccttgagaaggacagagtgaagggaagtataggttcaaaaccagcgaggcagatcggttacaagggcagcgacaatgtggagtggggcaaaggcggtgtcgatgctaaagttggtgattactcactcgcacatgaacagtatgtcatagcatgggcaaggctcattgtttggcacaatgaactgcatgaaaatttggatgcgatattcaaagaatcgagctgacggtagtcatatgtgagggaatccaaacttgtagtttgatgaacctaacttatttttagtgttgatctgaatgttacttgttggtttattaactgcaaccaaaatttgaatcttgaatgttgatattagagatttttttttc

SEQ ID NO: 16889 - DNA, 2027 bp, Oryza sativa
  ref <308>: DATABASE ACCESSION NUMBER: AK067358
  ref <309>: DATABASE ENTRY DATE: 2001-12-06
ggggtttgctctgctgacggtgctgtgtttagcttcttccaccgactcctgcatagaccaggagaagagtgtcctcctccagttccttgctggcctctcaggagacggtggcctctccgcatcatggcggaacggcacaaattgctgcacatgggaaggcatcacctgtaatgcagacatgaggatcgctgatattttgctcgcttctaaggcccttgaagggcagatctcaccgtctcttggcagcctcaccggcctgctgcagctcaatctttcacacaattcgctgtctggtgaacttccattggaggggttggtgtcatcgagcagcatcgtcgttcttgatgttagcttcaatcacttcagtggagctttgcaagagctcttcattcaatcaactatctggcctcttcagcataccctcagacataggcaactgctccatgcttagagtgctcaagggtggccgcaacaacttcaagggtccactcccagatgaactattcaatgcttcatcattggagcacctttctttcccaaacaatgatctaaatggagtacttgatgatgccaacattataaagctcagcaaattgtctatccttgatctccaacagaatatattcagtggaaacatacccaagtccataggtcagctcaagagattgaaggagctccatttgggtgagaactacttgtatggggagctgccatcaactttaggcaactgcacaaatctcaaaatcctcgacctcaagatcaactacctcagtggagaccttggcaagatcaacttttccagcctatctaatctaatgataattgatcttctcgtgaacaacttcaatggtacaattccagaaagcatttatgattgcacaaatttgattgcactgagactttcgtggaacaaattccatggtgagttctcacacagaatggacagactgaggtctctttcctgcctgtcagttggttggaatgattttacgaatatcacgaaggcactttacatcctcaagagctttagcaacttaaaaactctacttcttggagggaacttcaaccatgagacattgctagcagatgaaacaatggatggttttgaaaatcttcagtacctagaaataagtggttcttctttacatggaaaaatttctctttggctatcaaagctcacaaaattgaaggtgctgcagttatccaataatcaattaagcggatcagtgcctgcctggatcaacagcctcaacttcctcttctatctagacatatccaataacaaccttacaggtgaatttccaacaatattaacgcagattccaatgctgaagtcagacaagagaaccaatctggatgtaagtgtcccaaacatgagattttacggcattccattcatcaaaaaccgacaataccaatatatccacacaacaataaacatagccaaaaatggttttacaggtgcgatcccgccagagattagtcagctgaaggcactcgatatgctcaacttgagcttcaatagcttctctggggagaccccacaagcaatctgcaacctcaccaagctggtcatgctagacttgtctaacaacaatctaacaggcacaatccctttagaactgaacaagctaaacttcctttctgcattcaatgtttacaacaacgacctggaaggggctattccaactggaggccagtttgatacatttgacaactcaagcttcactggtaatccaaagctatgtggtggtatgctcagtcaccactgtaattcagcaagagcacttcctagccctacttcatccacagatcaattcggtgacaaggttatctttggcatcacatttggcctgttctttgcttatggtgtgctattagatcagatggtactaaaaaggctaagatctcttcaaggcatattaattttccaactctatgaacagagttgaagacaagaatctagctgccacaactcaggtgtgcagattgagcattctgaatgatggtcactactcaaattcgcg

SEQ ID NO: 16890 - DNA, 1376 bp, Oryza sativa
  ref <308>: DATABASE ACCESSION NUMBER: AK067359
  ref <309>: DATABASE ENTRY DATE: 2001-12-06
gtgtccaatctcacccatcgccgacgacccacgcacgcagtccaccaacgcgccgccgccgccgaatccgcttcgctccctccgccgcgccgcgcgccacctccgtcgacgctggcccgacgcgcgcggttcgtgaaggaggaggaggaggaggagcttctgccgggtcggaccgtcggtttctctcgttgacctgcaggagggtgcgcagggtttcttcttcgacatgtcttgggctgcaatcgagaatgatcctggcatttttactgaactgttgcaacagatgcaactgaagggtcttcaagttgatgaactctattcactcgatctggatgccctcaatgatcttcagccagtttatgggctcattgtgctgtacaaatggcaacctccagaaaaagatgagcgtcctatcaaggacccaatcccaaaccttttctttgctaagcagataattaacaatgcatgtgccacccaagctatcgtttctgttctattaaactctccgggtatcacccttagtgaggagctcaaaaagctaaaggagtttgcaaaggacttgccaccagatctcaaaggattggctatagtcaattctgagagcatccgtttggccagtaattcatttgcaaggccggaagtccccgaggagcagaaatcatctgtcaaggatgatgatgtctaccatttcattagctatgttcctgtggacggtgtcctgtatgagcttgatgggctaaaggaagggccaataagcctggggaaatgcccaggtggcgttggcgacataggttggctgaggatggtgcagcctgtcattcaggaacgcatcgatcggttctctcagaatgagataaggttcagcgtcatggctatcctaaagaaccggagggagaagttcactttagaactcaaggagcttcagaggaagagggagaacctcctggcacagatgggtgatccttccgccaataggcacgcgccatctgttgagcactctcttgcggaggttgctgctcatattgaggctgtaacagagaagatcataatggaggaagagaagtggaagaagtggaagacagagaacatcaggaggaagcacaactatgtgccattcttgttcaatttcctcaagattcttgaggagaggcagcagttgaagcccctgatagagaaggcgaaacagaagtctcacagctctgctaatcctaggtgaaatcaactgttatttgtctcgattgccgtggtttttgtcaatgtagagatggctgactagccttttgttttcgcggtagtgtttgaaccatgtgatgattattatctttagttatagatattcggtcgaatttagatgaaattcaggcgaatgtcccttg

SEQ ID NO: 16891 - DNA, 1599 bp, Oryza sativa
  ref <308>: DATABASE ACCESSION NUMBER: AK067360
  ref <309>: DATABASE ENTRY DATE: 2001-12-06
gtccttccattccattccccttcttctcaacctcaaagatttcgcctttctctctcttctctctctcttcgtcgccttcctcctcctcctctgccccccctcttcgtcttcctgtcgaaatcccaatccttccaactccgcacctttgcctgcctcctccgatcccttcctccgccgccgctgctgtacggggcgtcgtcacttctttttatttaattcaaagtttctttgatccgggatcctgcagccgtctgtggagaagaagacccagtctgaatctaatccttgtggagagttgaattggggacccaaaaagggcggtttcttgtgtagctgaatttggggtaggggagttgctgtcagtgtgtgaactgtgaagggggggttgggggtggctgcttctgagaattttgatgaattctcgccgatccaggtctgtaaagctcgtgtccacgcgcgccaagcccctcgaggtcgagatcgccaaggaggacgagcggatgagctcgtcggccgacaacacggtgtactgctgcattgcaaaggggaggaagatcatctactgctacaacagcaaggatggtgacccccatatggagaccaccgccgcgctctgcctcgagaatgcgccctcgtatcaccggcattatatccacacggcggggtctaggagctatggctatctcatggccgatgggcacaccttcttcgcgatcattgacccgagtgtcggaaatgtgggtgccttgcagttcctggagcgtgtgcgcgaagtgttcagaactgtaaataggagcggcttccatgactcgctggtaccggctgtacagaggctggtggcttcgctggagaagatgccccatgcaacatttgaccttgaggaaagtgtggaaaagggagagcctagtgacagctctagctgcacctcatcgaaggttcctttgctagggagaagtgggagtaggaaggataagaagaaggctaaggagaaggcagcgtcagctgcggtttgcgaggatgagcagcatggaactaggggagtgagaattgatgtgccaccagaggaggttggtggcatgtcgctggagcggagtgcaagccagtccaggctgcgacgacagcactcatcccggtcattgtgggtgcgccatgtgaagatcatcatcgtcgtcgatgccatcatctgcatactgttgtttgctgcttggctagccgtttgtaagggtttccagtgtgtgtctagctgaggaaaagaaatcctggcatgagttgtatagctattggagaaatgagaaagctttaatttgtggtgagttttgatttgttgcttttccggaaaggtaaatactaccagccaagaaaatgatgaattgagagttgtaccagcgaaaataatgcggggggagggaggctgcaattaccaagatacaatatgttgctgatgatcagatggtgaaaatggaggctcaatgctgtaaacatgtagatagatatgcttctcctcttgtacatggcaattcgaatgtacatacgcttcaccccttgtacatgaatacatgataatgtgataggattattaaaagatttcatctgttcgtg

SEQ ID NO: 16892 - DNA, 1024 bp, Oryza sativa
  ref <308>: DATABASE ACCESSION NUMBER: AK067361
  ref <309>: DATABASE ENTRY DATE: 2001-12-06
gaccatcggtcagtcgcacagataacaccgtagtatcagacaagacctcatctcagtatccagccgagaggaaatcaaaggaagagaaggggaaaagcaatggcgggcaaggacgacgacgtgaaggtgctcggcctggtgatgagccccttcgcgatccgcgtatgcatcgcgctcaagttgaagggcgtgagctacgagtacatcgaggaggacctcgccaacaagagcgagctcctcctcagctccaacccggtgcacaagaagatccccgtcctcatccatggcggcaagcccgtctccgagtcgctcgtcatcgtgcagtacgtcgacgaggcctgggcgccctcccccacgtcgccctccatcctccccgccgacccctacgaccgcgccgtcgcccgcttctgggccgcctacgtcgacgacaagatggtccctggtatggttggcgttttgagggcggcgacggaggaggagagggcggcgaaggccgacgagacgctggcggcgatggcgcagctggagaaggcgttcgccgaggtggccgcgaagaacgggaagcccttcttcggcggcgacaccgtcgggtacgtcgacctcgcgctcggttgcaacctgcactttctcgaagcgatccgcaggttgcacggcgtggcgttggtcgacgccggcaagaccccgctcctggcggcgtgggcggagcggttcgtggaggtcgaggcggccaagggggtggtgccggacgcggacgacgccgtggagttcgccaggaaagtccaggctcgtgtagcagctgctgctgcttccaccgctgccaagtgagtggaaaatcgttttcgattggatcattgggtttcttgtaataaagaaaaaatcgtgttattacagtgccattttcaagtcatggttagtttatttgtggggttattaatgtgtaaagtctggacatgtatgcgtgttatgttctctggttcatcgatcataagcagctatacagacatacagtgctagtgctattgcc

SEQ ID NO: 16893 - DNA, 2130 bp, Oryza sativa
  ref <308>: DATABASE ACCESSION NUMBER: AK067362
  ref <309>: DATABASE ENTRY DATE: 2001-12-06
gggaagaccagaaaagtctggactctggaagaaagaaagcggcgcggcggccggcggggcacggcacggtggacatcacagggaaggagaaacgcttcttcccgttgttcccaaatcccaatccgtgggagcgcagtcgcaggccaacgatcgagtggagtcgagcacaaggaaaaggaacgcatcgccatcgccatcgccatcgcctccctccctgtcctgtccagctcacctccaaaccctccatcttcttgatttactatacttgattccgtacaaccgctcatggataaagagccaaccatggaggatttgccttcaacgctggggcagccttctacttctgcatcatcggttgatgctagatattcagccgacaggactgaagattcacagctcttcctctccgtcccagctttaaaccaagctgcgtcttatctggcccagacggcctcatatcttacccagtgcctccctgtatctggttacacagctatttctgaggaagggcaagaactagcaactctgccacctgcgtcaactgttggtggatcctcttttcaggcttcttccgaacagtcagcagactcatctcctggtgaaattgataatactggaagctcatctcaagaaatcacagaacagatggcacctttgcgcgtcttccagaatggggcttcactgtttcaaggtcttgtagaacgtgctcggaaaactgttcgtggctcagccaatgatattggatggcttcagcaggatcaaagcttacctccaactgaggacggaactgccagattcttggaaattcttgatgctgtgagaaaaaacgaacacaagctgcctgattcgatggtctatctgttggttccaggtttgtttagtaaccatgggcctctttactttgtcaagacaaaatcatatttctccaagatgggtctggcttgtcacattgccaagattcacagtgagtcttcagtaagtaaaaatgcaagggagataaaggaatatatagaagaaatatactggggatcgaagaagcgggtgctacttctcggccatagcaagggtggtgtagatgcagcagcagccctctccctttactggccacaactgaaagacaaggtcgcaggtttggctttagctcaaagcccatatggaggaagcccggttgcttcagatatcttgcgagaaggccagcttggtgactatgtcaggttacgtaaactcatggagattttggtatcaaaagtccttaagggtgatcttcaggctctggaagacctgacatatgagaggaggaaagaattcctgcggcagaacccattgcctcctgaggttcccattgtctcgttccacacagaggctagcatcactcccagtgtgcttacagccctctctcatgttgcacacttggagctcccagctgcagctgatgggaatcctactaggatcccagttgtaatgccactttcagctgcaatggcagcatgctcacaacttctggtggcaaggtatggtgagaagagtgatggtcttgtgacaaggaaggatgctgaagttcctggatcagtagtggtccggccagagcggaagttggaccatgcatggatggtttattcctcactcaatgaggaacctagggatcaggcagacacatcgcaggtatgtgaagccctgctgactctgcttgttgaggttgcgcagaaacggaggcatgagatggctatgaaagatgaataaaaatgttagtgttgctctgacagatatttgtaatcgtagacttctgttgttgaatgtactgtccaaacttatgctgaaactgcttctgggccacttttttttgtttggtttacagaagcttcatatatcaactgaatctgaaaggtgaaaagggcaacaatggaagcgtttctctttttttttttaatttaccataaggaaattgtatgatttggtcgtttctcatgtctcatggtattccccttcccaatcaggtgattcgtctactaggtctgaatttgattatggttgtaagtgtatttaggcatgattccatgagtcatgggtatgcaacagcttgagatcgcaatgtatagaactctttatatcctagtctgttgcagattcttc

SEQ ID NO: 16894 - DNA, 3984 bp, Oryza sativa
  ref <308>: DATABASE ACCESSION NUMBER: AK067363
  ref <309>: DATABASE ENTRY DATE: 2001-12-06
gaggtttgaggcacactgcgaagaatcaaagatggagaaacatgcagtagcattagcagcattcacttttctagccgcccccctgctgcagctgctgttgtttgtcgcggggaacggcagcagctgcaccaccagctgcggcaacgtgagcttcgagtacccgttcggcgtggaggccgggtgctaccacccggggttcgatctcacctgcaaccactcgtacagccgcccaggctgttcctgggccaagaaagcagcaccatgcatcaggtgctcgagatctccatccccaacggcaccgtgcgcatcaacagcagccgcatggtgtttgcgtctgccgttttagagaacagcaccaccatgcggtgggaggtgggtaaatcctacttcctgtcggatttaaacattatagcgttggtaggatgcaacgcccaggtctccctccgcgattggggcgatacactcgtcaactcctgcatcacgtcgtgccctctatcactcgactccggtaatggctcctgctcaggaattggctgctgtgaggcaagcattgctatgcacataccggtctacagcattagcgccaaccaagtggtggacccgggtgcaggacctgaccctaatgaaccaaattttttcgtgtacatagtagatcaggcgtcgttttatttcgacaccaacatggttactaagggcatcagcaatactcctgaagcgctcccagccatgttaaactggcttatactcagcaattcatcagcgtgctcggcatcgaccaatgcttctgcaccttcgtctgcccccgaatgttgcagcgccaacagcttctgcaaaggttacaacggtactactgctgactacgatgggtatcggtgctactgctccgatggctatgaaggaaatccttatgttgatggtggatgccgcggtaagtatgtagtactacctccgtttcagattataagactttttagcattgtctatattcaatagatgttaataaatctagacacacatatatgtctacattcattaacatatatatgaatgtgggtaatgttagaaagtcttataatatgaaacgaaggaagtacataatatgctctagactcttctttcaatattttttttatttgtaattgtatttcaatattaactctaaactcatcatttaatatttcttattttataattttgaattttatttattctaaattgtatttctatatcaactttatactatttttccaatatttcttattttacttatatctagattgtatttatatatcgactccatactatttttccaatatttcttattttacttatatctaaattgtatttctatatgcactttaaagtctaaaatacaattttaattttattatattttattctgaatttcagttagttctaaatttctatatggactttatactattcttcaatattccttttttaaaaattttgattttttttttgttatttctaaattgtatttctatatggactctacccctttgcctttaattttcttttttttaattccaaattttagttggttcaaaattgtatacaatatggactctagacacctctttcaatatactccctctattttaatatatgacgtagttgactttttttatgatacgttaacaattctttttttagaaaaagttgtgtaattatcatttattttattgtgacttaatttttcatcaaatattctttaagcatgacttgaatatatatttttatatttacacaaaattttgaataagacaaatggtcaaatatttgttaaaatatcaacagtgtaatatattaaaaaaggaggtagtaccttatttcttaattccaaatttcagctatttttaaattgtattttctacatggactctattttttttccgattaatatgagaaattctaaaccatgagaacgaacgtggaggtttttttccctgttactttaataagttaatagattgaccggggatttattccacacctcagcaagtgtggaattaatcatttccaacaagtctccttctattttcgtgagatgagattaactgaacaaactaggctttaactatttataagtgaaaaccgactaacctttgctatcggttttgtccttgattggtggatgctatcaacttacattaagttttatatttattactttcttacagagttattacagtagaaagacttagtcatatttttactgtaaaaagtctaataacgtataccctctgtcttaccggccgacatagtggtaataagtgcgttcttattttagtctacccttctcttatttaatctaacttaatttgttctgttcgtctagatatcgatgaatgcaaatctccacacatctacccctgttacggcgactgcaaaaatacacgaggagggtatgattgccagtgccatcatggatacaagggaaacgcttcgatactgaatggatgtcaagatattaacgagtgtgcggaaccagaaaaatactcatgctatggtggactctgcataaatacgccaggagcttttgtttgccgctgccacgacggaagctacggtgatcccttcacaaaaggagggtgccgttcatctaaaggtttgaccattggtctaatagtcagcggtggttcagtccttctacttctagggcttgctgctcccttcatagttcgcaaggtcaagctacaaagggtaaagaaaatgagggataaattctttatgcaaaaccatgggttattattacaacagttaatatcacgaaacacagacttcgccgaaagaatgatcattaccttacaagagcttgagattgctacaaacaattttgacaaatctcgtgaggttggtactggaggacatggggtcgtgtataaagggattatagatctacatgttgtggccatcaagaaatcaaagattgttgtgcaaagagaaatagatgaattcataaatgaagtcgcaattctttcccaagtgaaccatagaaatgtggtaaagctcctcggatgttgccttgagacagaagttccattattagtttatgagttcatttcaaatggaaccctttaccatcatcttcatgttgaaggatctatatcattaccttgggatgatagattaaggatagctcttgaagttgctagagctctttcatatctgcattcatcggcatcaatgccaatattttatagagatattaaatcttccaatatacttcttgatgacaacctaacagcaaaggtatccgactttagagcttcaagatatatctcaatcaatgaaacaggaataactactgcagttcaaggaacgattggctacttggatcctatgtactattatacgggacgacttacgagcaagagtgatgtttttagttttggtgttcttcttatggagctacttactcgaaagaaacccatcggtggtacatttgataatggcgatggtcttgtttcacatgttatctcacttctctcaaaaggtaatctttataatataatagattctcaagttaaagaagaggaagatggagaagtcctagaagtggcaacactagccacaacatgtactaagtttaaaggagaagagcggcctacgatgagagaagtagagatggcactggaaagcatagtttcaaagaaaagctccttctgtaacaagaacagtcaatcaagtagtagatccgatgaaaatcgaattttagctctttacatgtcgatcgaaggagttaccaaggacaaaacaattacaattacagaaagcagcacggaaggggaaataccattgtcgtcaaggttttctcgataatcattctctgtcctgaacgagaacgccttgcaagaaagccggaaacttagttacatcgatcctgttctgttctaaatgattgctaaagtaattttgctgtaaaacaataataatgcaacagaaaaattgtgtcgtatc

SEQ ID NO: 16895 - DNA, 1391 bp, Oryza sativa
  ref <308>: DATABASE ACCESSION NUMBER: AK067364
  ref <309>: DATABASE ENTRY DATE: 2001-12-06
tctttggagattggaccccgccgcatctccacgtctccttccgccgccggagggggatccgactgcgtcggcggtgggggcgagcctggaatccctcctcgccgccaagggggtccagaccctcaccctctcgttctgggactacagcgatgtcaatgtggagtactacaccctccaccccgccatcttcgcctgcggccagctcaccagcctccacctcgagcgctgcttcctccccaccgcgcccgagggcttcggagggttcccgaatctcaccttgttgagcctcgtctacgttggcctcccggagaatggggagaggaaattggaggccatgatccgcatgtccccgtcgcttgtctcgttggagcttagcaatgttgaggttactaatgacgactttgaggattggataattcaggctccgaatctcgagaggctgactattacttccgatatcgattacggatggcagatccaggatcttccatctatacaagatgctaatatcaatattgaagactactcaattgatcgcgatttcgtcaagcttctcacatctttggcccaagtcggggagctcgagttgtttataccgtccgcagatggtaatgttctagagggaatttcatgttcttttcagaaattaaggagtttaactcttcatacaaacttctacaaagcatctagcattttatctacatttggtttactcacgagagctcccaatcttttacatctggaaattgagatcacagatcatgagaatcagagcgatgaagtagatatagattttttaaatgcactgtggaccaacagtctttttgcaaatcttgattttgttagcataaagagtgccacttgctggtcaaatgagatgcgctttattgaatttgttctatccaaagcaagattacttggtgaattttatatttatcatgatgatactggttcatactcgaagcctagagaagaggcaattattgagttagcaaaatataaaagagcatcaccaaaggcaaaagtattcttcagggatatggaggatacatggctgtactcatgagaatcgagactcagagaagcactctttgcacctttgatccacaggaggttcacatggtcaattataccaagttactcatacttccgtacattcctgaaaatgcttcagataatcatggcgtgattattcattatctttctcaatggaaagtcgtctcttgaataaacatgagtgattacagcactcagcttcgatcgattggcaaatctgtatatttactggagatggggcattccatcctcctcgtcgtagttgtagcacaatcttacaagtcgcatgagttgaccctataccgcaaactatatactatatgttggttgtgtgc

SEQ ID NO: 16896 - DNA, 1647 bp, Oryza sativa
  ref <308>: DATABASE ACCESSION NUMBER: AK067365
  ref <309>: DATABASE ENTRY DATE: 2001-12-06
gaatggccgccgcctcctcctctgccgccgcctgcttcctctccccgtcccctcctccccgcccgcgccaccattccatcaaacacctcgcgtgcgccgcctccaggtcgccgtcgccggggccctcctcctcccgctccctcgccctcccttcgccttcggcttcggcttctccgtggccgtggccgcggcggctccgcgacctgctccccgacgagaccggccggatcctgtcgtccgccacgggctccctcatcgtcgccctcgcctcggccgcgctgatcctcggcgacgccggctccgcctccgcgttcgtcgtcgccacgccgcggaagctgcaggccgacgagctcgccaccgtgcgcctcttccaggagaacacgccctccgtcgtctacattaccaacctcgccgtgaggcaggatgccttcacgctggacgtgctcgaggtgccgcaggggtccgggtcggggttcgtctgggacaagagcggccacatagtcaccaatttccatgtcatccgtggcgcgtcagatctcagggtcacacttgctgatcagacagtgtatgaagcgcaagttgttggattgaccaggataaggatgttgctgttttgcgtattaaagcaccaacagataaattaagacctgtaccagttggtgtgtcggcagacttactggtcggtcagaaagtatttgccatagggaacccgtttggtcttgaccacactcttactacaggagtcgtcagtggattgcgtagagaaatcagttcagctgcaacaggacgccctatacaggatgtgatacaaactgatgctgctatcaatcctggtaacagtggtgggccacttcttgatagctcaggaaacttgataggtgtaaacactgctatatactcaccttcaggagcatcatccggtgttggcttttccattccagttgatacagttggtggtattgtggatcagcttataaagtttggtaaagtaacaagacctattctagggataaaatttgctccagatcaatctgtagagcagcttggattaagtggagtgcttgtcttggatgctcctccaaatggaccagcaggcaaagcgggtctgcaatcgaccaagcgggattcctatggtcggcttatcctaggggacataattacttctgtgaatggaacaaaggtaacaaatggaagcgacttgtataggattctggatcagtgtaaagttggagagaaggtgactgtggaagtattgcgtggagatcaaaaggagaagatacccgtgattcttgaaccaaagccagatgaatcataatagtaagccacctccataggatccactctactgtttgtatgtccacatagatgcagaaatggaatatatacaagaaattagcattttcccctaccacggaattcgctgtacataattcatgcttgtaaattttctggcaaaaagagaaaatccaatttggcttatttccttgtcattcatgcttctggtgtaaccgcctcagtagagacgtgtcatacgtgatgtctctgttttcctgtattttggtgaggaccatgtacagcagagactatatagtagaccccacactgctccgtaagtctacttaacatggcctaccgtatttacactgc

SEQ ID NO: 16897 - DNA, 2734 bp, Oryza sativa
  ref <308>: DATABASE ACCESSION NUMBER: AK067366
  ref <309>: DATABASE ENTRY DATE: 2001-12-06
ggaaaaccccaccgcgacctcgccggccttcctccgctccggccatggaagccttcgccgccgccgccgccgcggccggcgtcttcgcgggcgccggcgcagctgcgcgccccgtactgctccgccgcagaggtgccccccggtccggccgggtgcgcctcctccgagcgccgccgcgcgccggtggggacagaggaggggacctgcccccgctcgacgagtgggacaggatggagctggagttcgggcgcttcctcggcgaggatcccaagctcaccctcgccaagatacttctcaagaaagcagacccagatgcttcatcgctcgatgtagagaatctaattgccaacaaaaaggccaagttggatgatattttgagggagtttatggatgctaacagacaggaacagacttctgaatcaccagaggaaacaagcaagccaatggtagacaaaaattctccaagcatgtcaagacctgttcagaccaatgcaaagcaagatgagcctgctttgactctgctgcgaccagcaggaagcaaattgaagcaagatgatcctcctttgactttgcagcgaccagcagggagcaaacccaagcaagatggtccttctttggctccattacgaccggtagggagcaagccaaaggaaaataacacttctttaaccttggtgcggccaatgggaagcagaccaattgtccggggtaaaccggtgcaagatagttggcctagcaaggggagcttagctgccagaagagagtcgagcgatgttggcagcacctcaagaaagaacaatgtggatgtttccttgcggaaacccaccatacatcagagtgatgatgatgaattgaagtcgaagctgaatctgaaaccaaatattgacttgaaaatgaggaaagatatggacgaggatttggccaacatctctcttcttcaaaagccagagctttcagtagataatatgaattcaaatcaagagaagtctgatgctggacctgcctctgttgcttctggagaggataatggtgcagttgacccagaaacaaatggtcttgatgaaagagtagtgattgacagtattaatgatcgtgagtcatctgtgcttcctgatgatcttagtgcagaattacagccatctgagcaaaattttaaccgagaaggcgacccttctgtggtggatgatcaatcagccgtcagcagtaatttctctatgcaagctttcttgcaaggaaaacctaagatgaaagacttagctgttgaaacatttccatctcaagttgatgctgagaagatgaatgccagtgagaataacatgaattatgttgatgatggaggcaatgtgttatcatcgaaattagaggacatcacagagagtgactggacaaggctggagaattatgcaagtaccggagaaaaagttgaggtggagctgataaactgcagctcgaaaggatttgttgtatcactcgattcattgataggtttcttaccgtatcgcaatcttgctacaaaatggaaattcttagcttttgagacttggttaagacaaaagggtggcgatccttcactcttcaagcagagtgtgggcatagaagaaagttttgaggtcaatgacaggaacatagaatcagtatctagctcagattcagaacttgctgtgcaggatcaaggttctatgccatctaaggaaaaatttgaagatcttcttcgaacatataacactgagaaatctaaattcttatcatcatttatcggtcaaagactccgtgtttcagttgtcctggctgacagaaaatccaagaaaatatttttctctatgaagccaaaagaaagtgaagaattgattcagaaaaagaaaagtctcatggctaagctcaatgtgggagatattgttgaatgcactatcaagcgatttgtttactttgggatatttgttgaggttgaaggagttcccgcattaattcagcagtgggaagtgtcttgggatgaaaccttggacccatcagtttcttacaaaattggtcaggttgtggatgctaaagttattcaactggactataataataaccgcatatttttgtcacttaaagatgtaaagccaaatccttcagtaggcgcattggaagctgtcattggtgaggaactatcactgggtggagctcttgaacctgcagaagcagattttgagtggcctgaagtggatgctctcatggaagagatgaaaaatattgaggaagttagggatgtttataaaggacgattcttgcgaagcccaggactagctccaacctttcaggtgtatatggcacctttggttggtcagaaatataaactccttgcacgctatggaaataatgtccaagaggtgatggtggagacatcattagacaaagaacagttgaaagaggcagttttagcgtgcacaaacagggtgagctgatgatcagcgtctccgtgctgtagtatttttccttcttttagcttgcgaagcagatggttgtacagaattgttgtggcagtccaattttgcatccttgtagcatgcttttgagtcgtttacacctgattttcttccttttcaagttgaaaataccaggtgatatgtagtcctagctcaactttgtagaggatgacaggtgtaaatcgccttgatacgttactacggaattgcaacagaattcgatttgcatctttcacggtgctagaattaatctaccatatttttgttcg

SEQ ID NO: 16898 - DNA, 3861 bp, Oryza sativa
  ref <308>: DATABASE ACCESSION NUMBER: AK067367
  ref <309>: DATABASE ENTRY DATE: 2001-12-06
gatggcctctccctccctcctaacccgtttccttccagataaggctatataaatacccatcatctccttcctctcttcctcgctctccccacccctctcggcctctcctcggtggtcgacggcttcaccggaccggaccggaccacagctcgccgccgggcacccccgcgccgcggtctgtatgtcaaagggtacagaaacaatcaatattctgatatagttgctgggaatttcaatccctaaattcaaaatgaccccggtggttcattgctctgttggcaatatcagcctgttccacatcggcagtttcaggccaagccatgaaatccaaataaggaggttccgcagcacagagaggtattcaagagtaccttcacgtaggctgctgcaaccgcaacgagcattcaacttgatcagtatttacaagagaagcagctggtcctctgcccgcaggccaagaactctgtcagcagcaactgttgggactgatgttactgtagaggatccgaatccaccaccttccggagaaacttctgaagaaagctctgaggatacagcacctgacactgctgaagcaagtgagcaagctgaggcaagcacttcttccattcccaaagcaggacgaaacataagaaagagtgagatgccaccactgaatgatgaggatctagttcctggtgcatcttttactgggaaggttaggtctatcaaaccatttggtgtatttgttgatattggagcattcactgaaggccttgttcatatctctcgagtaagtgatggatttgtaaaagatatatcttccctcttcactgtcgggcaagaggtgtcagtgagattagtggaagcaaataaagagacagggcgcatctcattgacaatgcgaacaggtggtgattttgtcaagcctaaaacagaaacacctaaggctgcaagtggcgggaggaataccactgcaaccacgtccagaggctcgccaaggcaaacgagggaaagagatgaagccaagagcatgggcgaaacaaactatgtgcaaggacaatttctggatggcgttgtgaaaaattcaacaagagcagggtcatttgtgaccctacctgatggaagcgaaggattccttcccagagaagaggaggcagtggcattgttcacccttatcggacattctgcactggaagttggtcaacaggtaagggtgaaagtattgaacgtagtacgaggccaggtcacgttgacaatgaaggagggagaagatgatgaagaggatctggcttcattaaacacacagctgaagcagggttggtccagagggaccaatgcatttgagctagctttccgtaggaataaggaaatctctgcatttttggatcagagggaaaagataatagttccagatgtacaagaagctgctgttgcatcagtaggtactgaacttgatgcagaagtaggaattgagcaaagtccaggcaaggaacctgagacaggcaatgctgaatcagttgcaatcgatagttctataacggaggtcaaggagactgatagtatagctgcagtggagaaggatagcgaaattagcaagactgaatcagttgagactgctagttcagttgtaatttctgaagatgatagcacagttgatggcaaactcgttgaaccaactgcttcagtttctgcaactgaaactgagattaaagaagatagctctgagggatctgtcaccactgagcctacagaagctgcttcaacagaatttgtcaccgcagtcgttgaggaaagcgctccgactgctagttcagttgaaacttctgaagatgatagcacagttgatgacaaactcgttgagcctactgcttcagtttctgcaactgaagctgagagcaaagaagatagctctgagggatctgttgcttcaacagaatctgtcaccgcagtcgttgaggaaagcgctcctgtgtcatcagtagcaattgaagttcctgctcctgaagcatcagaggcctccgctcaggagataattgaggattctactactgtggaaggtgccgccgatgatcaaactgtagaatctgatagtccacctccagaaggtgttgagctgtcctcgaatggggctccagacagctctattgctgaggataagcctgatgaaccagaagaatcgttgatagtagaagaggttccagtaactgcaagtagtgagtctgaggataaagaacctgctgcggtacctgaagaagtagcagcctcaagtgagaaaactgcagatgttgctgttgcaggagctgaagcaagcacggccacagcaactatttctcctgctcttgtcaagcaattgcgtgaagcaactggagcaggcatgatggactgtaagaaggctcttgcagaatcagggggtgacattgagaaagcacaagaattcctccgcaaaaaaggtttggcggctgctgacaagagggctggcagggccactgcagagggaggaattggttcttacatacatgacagcagaatcggtgttcttattgaagtgaattgcgagactgactttgtatcccgaggtgacatcttcaaagagttggtagacgatctagccatgcaagtcgccgcttgccctcaagtacagtacatttctcttgatgacgtccctgaggaggttatgaagaaggagacagagctggagatgcagagggaggacctcttgtcaaaaccagagcagatccggtctaagattgtagagggccgtgtaaagaagaggcttggagaatatgcattgctggagcaacccttcatcaagaatgacaaggtcacaatcagtgaatgggtgaagcaaactattgccacaattggagagaacatgaaggtcaacagatttgtccggtacaatctcggtgaagggttggagaagagaagccaggattttgctgctgaagttgccgcccagacagccgcgaaggcaccgccagctgctcctccaaaggatgataagcctgaggaaacagcagaaactgaagagaagaaaccagctgtggcaatttcagctgcattggtaaagcaactccgagacgaaactggtgctggtatgatggactgcaagaaagcactagctgagacaggcggcgacattcagcaggctcaggagttcctcaggaagaagggcctgtcatctgcagacaagaagtcctctcgcctaaccgccgagggcctaattggcgcctacatccatgacaatcggattggttgcatgattgagatcaattccgagaccgacttcgtggctcgcaacgagaagttcaaggagctggtgaacgacctcgcgatgcaggtggtggcatgtccacaggttgagtatgtctccatagaggacatcccagagagtgttgtcatcaaggagaaagagattgagatgcagagagaggaccttcagtccaaacctgagaacatcagggagaagatcgtcgaaggccggatatcgaagaggctcggcgtgctggccctcctggagcagcctttcatcaaggatgacagcaagacggtgaaggatcttgtggaggagacgatcgccacccttggggagaacatcaaggtacggaggttcacccggtacacccttggtgagaactgattgaggaggtgatctctagtctcaatcctgacatcaggagttgggcatattttgattcatggaagttcatagctgttggtagtatgataagtttccatctgtaattctgtatcacctgttatattgctgcccctttttttcagctgctgttattactgttgctggttacagaacacatttttgagcactcctttgtagatgacaagagagatcaatattgtcaatataaacattacggc

SEQ ID NO: 16899 - DNA, 1321 bp, Oryza sativa
  ref <308>: DATABASE ACCESSION NUMBER: AK067368
  ref <309>: DATABASE ENTRY DATE: 2001-12-06
gtggcccccggccaagtgacgagcaaaacccacccaaaaaaaaaatacagcggagacgcgcgacggcggcgcagttccccgctccgccgctccgtgctccgacctccggcgaccccgggcaccggcgagtggccccgacggccatccagcttgtcagcattattaggcctcgaaacctaccttccacatccacgccattcttctccgcctcctcctcctcctcctcctcctcggatccctcgcaatggcggcgccgcctcagcccgtgccggcgcccgcggccgcgtcgccggaggtgttccggctcgggttcatcggcccgggtaacctcgcggagagcatcgctcgcggcgtggcggcgtcgggcgtcctcccggccaccgcgatccgcaccgcgccacaccgccgccccgagcgcgccgaggccttctcatccatcggagctcacatcttggagaccaacgcgcaggtagttgatgacagtgacgtgatcgtcatctctgtgaagccgcagatcgtaaggcaggtactggttgagctaaaacccttgctgtcagaagaaaagcttctggtgtccattgctgctggcatcaagatggaagatctgcagggttggtctggtcatcgaagatttattagagtaatgccaaacaccccttcagctgttggacaagcagcatcagtgatgtgtttgggggagatggctactgagaatgatgaaaaccgtgtaagaagtttattcagtgccattggaaaagtttggacagctgaagaaaaatattttgatgctgtaactgggctaagtggtagtggcccggcttatattttcttagcaatagaggccatggctgatggtggagttgctgctggtcttcctcgggatcttgcacttggtcttgcatctcagacagttcttggtgctgcaaccatggtaaacaagactggaaaacatccgggtcagctgaaggatatggtcacttccccggcaggaacaaccataactgggatacaagagcttgagaagggtgcataccgtgggacgctgataaatgccgttgttgctgctacaaagcgttgccgtgaactttctcagagttaatcctcttgttagttgttagtccattggatgtgcgactctgcgcacgatttcccctagggaagaggatgtgcgaatattgatatttaaacctgatgaggctatcagcaaattttgcttgtagttttatccgaataatttgctgcactttagtggcacgaaatctggatgatgttagattgatacttattctggcagcagctgtttttgatcgtttttgttggg

SEQ ID NO: 16900 - DNA, 1208 bp, Oryza sativa
  ref <308>: DATABASE ACCESSION NUMBER: AK067369
  ref <309>: DATABASE ENTRY DATE: 2001-12-06
gctccgtcgcctatggcggcgcaggcggccgacctgtcgctgacgctggcgccgtcgggagggggtggtgggggaggaggaggcggcggcggtggtgggtcgtcgtcggcgtgcatcgacggcaaggacgtgcggctgttcccgtgcttgttctgcaacaagaagttcttgaagtcgcaggcgctgggcgggcaccagaacgcgcacaagaaggagcggagcatcgggtggaatccctacttctacatgccgccgacgccgcaccccgccggcaatgccgccgccgccgccgcggcggcgacgcccggtgggatgtcgtccgtcacgacgccatccgggagctacggcgtcgtcggtggtgccgccgtcggggctactgctggcgttgggggcggaggtggagtgggaggggggcttctcccggcgcacgcgtacgccgggcacgggtacgccgcggtgccgacgtcgttccccatcgcgtcgcacagctcgagcgtggttggctccggtgggctgcagtactacgctggtaccgactgcggcgcggcggcggcgggtgcggcgaagacgacgacgacggcggcggcggcggcgacggccgtggcggggagcgagagcggcgtgcaggtgccccggttcgcgacgcaccagcaccatctcctggcggtggtgagcagcgggcgcgcgatgctggcggcgcccgaccagccgggcgccgggcgcgacgacatgatcgacatgctcaactggaggcgaggctcccacggccccaccgcctccgccgccgccaccacgccctccccggcaagcaccaccaccacgctcaccaccttcgccagcgccgacggcagcaacaacggcgaggagaacgaggagctcgacctcaacttgagcctctagctcccaccaccaccacctcctcctccgccgccgccgccgccgccgcgcaatccaagaaggcaaggtcaatcaatcgccatgttcttcttctccaagctccacctactcctcttccaattcctcctcgtgtgtgattaatccccctcttcttgctgcctgcgtacgtactccttaattaattagctcttagggacgttaattaatctcagttcttggctctcttctcctctcctctcctctcctctcatctcacttgtatgttaatgttagtactccttgtaatcgatcaatcagtcctctttttttgc

SEQ ID NO: 16901 - DNA, 1203 bp, Oryza sativa
  ref <308>: DATABASE ACCESSION NUMBER: AK067370
  ref <309>: DATABASE ENTRY DATE: 2001-12-06
gaccaagcaaatcaatggctagagaagccgcctcactccaccatcctccactgtcgccactccaatccccgccgccaccttcgtatcatcacccgtcggctagggcgcacggacgagcagcttgtgggcgccacgccgctcggacccgtgtgccacgggccacagccgcttcgccacaacctcgtcggccatcgctttgccgccacactcctccacttcccatcgccgcctcgacctccgctcggccgaaggaccctcggggccggtgccgccgcacacagccacatcggccacgtgagcagctcccgcgaacgcctccatcaccgcccatccgaggggctactgcaacctccgccgccatcgtcaccttgatctgggtcaccgccgctccgagtggagtaccgcctgccgcaagcgccgccccgcgcgcggccaagtcatcccgcacgcctccgcccttgcgcgtggcggcgtcaccgtgccgggacgaacgccgtcaccaggtcgccgaccacggacacggcctcctcttgccgtctccctgatctccaccgccctccctccaccacgctggccggccggagctcagccgggcacagccccgccgacagcgccgaggcagtctcctcctcgtgccgccacctcctcttctccgccgtcgccgtcgtccctggctcccggacgccggccgtgccgccgcgccaagcgccgagcgccgtcgtgccgcctcttgccacgccgcccagcccgagcagccagcgccccagcctccctttccccaccggcgctgctcccttattccactctcttccccccatcgccgtcccgttccgactgccgtcgttggcgtcttcctctcaggcacgcgtgaagaggcagaggagagaccgagagagagatgtgacgagaaaccgagagtactccctccgtcccataatatgaattttgagttttttttttgttacttgtaatgtttgaacactcgtcttatttaaaaaatttatacaaatataaaaaataaaaagtaaataataattctaaaaaagtaaataataattctaaaattttttgaataagacgagtggtcaaacactataagcaaaaacttacggagggagtagtagataagaaagagagagaaggaatacgaaagaaaagaaaaaggaaaagggggccgtgggacccacctgtttgaccccttgg

SEQ ID NO: 16902 - DNA, 3560 bp, Oryza sativa
  ref <308>: DATABASE ACCESSION NUMBER: AK067371
  ref <309>: DATABASE ENTRY DATE: 2001-12-06
tggctgccgctgcatgcatctgcggagtttagttgggacgtcgtggttgcgaattaggatggtgttactgtcaggtttcgttggcctgatgttgctgagtggcagatgtgttatttgtctctagtttgattgattttgatcgcacagagccattgcttgagcacaaaagcgactagctaggcaggttgttagaggcagaagaagtaggtacaagtaaacgatacaaatggggtgatcttcttttctgaagaactttcatgtcacttgcatactgttaccgtcaaatttggccatctgtttcagttttcattgatccaactttcattaagcaacggagtatagagaaccggagtgatttgttttcttgatattggggaattttctgaaccccatgtaccaaactgggcatgcatatgcaaacacccaaaacctcgtgcttcaaaaagaggaataaatgatatctaacatcataaacaatggtggtattcataaactcttcttttttcctagttaggatcctgaaattttggaattttgctgtcgtggatatgactagttgctgctgattatcttgaagacatgatcaatttcggaggagtactctgtgcagttacccttgtggtgttgctccccttcttagaggctgcagatggaaaatctactgatccttcagaagtcagtgcacttatggctatcaagggaagcttagttgatcctatgaacaacctcaagaattggaataggggagatccatgcacaaaaaattggacaggggtctcctgccatgatttgggtgatacatatcttcatgtaacagaactgcaactgtttaggaggaacctctctggaaatttggtaccagaggtcagtcttttatctcagctgaaaatattggattttatgtggaacaatttaacaggcaacatcccaaaagagataggcaatatcactacgctcaaacttatattattaaatggaaatcagctctctggtcttttaccagatgagattggcaaccttcaaagcttaacaaggttacaggttgaccaaaaccatctatccggcgcaatacctaaatcatttgccaacttaagaagtgtgaagcatcttcacatgaataataattcattaagtgggcaaatcccgtccgaattgtccagactgaatacacttttgcacctccttgttgataacaacaatttgtctgggcctcttcctccagaactagctgcggcaaaaagcttgaaaatacttcaggctgacaataataacttcagcgggagttccatccctactctgtattacaacatgtccggactatttaaactgagtcttcgaaactgcagtttgcagggtgctattcctgatctgagtgccatacctcaactggactatttggatcttagctggaaccagctgacaggatctatcccaactaataagcttgcttcaaatatcactacaattgatttgtcacataacatgcttaatggaactattccatcgaacttttcagggcttccttatcttcagctattgtcacttaaaaataatcttttagatggttctgttccctcggaaatttgggctggcgtcaaccctaacagaaacggaagccttgtactggacttccaaaataattctctcaatatgcttccagctgaaattagtcctcctccaccaaatgttactgtcgtgttatatggaaatcctatatgtgagaattctagtgaaactctgataatcaacctttgccgcctccagtcaataaacctggaaaaatctaaacaggaaacaagcactgccatggtttgtggagcttgcccgacagaaaaaaattatgagtacaatccttcattctcggaccaatgtttttgtgcggtgccacttggagttggacttcggttgaagagtccaggagtcacagactttcatccatacgaaaatgctttcaagattgacctaacttctttgttgcagttgtttccttaccagctatatattgagaactacatatgggaagttggtccaaggctaaatatgcacctaaagttatttccaagcaatacaagtttgttcaacatgtctgaggttgtccgactcagacacgtacttgctggatgggaaattacacttttagatgtatttggtccatatgagcttctcaatttcacacttggttcctatgaagatgaatatccaaatctagcttcatcaggtttaagcaaagctgcactgggtggtatcttggcaagcacaatagctagtgctattgcactttctgcagtagttactgctcttataatgagaaggaattcaagaactaatagaatttcaagacgttcattgtcgagattttctgtcaaaattgatggggtcagatgcttcacataggaagaaatggcttctgctacaaataattttgatatgtcagctcaagttggtcaaggaggttatggaatagtctataaaggaattctagctgatggaacaattgttgcaatcaaaagggcacacgaggattctcttcaaggttcaacagagttttgcacagaaatagagctgttgtctagattgcatcatcgcaatctggttgcgttggttggttactgtgatgaagaaaatgaacagatgctagtttatgaattcatgccgaatggcactttacgtgatcatctttctggaaagtccaaaccacctctcggttttggtttgaggctgcacattgcattgggtgcttcaaagggaattctgtatctccacaccgatgcagatcctcctatatttcaccgtgatgttaaggccagcaatattttgttggattctaaatatgtcgccaaggtagctgacttcggtctttcgaggcttgctccagtaccagatgttgaaggggctttaccagctcatgtctccaccgttgttaagggcacccctgggtatcttgatccagaatacttcctaactcataaattgacggataaaagtgatgtgtacagccttggggttgtttttcttgaattgttgaccgggatgaagcctattgagcatggtaaaaacatagtgagagaggtaaaaaaagcttaccgatcaggcaatatctgaaatcatggatacccggatgggcttgtgttctccagagtgtgtggatagcttcctccaacttgcaatgaagtgctctcgggatgagactgacgctcggccatccatgacagagattgttagagaacttgagctcatcttgaagataatgccagagggtgatcttatccagctggaaactccacagacatactcaggacgtgctatgagcaaggaccctatgagtaaatctacatcaaattcaacaaatgggaattacttggcctcatctcaaacttttactagtgttgatgcaagtagtagcggcgtgctttctgggatggtgagtcctcggtaatgttatggtagttctaaacatgcagcaatactctgtaatattatggacttcacactttcatttgtcaatgaaccagccagccttgctggaaaatgcaatacatgatagtaacaattgataatgc

SEQ ID NO: 16903 - DNA, 2486 bp, Oryza sativa
  ref <308>: DATABASE ACCESSION NUMBER: AK067372
  ref <309>: DATABASE ENTRY DATE: 2001-12-06
ggctatttacacaactcgccaccaccgtaacgggcaacgcccagaagcgtccgcctccccctccctccgagggcgagatcggaacaaggcccccacccaaccaccgccgccgccgccaccggcgatcgccggcgacccccgggccacgggaggcgccccgccctcctcgccattggagaggaccttctctcctgctcggattcgtttgctctggtggtggtggtggggctttgctggcgcgaggccgcgcctgccatgccggagaccgggccctacggccacaagaagaccgacggcatctgcgacggcgtgtgcggcgagcctgcgtcaaaggcagttctgaccatgtcgaggctgagatgtgcacttcggggatttgatttcagagcactattggccctattgataggagtgccaattctaattttaatgatatatgctcatggtcagaaggtcacatacttcctcaggccaatatgggagtctcctcccaagcccttcaaaactatccctcattactaccatgagaatgtcaccatggcgaaactctgcaagttgcatgggtggaaagtccgggagaccccacgacgtgtcttcgatgctgtactattcagcaatgagctcgatattcttgaaatacgttggaatgaactaagcccctatgtctcagagtttgtgctgcttgagtcgaactcaaccttcactggattgaaaaagcccctgcacttcaaggaaaatcgtcatcgatttggatttgctgaatcacggctgacatatggtatgattgggggaaggttcgtgaagggagaaaacccatttgttgaggagtcatatcagagggttgccctggaccagcttattaagattgcaaaaatagaagatgatgacctgttgatcatgtcagatgttgatgaaatcccaagtggccacacaattgatctcctgagatggtgcgacgacattcctgagatccttcatcttcagcttaggaattacctctactcatttgaatttttcctggatgacaaaagttggagggcatcgatacacaggtacaggtctgggaagacaagatatgcacacttccggcagacagatgagcttcttgctgattcagggtggcactgcagtttttgctttcgctacattagtgattttgccttcaaaatgcaagcttacagccatgtcgatcggattagatttaagtacttcctgaaccctgaaaggattcaagatgttatatgcagaggggcggatctttttgacatgcttcctgaagagtacacgttccaagagatcattgccaagttggggccgattccaagcacattttctgctgttcatcttcctagctatctgctacagaatgttgatcggtacagataccttctcccagggtactgcaggagagaaagtgggtagattttgatgatctacactcttcaatctgatgtgcaggcctgtcactgccatgttctccacctccgagattggctggccgtgacggttgcatctgatatgattggctaacttagctggatgattgcttgggatgagtggctatggatgatttcatcatccttcactgtgcaatctaacaccggacgaccctacaggctacagcatagtgtatgctcggtcgtggcatggttaccttcccagaggagctcattaccctgtggtagccaccacaagttcacctgtcattcatattacttccctgattgatacataaactgagaactgctgtagattgcaaaatcaagtgagatttcagatttatatgctgtagaactagcattaccctgcagataatccacacatgcttttattctctctttctttttcgcgttggtgttctgttcctttctttgatggctgcatccaatttctggttgaccaaaaactctggcttccgttgctccgtcgttggaaattgccgcatgattgcgtgagcacttcttctgtttcttcatccatcattgacttgagcgcttgtctggtatgtgtcctgtggtcaatccgaggcaatatcacacacaagtacacaacccaatgcccaagttgagctaagttattccttcttgtgcgtctaatctaccgtctcttgacctgttctccaagtggtttagcagctggttggtagtgaattgctaggttcaaacagctcgctgtctgcaggcccggcctggctggatcgacaggtggatgcttctattatcggtgggcaaggtatattgcgtatagaactatagataggcttggaggacttgggcagttgggcgaagcggtcagtgaaacattctctgatcactaccctattattggtactccgtacttggtatagcaaatcggtgttctattgtgctctggttgcctcaaatcaacaagaggtttgagatggatactactactactcgtgtagccagttgttttttccgttggccagccacaaaatggttatttgtcgctgttcttcctttccc

SEQ ID NO: 16904 - DNA, 833 bp, Oryza sativa
  ref <308>: DATABASE ACCESSION NUMBER: AK067373
  ref <309>: DATABASE ENTRY DATE: 2001-12-06
gagccaaatccgccgcgtctcagctcaacccagcagcgcagacgctcaagccttctcgcgttgcagcgccgcgccgaggaggtgtttgttgatttgtggagatggtggggggagaggtcatgtgcgaagcggcggcgccgaggtacaggggggtgaggaagcggccgtgggggaggttcgcggcggagatccgggacccggcgaagcgggggcgcgtagtggctcagcacctacgactccaccgaggccgcggcagcggcctacgcacgtcgccgcgcggaacctccgcggcccgctcgccagaaccaacttcccgctcgtctcctccctcccgctcccgtcgccccactaccacctccccgggaaggcggcggcggcggcgccgccggtaggaccggccccgcgtgcagcgagagctccaccgtcgagtcctcgagcgggcctcccgggcccagaccggccggccacgcgcggcaggcggtgccccggaggcgggtcccgcggcccgcgccaccggcgcccgacgccggctgccacagcgactgcgcctcgtcggcctccgtctgtggacgacgccgacgacagcctccaccgttcggtcacgcgtggcggcgttcgacctcaagcctcccgccgccgctggaccgggaccacgtcgacctgtgcacggacctccggctctgataggaatccacaccgaatcgaagcaaccggagaagacgattctactgtatcgtcatcttctcccaattagatgctagtattcgactcgacaatagtctgtaccactattctttacgcgataattgacaaggaatggccctcttgagttt

SEQ ID NO: 16905 - DNA, 1002 bp, Oryza sativa
  ref <308>: DATABASE ACCESSION NUMBER: AK067374
  ref <309>: DATABASE ENTRY DATE: 2001-12-06
gtgtgcctctctctcttattcttctcttcgaccgtttcttcgccgacaagaagaagaaggctccccgcggctgcggcggcggcggcgaccagcccttccccttctcctgcttcgacagttcgccgccatggccactcggtttctgcctctggtgcgccgcggccttgccggcgtcctgaatcaatcgcccgcgcccgcgtccacccgaggattcttgtttcctgcacctgtgactgctggcataagatctctgcaaactatcatggaagcaagcaataatgcttcagatgaccgtaaccaggacatagaggattccaaaaccgacaccgtgccagctacggtcccttcatcggattccggcttcaaagttagagatacatcaaacttgaagatctcaccgagacacgacctcgccatgatctttacgtgcaaggtttgcgagaccaggtctatgaagatggcgagcaaggaatcatatgagaaaggagtggtggtcgctcgttgcggcggctgcaataatttccacctgatcgcggataggcttggctggtttggggagccaggaagcatcgaagactttctagccgaacaaggagaggaggtgaagaaaggctcaacagatactcttaacttcactcttgaggacttggttgggtctcaggctaatgataagggcccttctgataaaaaatagatttctcttcagtatggctttgggtcaagacaacttaaaaaaggttaactcctaaggaaatccacaagttttttactcgatatcatgacttctcaaggtggagtagtccaactttttgcacttgttagttctgatgttattgcagtgtaattgtcaattctcaaccttgtggctaagtccaccgtgtggctttggtaaatttattgtagtggacacgacccgattatgtactaggctgtgtgtcatagttttgtgatgttcttgacaaaagtaacaaaactaattatggaaatgtttccctttgaatc

SEQ ID NO: 16906 - DNA, 2584 bp, Oryza sativa
  ref <308>: DATABASE ACCESSION NUMBER: AK067375
  ref <309>: DATABASE ENTRY DATE: 2001-12-06
gatccaccattccacccacacgccgagcgcgaggcggaggcggccgcgtctataaaaccagaggcgcgcctcgccgcgccgcgccgcgttctcttcctccccggagtagaaaccgcccgccatttggatccccccaattcccctcctcgcccaaaaccctagccgcacccccgccgcgcgccctccgcctccgcctccgccgcggcgtgcgggctccgtcgtccgtcggctcctcgccactggcgtcgcgaggcgtcgtcaccggaggtagcgggagctcaggggacacgatctcgaaggcgcgcgccaggacgaacagctcgagcgcgccgcggggggccttcggttctgagataaatcaccccgtccgcatcatcgacgcctccctccccgcgcttggcgccagctcgttctagggggggaagatctcggcgacgagcagcttgggcgcgttcgcctcgatggacgagttcaaaggcccaggggagaaggagaaggaggaggaggccggggacaaggccgcggcggaggaggcgggggacggattccaggtggtgcgcggtaagaagaagaagcggcccaatggtggttcggcttcgggtgctgggtcggggacgatgatggccaaggacaaggcggcggcggcggcggccgcggagccgtggacgaaggcgaaggtgtctttccacgatcccaacattccgcggccgcaggatgtgtacgcaatcagagtgaacaactacaacgtgccgttcgaccatgtctggctagagcgcaccgaagatggcagccgccctatccaccctctggaaaaactgccaatggagcagtttattgacagaaatgttcctgaaagtgaacctgtaaagccagctgatttggaggataccccatttacgctagttgaagataagaatggtttagcagacttagctaaaaagttgaagagtgtaaatgaatttgctgttgacttggagcacaatcaatataggtcatttcagggtttgacctgcttgatgcagatttcaacaagaacagaggattttgttgtagacacccttaaacttcgcatatacattggtctctacttgaaagaacattttaaagatccaaccaagagaaaggtaatgcatggggctgatcgtgatattatgtggctccaacgggatttccacatatatgtttgcaatctttttgacacaggacaggcttcaagggttttacagatggagcgaaacagcctagagcacctattgcgtcacttttgtggagtcacagcaaataaagaatatcaaaacgctgattggaggtcaaggccactttctgatgaaatgataaagtatgctagagaagatacacactatctgttgtatatgtatgacttgatgaggttgagactgcaaaaggagtcgacatctgacaatgatcttcttctagaggtgcaaaagcgcagtaatgaaatttgtttacagttgtatgaaaaggaactgctgacagatacatcttatctccacatatacgggttgcaagaacatgacctggatgcaaaacagctggctgttgtatatgctctacatcaatggagagattatatagctcgtgaagtagatgagagcactggttatgtgttaccaaataaggctttaattgagatagcaaagaagatgcctacagatactgcagagttaaaaagaatggtgaaatcaaaatatccatttgttgatgaaaatctggaccaagtcgtaggcatcatatggaatgcaactgaatcttcttatgcctttgaaagcagagctgaacaactaaagaaggaacgtctggagcagctaacggacagggttcagactatatcatcacctgagatgaagacatctatgaacttatcaggccagattagatcaatggataaggaaatactgagcgataacatacatcagcaggtggcacaggctacttttcaagaactgaagagacctatggctttgggagcagtagggaattcaacatccgggggacagagagatttctttggagggttttcaaataagtctgagaagatggagaaggctaaatcctatccagccttttactacccccagcttccacaatatagccctgaagttgggtacggctttcaatcaataaaccgaactatggcgggaacagcacagtctcctactggcaataaggagagggatctccagaaccctagaagacgtcaatctttcccaccttccggtaacataagtgatacacaccagtaattgctctgatgtatgccttcaaattcatccttctgtgcagaaaatagctgtagagaaatggaaactgggctgtttttatccgtgccccctaatatgagaaactatgcctccctcagatttttttggctagactaacagaaatatgagaatagcccatatcattgacattagatgcagagcatgggaaatgccaatgtggattggcttgtgtgtaacaactgacaaacatgtgctgtgcaattgtgaatactggagttgtacaagtggtatactgtaatactgttatagcatagcatcagaatacaaagacagaaatgaac

SEQ ID NO: 16907 - DNA, 1389 bp, Oryza sativa
  ref <308>: DATABASE ACCESSION NUMBER: AK067376
  ref <309>: DATABASE ENTRY DATE: 2001-12-06
gcccgctgctccactcctcgcttctcccgccatcttctcctcctccacggccatggccgccgtcgcgttccgctcgctgctacaccccgccgccgcggccctcaccgagcgtgtgccactgcctcccgctcacctacggctccagggccttcaccgccaccgcgtcggcgtcctcaacctcttcgtcgcctccggtcatcgccgccgcattctgcttcccctcgccgccgccggtggagagttctcttcggaagaggaggagtacgccaacgaggaggaagaagagggggaggagtacgtggaggaggaagaggaagatggggaggaggaggaggcggcggcggtggcggcgcctcgcggatactacccgccgagaagccggccggcgctcgggcaagagcccggccgcctcttcgtcggcaacctcccctacaccatgacctccggcgagatctcccagaccttctccgaggccggcagggtcgacaacgtccagataatctatgacaaggtcaccgaccggagccgcggcttcgccttcgtcaccatggccaccgccgaggaggctgccaccgccatccagatgttcaatggggccctgcttggagggaggactgcaagggtgaactacccggaggtgccgcggggaggggagagggcggtgggatcggcggcggccacaagggagaacaggcgcgatgacggcacattcaagatctatgccgggaacctggggtggggtgtgcgtgccgatgctctgagggcggcgttcgaggggcagcccggcttgcttgatgctagggtcatcttcgagcgcgactccggtcggtccaggggtttcggattcgtctccttcaggactgcagaggatgcacaggctgcattggaggcattggatggagtggaactggaaggaaggccactgaggctcagtatggcggaacagaacccaacagctggttctcctagcacagtgcagtcacaggaggaagaaactgcttcagaatcatctgatgcagagacagagcagagcattacctcagaaccttctgaagctgaaacggaagagagcaacttgcagacagctgccagttattagtatctaattgatggttgcactgatttacttattctgccattcggcattccaatctaaattgtacttgtccaattgaaaattttgacacaagagatgctaaaatgggatatgagccatagccaatagaatattattagacatagaggtgctccgagtttcagttattgctgtaatatattgtgcagaaatctaaagtgcaactgttttgcttcctatatttattcagttaatatgttctctgtgtaatatgaagtaaaatattggattcattaaggtgtacctattacttg

SEQ ID NO: 16908 - DNA, 2627 bp, Oryza sativa
  ref <308>: DATABASE ACCESSION NUMBER: AK067377
  ref <309>: DATABASE ENTRY DATE: 2001-12-06
gaccggagtctccctaactaactaaacccaaaccccgaactcgccaccgcctgtccgcctccagagtcccaaccgccgccctcgccgtcgtctcgtctcgtctcgcccgcctccatggcgacctccgcctccgcctccacctccagccccttcccgttccccgcccgccgcccgccggacgacaccctcttctacgccgtctactcgctccccctccccaccgccctcccgccgccggacctccacgccgcgctccggtccctccacctctccctctcctcccacctcgcccccttcctcgcctcccacctcttccaccgcgacgccttcgcgctcaccatcccgccgcccgaccacaccgctgccacctccccctgcgcgctctgcgcctccccccccgtcccgcacctccacggcgcgctccgcttcggcgactccctcgccgacgagtggctcggtgtctccctcctcttcgagctcacccgcgcgttcccgagcctcgccgtgcgcgcgtgggactccgacggggagttcctcctcatcgaggccgccttcgcgctcccgcggtggctcgacccggacaccgccccgaaccgcgtcttcatcttccgcggcgagctccacatcctgccgccgtcgctcttccccgggacgccctccctcgacgccgcgctcgccgccgtccatgatgacgccgtcgacacccgcgcccccgacgccgtccaggccgccatacagcgccgcatcgccgggctgcctgagaaggcctcggagaacctccacaccgtgcgcgtcattgtcccggtgcccgtggcgaaggtgctgaaggaggagccttgcttgatcgcccgcgccgtcgaggggttctatgaccgggacatagacaccatgaaacacgcggcgaggatagagaaattcctcaggggacctggcggagagggggttgagatggtgaggacatcggtgcgcatgacgcgggcaatgtacgcgcagctcgtgcagcagaactttcaggcaccgaggggttaccccatgccgaggagggaggaggggccggagaagtggatggaggcagagttggggatgaaaattgcttgtgggtttgagatgatgtatcaggagaggcggcgggagggggaggaagggaaggggagcacatgggaggtttacaggaagagcttggaggcgacagggtgcttcaatggtctgcttcctgggtcaaaagagtacaagagggttatggaggatgcaatgcagtattacaaaagctcgagtttgttttcacgaacaagggagatactaagtgctcctgtgcgtcgaattgatgaaatccttgccatgccatactcggctgaggaatttgaaggcagtgaccttcctccgagcgacgatgactcttggttgtataatggggaggatgagttagctgcggaactctgtgcaaggcagcaggaaatggaagagtatgaaactgcaaaacaatacagaaaaagtcaaaggaaaaatgtctcaggcagttctagctcgcagtcaaacgagtttaatcttggagagattacagagtccatgcaagaatttgttcgcaaaatgtcaagctttgagggagctgaagttcctgcaaacaggaaagacatggaatcagtggatctggatgtcaaccagttcttcaaggccatggaatctgtgctaggtcgttcaaaagatgaacctggcaatgaagccgggtttgatggaaaatcttcatcatctgacatagaccttgaagacgattctgattatgggagtgatttcagcgaagaatctggtgagaagggtatggataatgctttcatggaatcatattctgatgcactgaataaagaactcagtatgaccactatagagaaaagtttcgctcgtgcaccgcaccctgataccagcaatgagggtccatcaggtgctgcagatactgatggggagatgaccccagttgatgtggacctgaaccttgttgagagcttccttaactcttactcctctcaacagggtctcccaggcccagcttccaatctgctgggacttatgggtgtaaaagtacctcctgatggtaaaaagccgtgatctttttgtttgtacccatgcacatcaaatttctggaaccatagcaagaacatacatatgatatttattgcaaaacataggagatcatggtccaagtagttttcttgtatgttcaaacctcaaagaaaggaactggaagtaggacttgtgactttgtgagagctcaagcggccagcttggtctctcaaccggcatcatttggataagtaaaattttggcctgacaagcatgttccgttcctgtattccctgtactgctccggtatcattggaagacgtagggctcactcaacacaggccatgggtgtgggacaactatgtactatgagtctatgagacaactatagtcaaagcagctagcatttatatgtggtagtagctaatactgttgtattatgcaattctgtaacatgtcttttgagatctgacatgtatagcaagcagttgtttatgcagttcttggagtagcatatttgttctgaggcatgaacaaacttcagctacctaacataaactgttctgtactcg

SEQ ID NO: 16909 - DNA, 2545 bp, Oryza sativa
  ref <308>: DATABASE ACCESSION NUMBER: AK067378
  ref <309>: DATABASE ENTRY DATE: 2001-12-06
ggtacgcattgactcgatcaatcaacggggagggaacacaacacggcggccatcgatggccggcgttttgcagatcacatcgtcgacgaccaccacgaggtacaatattgtcggcctcatcttcttcttctccgtcttctgcgacgatctctactcgccggctccagtcgccttggccttgaccttcaaccacaccaacttcggcccggacgagcagacgaacatcaggctggaaggcgacgccgccttcagcgccgacttctccttcagcggcgacggcggcgggtgggtcgacatcagcgccaacaggcacggcagcatcgaagacagccgtggcagggtgtcgtacgcccttccggtccctctctgggacgccgccaccggcgaggttgccagcttcaccaccggcttctccttcgtcatcaacccgcccaaacaggacggcggcatcgacaacaagggcgccggcatggccttcttcctcgccggcttcccgtcgaggctccccggctcctacccctacaacctcggcctcaccaaccagaccgccgaccaggtggccgccggcgacgaccggttcgtcgccgtggagttcgacaccttcaacgacaccatcgtgcacgaccccgacgccacctacgaccacctcggcgtcgacgtcaactccgtcgtgtccaagacgaccttgaccttgcccagcttcaccctcgtcgggaacatgaccgccgtcgtcgagtacgacaacgtctccagcatcctggccatgaggctgcacctcggctatgggcttagtggcccccgtcaccggccggattacaaccttagctacaaggttgacctcaagagcgtgttgccggagcaggtcgccgtcggcttctccgccgcgacgtccacatccgtcgagctgcatcagctgcgttcatggtacttcagctcgtcgctggaacccaaggccgcaccgccaccggtggcgccgccgtcaccgtcaccaccgcctacctccggttcaggaagtggcggggttgtagcgggagccaccgtcggcgcagcactgttcgtcgtgctcctcttggccatggtagcagtcgtcgtactcgtacgacgacgacatcagaggaagaagatgagggaggcggaggaggcgaacgacgacgacgatgacacggaaggcgatcccatcatggagatcgagaacgggacggggccgaggcggttcgcgtaccatgtgctcgtcaacgcaaccaagagcttcgcggcggaggagaagcttggccagggcggattcggcgcagtgtaccggggctatctaagagagcagggcctcgccgtcgccattaagaggttcatcaaagattcctccaaccaagggaggagggagtacaagtcagagatcaaggtcataagccgtctgcgccaccgcaatctcgtgcagctcatcggctggtgccatggccacgacgagctccttcttgtttacgagctcgtccccaaccgtagcctcgacatccatctccacggcaatggcaccttcctcacatggccaatgagggtcaagattattcttgggctcggatcagccctattctaccttcatgaggagcgggagcaatgtgtcgtacaccgtgacatcaagccaagcaatgtcatgttggatgagtccttcaatgccaaactaggtgacttcggacttgcaaggttcattgatcacatcgtggggatgcagacaatgactgcagtctctgggacaccgggctatgttgatcctgaatgcgtgatcaccggcagagcaagcgcagaatccgacgtttatagcttcggcattgtcctactggaggtggcgtgcgggaggaggccgatgagcttactagacagccagaagaatggtatcttccggttggtcgagtgggcttgggatttgtacggcaagggagacattctcatggccgctgatgagcggctcaacggcgactacgacgcggcggagatggagcgtgtcattgtcatcgggctctggtgcgcacaccctgatccgaacgcgcgtccgtctatcagaaatgccatggctatgctccaatccggtgggcaactgccagtgttgccggctaagatgcccgtgccgatgtacattcctccagtggtctctgtagatgagctcttcacgtcgcctgcagggatgtcatcctcaagtgcgacgcagtcatcaacaacaacggtgagtggctacgcaacccacatctcgacttcttctgacacatccacttcagctggttcgaaggactcgtcttcgttgctcaaacatcagttctagtaatgttcagttcatttgagttgttcttgattttacagtagttgatgcttggatgggatgttcagctcgtcagcgcccgttgatttgatctttagacttttgcttaattgccggtgtgagtaatctggtatttacgccatgctttgaacttttacagtcattttaagtttgtctacaaatatgtatgtataaatgtataatgccacatttctattcattcagattgccgatatacct

SEQ ID NO: 16910 - DNA, 4157 bp, Oryza sativa
  ref <308>: DATABASE ACCESSION NUMBER: AK067379
  ref <309>: DATABASE ENTRY DATE: 2001-12-06
gacttaaattttcttcaaaataaatccccacctaaacccgcgtcgcctcctcctccgccgccgtcgcgtcgccgtctccgagcgcctcctccgcctccgcctccccctccccctcgcgccgtcgccgtcgccgagcgccgccacttccgcccccgcctcgtaccctcatcgccacgagccccgtttcgccccaagcccccgcacagatcggacccgtggcggcgctcctccaccgtcttacccccgtcccccgtgctactactgcgcgcccagccgccgcagagtagggcttctcccccctgtggcggcggcggcggcaggggttcgtaaggctgcggggaagatggctagcgtatacatcccggtgcaggggacggaggaggaggtgcgggtggcgctggaccagctccccgccgacgcctccgacatcctcgacatcctcaaggccgagcaggccccgctccacctctggctcatcatcgcgagagaatacttcaagcaaggaaagatagaacagttccgacagattctagaggaaggatcagggccagaaattgatgaatattatgctgatgtgaaatatgagagaatagctatccttaatgctttgggcgctttccatactttcctggggaaggttgagagagcacaacagaaggaagtccatttcaaagaagcaactcaatgctacaatagggcatcaaggatagatgaaactgaaccttcaacatggatcggaagaggtcaactctgtgtggtcaagcacgatttgcaaatggcatctgattcattcaagattgtattggatgaagatggaagcaattttccagctttacttggtcaggcctctgtttatttcctgatgggtgactcagagcagcaacacaagaaagctctggactattataggaactcactggatctctataagagagccctgcgggcctataccagctgtcctgctgctgtaaggcttggtatagcattttgccgatacaaacttggtcagtcagataaagctcgacaagcttttcaacgcgttctgcagttggaccctgaaaatattgatgctttagtagcactggcaatcatggacttgcaaacaaatgaagctggtggaattcgcagaggaatggagaaaatgagaagagcttttgaaatttatccttattgcacattggcactcaaccacctagcaaaccattatttctttactggccagcattttgtggttgaacaactgacggagactgctctctcttcaagtaatcatggactgctgaaatcacatgctttctataacttagccagatcgtaccacagtaagggtgatattgagactgctggaaggtattatatggcatctgtcaatgaaatcagtaagccacaggactttgtgttgccattctttggacttggtcagatacaattaaaatttgcagactacaaaagttcattagctagctttgagaaagtgttggaggtgcacccagaaaattgtgaaagtttaaaggctattgggcacatatatgcaaagtcaggtgagaatgacaaagctatagaaaccttcaagaaggttacccggattgatccaaaagatcatcaggcatttatggagctaggtgaattattggtacaatctgattgggctactgctatggaatacttaaaaacattcacaggctcggaatctcctaaagaaggcaggagagaaaatacccattgaattgctcaatggaattggactacttcattttgagaagggagagcttgagatggctgaacaaagttttaaggaagcacttggagatggcttttgggtttcaattatagatggcagtgtaggtagctccgtggttaactggagtattcagtatagggaccagagtttttttcaacaacttgaagaagagggaacacctcttgaattaccttgggataaggtcactacattgttaactatgcaagattgtttgaagagctccatgatactgtgaaagccagtctcttttaccgcctcattattttcaagtatccagactacattgatacttatcttaggttagcagctattgcaaaagaaaaaaacaatctccaactgagcattgagctgataggtgatgctctaaagatagatgataagtatccaaatgcactttctatgcttggaagtcttgaactccaaggtgatgaaacctggcttactgcaaaggagcatttccgtgaagctaaagatgcttctgagggaaaagacacatactctatgcttcaattggggaactggaattactttgctgctaatcgccctgagaaaaaggccccaaaatttgaggccactcatagggagaaagccaaggaactgtattcaaatgtactaaagcagcaccatggtaatatgtttgctgcaaatggtattgggatcttatatgctgagaaagcccaatgggatattgccaaggagttatttacacaggtacatgaagctgcttcaggaagtatatttgtccagatgcctgatgtttggataaatttggctcatatatattttgctcaaggtttttttcagcaagctgtgaaaatgtaccaaaactgcctgcggaagttcttctacaacacagatgcaactatacttctatatcttgcccggacacactatgaagctgaacaatggcaagactgcaggaaaacattgctgagagctattcatttggctccatcaaattatttattgcgattcaatgtaggtgtttcgatgcagaaattctcagcttcaactctacagaagacaaaacgaacagttgatgaagttcgtgcgacggtctatgagcttcagaatgctattagagtattcagtctattgtctgttgcatctacataccattcccatggttttgatgagagaaaaatagaaactcatattgagtactgcaaacatttgcttgatgctgctaaggttcatcgtgatgcagctgagcaggctgagcagcagaataagcaaaaaatggaagttgctcgacaaattgctttggctgatgaagctcgccgcaaggctgaagaacagaggaaggcccagttagaaagaaggaagcaagaggacgagctaaagcaagtaatgcaacaggagcaacactttgagcgtgtcaaggagcaatggaaaacctcaagtaacactcctggcaagagaaaagataggtctaagcatgaagatgaagaggggggaggtgaaaagaggaggaagaagggtggtaggagaaggaaggatcagaagacaaaggcacactatggggaagaggaagaagacgaatatagagatgaaccagaagcagaagatgattatgcaaacacggcgaggagtaacgatggtggcgattcagagaaagccccaggtcaccttcttgctgctgcaggtcttgaagattctgatgctgaagaagatgacatgggacaccctcaatctgccatagaacggaagagacgagcctggtcagaatctgaggatgatgagccagtgcagaggccagtgcaacctagcgcaggcgagaacgatctgagtgattgaattagacggtgaagattatggccgaatttgggatcacttcatatatttgtgacgaagaatggctcctgggatgcggaatcaactatagggcgtgctcatatgcacttgtggataattcgatgttgaaatggagctcagacagatggttgaaccagaagtgttaaaaaaatttatctgggagcagagcagtcactgatattcaacaattaatctcgcgtcattctagacatgccatgggttggtggagctaacataaggcaatttgtaatttatgtctagtttacgcttaatcagccagacttttgtcctgtgagcttctaacgctgtaccaattttagctcacttacatctcaggatagctgatctcctactttgttctttgctgctaggcaagcgtgccaagaaaagatttccaaaagtagctgatctcctactttgcacctaatttttcagacacttcggtttggcaggcaactgtacgtgctcattggcattcgctaatatcgccctgctctcgtccaaacaaagtaatggatatatagatctaaagtaacggattttttcatgcgatttgttttcaagttgcaccttttgggcc

SEQ ID NO: 16911 - DNA, 1636 bp, Oryza sativa
  ref <308>: DATABASE ACCESSION NUMBER: AK067380
  ref <309>: DATABASE ENTRY DATE: 2001-12-06
ttttagtggaagcactaatgatagctcatcccgcaccttgagccttattgggtcagaaccttcaaatgccttcagtctaggaggcaaatcagcaaatacatcggccccggcagctacatcagcggcagcaccatccccatccagcattcctcagcagcagcagcagcagcagcagcaacaacatttccttcaacttcataagcagcagcaacaattgattcagcatcaccatatgaactctcgccccagatctgctgcaccaagcaatacaggtggatattcagaccgcttgaacatgccaagttttcagggtatgatgtacccatcaagtgctgcccaagtgggtgttcctagtcaatctcctcaattgaagccttcgtcagccagagcaacaggtgcacctgctggtgtggcttcccctggtgcttcaccctctaatttgattgtgatgaagagtggtctccatcagcaacaagctaaggctcctatgcagtctctctctacctcaaaccaccaaccccagagttcatcaaagatgggtcctgtcactaatatgtctactggaggaggggatttgtcaagatcttcaaatgctcccgttgcttctggttcaccatccaattcagtctccaaaagtactggtggcagcccaccggcttctggaagtgcaaagggtgttccaccagctgtccaattgccgtcacctcaacaacaatcagccaagaatccagcatcgacgtctggagccaagtcagctcccacaaatcactatagtagtatgcctatgccatcgatccttggtcaacagccaaatgtgccgcctggttctaattcaggcagtaagcagcagtcgcacatgatgaaacagcagccatttccacaaggaagtcatttcttcatctccaatgcatacacaccacaagcccctggagctgctggaggtgttgctcttggcctttaccagaagcgctcagctgacaagacgcagcagcagcagcagccccatcagcagagcgccatgtcggctgcagccagcaataacatgaagactcatcatcctcccgctggcagttttatgcatcttgccgcagcatctcagtctccgagcggtgtgcctcactctcatatgtcagcggcacaattgacttttggggccccaatgtcaatgtctgtaaaaccatcaagtgatcagaagcctgctgctggcaagtaagatgtcgatgctcggacttcaggacgctactctggacttgcgagctaactgctaattctgaatatgcgcgaacggagctacgcctcttggaccccagaagaagcagatcgcagcaacagccacaggcgcaagagcctgtttgctggctgttaatcgaagaggacggcgcgcccattcctttgctggatcatttgctaactgaagtatttggaatggttgatgggagtgatacttttgtgtagtgggttatcctctcatgatggaaagctggaggtgcatagaatctctttttagcagttttatgcatggatgtcaaaagctggtctctttctccctctcccaactgctttagctttgttctttttgttgttctcttaactgaagcaaaatttaattagaatgcaggacaaggtaacttttgtg

SEQ ID NO: 16912 - DNA, 2499 bp, Oryza sativa
  ref <308>: DATABASE ACCESSION NUMBER: AK067381
  ref <309>: DATABASE ENTRY DATE: 2001-12-06
ggtctccggcgagcgagcacgaggcactcaccgccggcggcgaccgaagcaaatccggcattcgcctgagccggcgagattcggagtcggagaggaggaggaagaagatgacggtgggagccggggtggcggtgcaggacggcggcctggtggcgctgggcgccacggtgctgacggaggtgcgcgacaatgtgctcctgacgccggccgccggcgccggcatgacgagcggcacgttcgtcggagtccgctccgccaccgccggcagccgcagcgtcttccccgtcgggaagctcaggggattgcggttcatctgcacgttccggtttaagatgtggtggatgacgcagaggatggggacgtcaggccgcgacatccccttcgagacgcagttcctcctcgtcgaggccgccgacgccgacggatcacacctcgccggcgacggcgccgccgcggtgtacaccgtgttcctcccgatcttggagggaccgttccgagctgtgcttcaggggaactctgatgatgagctcgagatttgcctcgagagtggtgacccagctgtggaatcattcgaaggcacgcatctggttttcgtcggtgccggatcggatccattcgaagtcatcacaaattctgtcaaggctgttgagaggcacttgcagacgtttactcacagggaaaagaagaagatgccagacatgctaaactggtttggttggtgcacatgggatgcgttttatactgatgttacttcagaaggagtaatggaaggattacagagtctaggaaaaggtggaactggcccaaaatttgtgataattgatgatggatggcaatcagttagtatggatcctgcaggaattgcatcattagctgataactcagccaactttgcaaacaggttgactcacataaaggagaaccacaaatttcagctaaacgggaggaaaggtcacagggaagagaatccggcaaatggccttgcacacattgtcaatgaaattaagggcaaacatcagctgaagtatgtttatgtgtggcacgcgatcaccggatactggggtggagtaaggcctggtgctgatggaatggagcactacgaatcgaagatgcagtacccggtctcatcaccgggagttcagaagaacgagccatgtgatgctctgaacagcataaccaccaacggccttggccttgtgaaccctgacagagtgttcagcttctacaacgagctacacgcctaccttgcatctgctgggatcgatggagtgaaagtagatgtgcagaacattcttgagacactgggtgctggccatggtggaagagtgcttctggcaaggaagtatcaccaggctctagaagcttccatcgcccggaacttccgcgacaacggcatcatatgctgcatgagccacaacacggataacttgtacagttctaagaggagtgctgttgtgagagcttctgatgatttctggcctagagaccctgcttcccatactatacatattgcatctgttgcatataatactgtatttcttggagaattcatgcaaccagattgggacatgttccatagtgttcacccaatggctgaataccatgctgcagcaagagcagtcggtggctgtgccatatatgtcagtgacaagcctgggaaccatgacttcaatttgctgaagaagctggttcttcctgacggatcgatcctgagagccaaactccccggcaggccaaccagagactgtctgttttcagaccctgcaagggatggcaagagtatcctgaagatatggaatctgaacgagcactccggtgtgattggcgccttcaattgccagggtgctggatggtgcagagtagggaagaagaacctcgtccacgacgagcagccggcgacggtcaccggtgtcatccgtgcacaggacgtgcatcacctcgcaaccgttgctgccgatggctggaacggcgacgtgatcgtctactcgcacatcggaggggaggtgacctgcctgcccaagaacgcgtcgttgccggtgacactgaagacgcgagagtacgaggtcttcaccgtcgtaccactgaagaagctcgacaatggcgtctccttcgccgcggtcgggctgatcgggatgttcaactccggcggggcggtgacggcggtgaggtacgtggaggacgccggcgttgaggtcagggtgccggagcaagaactctactcctggaccatctcgatcgagtactgacgtagtgacgttgcttaccatgaagtttctcaatgtttttcatgatgaaaaatggagtggatgagatttctgaaaatatattcaggttcttgctgaatcccgggttgggaattcagcatggtgctgaacattgtaagctaaggttgagatgttcgcaacattcttgctgcatatgttgcggctaattcgtgttattccgagcatacacatacagtatgcaaaaatccaaagggaaaaaaaaatggtttctgtc

SEQ ID NO: 16913 - DNA, 4538 bp, Oryza sativa
  ref <308>: DATABASE ACCESSION NUMBER: AK067382
  ref <309>: DATABASE ENTRY DATE: 2001-12-06
gattttcccccaaaaatcatcgcgagcgcgcgacccaaccaccgcctactggtcgccgccgccgccgccgccggtgaggagtaggaggaggaggaagcttcggtcggttggttgtcgggtgggggtggggcggagatggaggcggcgctggaggcggcgcgcgccaaggacacgaagcagcggctggccggggtggagcggctccacgaggcgctggaggccgcggcgaggcgagggctgacgtcggccgaggtgacgtcgctggtcgacgcctgcatggatctgaccaaggacggcaacttccgcgtcgcccagggcggcctgcaggcgctctccgccgccgcggtgctcgccggcgaccacttcaagatccacctcaacgccctcgtgcccgccgccgtcgagcggctgggcgacggcaagcagcccgtccgagacgccgccaggcagctgcttgtcaccctcatggaggtttcatcaccgacaatcattgttgaaagagctggaagttatgcatggactcacaagagctggagggtgcgggaagaatttgtacgcactgttgcaacagctgttggcctctttgcttctacagagctccctctacagcgagtgttgctttcacctgtcctgcaattgctgaacgatttgaatcaaagtgttagagacgctgcaatctcatgtattgaggagatgtatagaaacatgggatctcaattccatgaagagttgcagcgccataatctgccttcttacatgctgaaggacataaattcaagattggataaaatagaaccaaaggctcgctcatctgatggtgctagaatgcaatataaggttattgaaagatctgtaagtgctaatgcaaaaagaggcagtccaaggaaaaaaagttcaacaagggaaagcacattatttggaggtgactcagatattaccgaaaaaccagtggaacccataagagtacattcagagaaagaattacttagggagatggagaagattgcatctgcccttgatccagaaaaggactggtctatacgtattgccgcaatgcaaaggattgaagccttggtatatggaggtgcaattgattatccatcatttcttacgctcctgaagcagctagttcctcccttatctgctcagctgtctgaccgacggtctagcatagtaaaacaggcatgccatctacttaatatgctatcaaaagaactccttggtgattttgaagcatgtgctgaaatatttattccggtacttttcaagcttgttgtgataactgtgcttgttattgctgaatccgccgacaactgcataaaaactatcctgcggaactgcaaggtttcacgtattcttccacttatagctgacacggcaaagaatgatcgcagcgctatccttcgtgctagatgtagtgagtatgccatcctaatattggaatattgggcagatgctcctgaaatacagcgtgcatctgatatatacgaagatctaataaaatgctgtgtggctgatgcaatgagtgaggtccgtgcaactgcaagatcttgctataggatgttcaccaagacatggcctgagcgctcacgtcggctttttatgtcatttgatcctgcagtacaaaggataataaatgatgaagacgggggcctgcagaaacggtatccttctccatcattgcgtgagaagggtgtccaactttctcatgcttcatctcatgcaagtggtacacatttagccggatacagcacttcagctattgttgcgatggacaagagtgcagctatttcttctgaatcatctctttcgtcaagaagtcttctgtcgcagtcaaagaaaataggtagaactgctgaaagaagcatagagagcgttctcagttcaagtaaacaaaaggtttctgccattgaaagtttattgaagggtgtaagcggccggcaaaatttctcagctatgcgctcaacaagcttggatcttggagttgatcctccatcctctcgtgatcctcctatcccacttgctgcaactgcttcggaccatctgtctttgcagaattccatattgctggattcatccctgccaagcattaataacacaagaaatggtggttcacgcttggtagatacagtgaaccctcatgtggccaataaagagaggtcaaggtcaccatatttgagtagtctgtcgtctgaatcaatatcaggatcgtcactgccttatgcgagaagctcttctgggaggtctccatatggtagcactatggaagagtgtaatgatacatggtcaaccaggcggatgccacaaatgcagatggacagacactatcttgatatgacctatagggatgccagccacagaaaggcattcaagaagttatgcagaattttgaaaaggtcatgaagttatttttccgttatttggatgatcctcatcacaaagttgcacaggcagctttctctacacttgcagatattattccagcttgcaagaagcaatttgagagctatgttgaaagaattttaccgtatgtattttcaagacttattgatccaaaggaattagttaggcaaccatgttcatcaaccttggaagttgttggccgcacatatcccattgacacattgctacctgctctagtacgttcactggatgaacaaaggtctccaaaagcaaaactggctgttcttgagtttgctaataagtcattcagcaggtacaaagtagactcagaaggttatagtaacagtggctttcttaagctatggctttcaaagctagcacctttaatacatgaaaagaatgcaaagttgaaggaaacttccatttctggaatcatagcagtttattctcattttgactcaacagcggttctaaattttattttaaatttgtctattgaagaacaaaaccttgtgaggcgagcactgaagcaatatactcctcgtatcgaggtcgatctggtaaattacttgcagagcaaaaaagaacgttcacgtcccaaatcttatgaccaagttgattttggaaattcttctgaagatggttatgcactgacaccaaagagtagttatgcatttgggcggttttctgctagttcccttgataatgcatcagggaagaagatgaatatggttcatggatcaatattccttgatatttctactggccgaacatcctctgatgtcagcattgataatgttaagcaatgtttcaaacatgaagctgaagttcttgcaacaagtagggaatcaaagaacattgctcgcacagttgtagaagctgcacgttcatggacagactatcctggaaaatcagatgctaccattgatgatgaaaattctactggtactcctcgtctggagtttggtcgtcttgctgtttctgatggacgtggtgctgttatttcaacttctgtggaagccgctcaagagggaaatccacttgtggagcttagttctgtgaagattaccccacacaccagtaatggccctagcatcacacaacttattcatcagataagcaatgtcagtgaagttactagtctagacaagcgggaggcattacaacagttggttacagcttccaccaataatgacaactctatatggactaagtatttcaatcaaattttaacaaccatccttgaggtgttggatgactcggattcttctatcagggagctttctctatcgttagttgctgagatgctccacaaccagaaagatcctatggaagaatccattgagattgtccttgaaaagctcctacatgtgaccaaggatgtcgtggcgaaggtttcaaatgaagcaaaccagtgcttaaatgtcgtgttggcaaaatatgatccttttagatgccttgctgttattgtacctttgttggttagtgatgatgaaaagatgcttgtcgtgtgtaccaactgtttgacaaagcttgttggacgcctatcagaggaggaattaatgactcaactgccttcatttttaccagcactttttgatgctttcaataaccagagtccagatgttcgcaagactgttgtattctgcttggtggatatctacattatgcttgggaaagcatttgtaccatatctagaggggcttaatagcacgcagctgcgcctagtaacaatctatgcaaacaggatatcacaggcaaggtctggtgcaccgattgatgctaaccactagatcatattgttttgtgtatcatatgggtatctctttggatgagctggtttcattcattcgatctgtatataacagacagatgccgttcatgtattgagcagttggcttttcgtgtgtgtatgtattccttttatttttgtttccttttccccttgtgtgcagaggcattgagttatgcgttaacttgtactaccatcacactgtacaaagataacaggatgtagctgactgttttcccttgtttacctgaggggtttgttggtgggcatatccttgtgctgtaaacattgggtgtgccggaaacagagaatttgctcaacagatccttgaatggttttgctt

SEQ ID NO: 16914 - DNA, 2353 bp, Oryza sativa
  ref <308>: DATABASE ACCESSION NUMBER: AK067383
  ref <309>: DATABASE ENTRY DATE: 2001-12-06
gatcttgtgacgcgccaaccgcgtcgctcgcgagcagcgcagcagccagccatggcggtggcggtggcggcgtcgctctcgaccccggcgccatcgccggcggccggggggaggggccggaggagggtgaacgtggcggtggcgtccctgcggcgggcggcggcgggaggtggctcgagctggcggagcgagcggcggctcatgtcggagctggagcgcacggtgacgcccggcgcggcggagcgcgtcatccgcagctacgtcgcctccaagtcggagcgcgccgccctcgccgcgctctcccgcctgctcatggactccgaccccttcgccatcccgttctacgaggtggtcacccaggcgcggtggttcaagtggagctccatccacgccgccgccgtcgccgcgctgctcgagagcaatggcagcgcggaggaatcaagatccctcatctccgactccatctcgcgcctccactccacctcctcctcctccgaggaggtgtccctcttctactgcgacctcatggcggccttctcctcccgcgggatgcgagaccgggcgatggatttctactcccagctgcgagcctcgccgccgctgtccgggaagaagacctacacggcgatgataaaatctctgtgcctgatgggcctcgccggcgaggcggaggcggcgctgagggagatggcgtctcgggggcaccagccggaggcgttccagttcggattggtggcgaagtgctacggcaaggcgggatccatggccgagatggagagggtgatctcgtccatgtccgacgccggcatccgcctcggcaccggcgcggcgaacatcgtgctctcgtgctacacctcctgccgtgaccattccaggatgctggcatggctgaggaggatgaggaagctgcggattgcgccgacgacgaaggccttcaactttgtgctcaactcatgcccaacagtagcttcgatggctcaagaattgggggaatcactgccattgtcaacggctgagttggtcaagaagctcaggtctgcatctcaatggccagcagaagctgagctggtgcaggagctcctgacatcctcttcggtgctcgacaaggcgatggattggtcggagtcggaggtgaagctgaacctccatggattcagcacaattgcagcctatgttttgattttgcagtgggtggatgcgatgaaggcgcgccgcgcattgccattggaggtgtcagtggtgtgtggcattggcaagcacagcgatgtcagaggtgagcccaaggtgagggagctggctcaggaggttctgagcaggatggggagccccctgaggctgtccatgaggaacaaaggccggcttgtcgccaagcgcgacagggtgaagcaatggctggccactgactggagctctccggtggatgaggagagcacagatcaatcacctaatggggacaaccagcaaccatttttacttacactcatgagaaaactaggacaggttctgtcaccatttctgcagttctcaaagggtaaagcataagagaagcacctctcttatgtaggtttttcagatagtttggtctttggatagttcagcatctttgccatgctgtagattgatacaagcattgtcttggtctagtgaatcctaagttctagttctgatgccgaaatgctatgcgtcggccagctgcttgaaggttatgggactgacaaaccgtgctgccccgtcatagaaggcaaggcctacaatcttggaggtggcctgggtagggtggaggagatcccagaagagatatctgctacggtcagcgcagcagctggagctgggggtacaggcttcctcggcgttgaacttgccaccaccaccacagcatgcactcttcacctctacaaaccctgaaatcaatcagcaagtctgtgagatctcagatatagctgaaaagtagacggttacaattcaattcatgctaagtagaactgtgacaatgtttgaggtgtgagttccaggtcatattactctttgcttaaactgaggtaacttaccagcagcttgtggattttcaattaggctggagataagttcataggagctggcaatggagtacttcattccctgcatttcggagctgaggtcacggaacaggtcccggatttcgccgttcagtctcttggccaactggtttagcggttcgaagcactctccggtcgggttctgacttctcaaatatgggcagcacccgagtaatggcacattgatcactgcaaacttccttgctcctaaattgtataatgtctacaagaatacttcaacagttactaacttaataaaacataatttgtttgccagc

SEQ ID NO: 16915 - DNA, 1830 bp, Oryza sativa
  ref <308>: DATABASE ACCESSION NUMBER: AK067384
  ref <309>: DATABASE ENTRY DATE: 2001-12-06
ggcctttccgcagaggagcgcgatcccccaccccaaaccggcacgggatgcctcagcggcggccgcgcctggcgcccctcacccgccgcctctccacctgccgggacggcgacctcgccgccctcctctcggtcctccgctcgccgccagcatcctccacgtcgctcccgcgcgcactctccagtgccttcccgtccccatccgactccttccccctcggcaagctcccctccctcctcccgctcctcccctccccactcctctccctccggttcctcctgtggcgccttcccccctcctcgccgctcccgtcctcgtacgccctctcctcgctcgccgcctcgctccccgatctcccgtccgccgtgcccctcctcctctcctcgtcgccgcaacctctcccgctcaggcactacgccctcctcctgggcatctccgcacacgctggactattccccgcctccctcgctctcctgcggcacatgcgctccttcggcctcgcccccgatgctgcttgcttccgctccgccctccgctcggccggctctcccggcgatgtctgtgccgttctcggtatcatgtcggcgtgcggtgtctcgccgagcgtcccactggttgtgacctcggtgcataagctggcaaccgcgggggacttcgtcggtgcccgccagctgatcgagaaaatgccggagtttgggtgcgtgaccaatgtggccgtgtacaccgcgttgctcgacgggatgtgcagtttcggggatgtggatgcagcgctgaggctggtggaagagatggagggttggagcttgggtgcagggtgcgtgcccaacgtggtgtcgtatacgtgtttggtgaaatgcctgtgtgggaaaaagaggatgggggaggcgctgagcttgctggataggatgacaggaagaggggtgatgcccaaccgggtgttcgtgcgaacgctcgtcggcggattctgttcagaggagatggtcgcagacgcttatgctgtagtggagcgtgtggtcagcgatgggagtgtgtcgagcgaccaatgctacaatgtgctgcttatttgcctgtggagggttgggatggatggtgaagctgaagggcttgtgcagaggatgatgaagaaaggggtgcggctgagccctcttgcggccagtgttatggtcagagagctttgcaataggaataggctattggatgcttgctactggataggagtcatggaagagaacggggtgctctgtgacactgatgtctacaatggtttgttgcttaggctgtgtgtggaagggcatgttggtgaggccttggcgttggctaagaaggttgctgagagggggattctcatagaggcttcttgtgctgatcgtttgatggatttgctaaagcaatatggtgatgaggagctagcaccaaaaatatcagaactgaggaggtgctctgaagtgctgtcacattaaccaatgtgtgatccgaaccctcctacaagtatcatgcttggttgatttcaaatcaagaaaaatgcttccgtgctgcatgattacagcaagaaaaggctttgagggtttgttacgctgaaatagattggtggggatagggtgcagcacagagtgatttgtgtgagcaaaatgtggatgagttacttcatttacttgcccatttcctgtagtttttctgaactctgttcagatcctccagtccaagggatgcttcaggacatgtgaactatgattgcgatggaattctcaggttcctcattagtatgctcccaaacagatatgtttgtttaagtggtgatcaatcaaatgttttacatttttaaagaacacg

SEQ ID NO: 16916 - DNA, 4637 bp, Oryza sativa
  ref <308>: DATABASE ACCESSION NUMBER: AK067385
  ref <309>: DATABASE ENTRY DATE: 2001-12-06
ttgggaggaggagaagtagaaatccccaaatcaaagggacaaaccctagcccctgctccgatccagacgccccctcgcatcaatggcctctcccatcagcggcagcgacgacgatgacgagcacctcttcgccggcgtccgcttcttcctcgtcgggttcgaccccctctcggagtcccagtatcggtcggagatggtgcggcgcaggcggcgtggacgccgggaggttcggcagcgggtgcacccacgtcatcgtttgcggcctcgtctatgatgacccggcatgcgtggcggcgcgggcggaagggaaaaaggtcgtcaccgagctttgggtggaagctagcttggatcggggaatgcttgccgatgccgatagggttatgtattggccggtgcgagatttgaatggaatagcaggcagtgaatcattacgcatttgcttgacgggctaccaaagaagtgaccgcgaagatataatgagcatggtttctttgatgggagcgcaattctccaaatctttgaatccagacgtagtcactcaccttatttgctataaatttgaaggtgagaagtatgaggctgctaaaaaggcgaagttgaagttcaactttaacatcaaacttgttaatcaccggtggttggaagactgcttaaagtgttggaaaattcttccagtagatgattacagcaaaagtagttgggaactagagataatggaggcgcaagccaaggactcagaagatgaagaagatgtaggccaaagatcatttagaaataagattgtcagatccactctgaacccaaaaggtagcgcgggaacttctgccaaccctgttgtgaatgcaccaattcggtcaccgactatttcgagtggtaatatagggatggttttggaaaaacagccgaacattcctggagagatcaggaaagcagaagatgccgtcaacaggatacatgatgtcgcagtccaaggcactcctagaactagattggcaatgtctgctaacactgattttagcacacccagtcagattccatttattcatagtgatagtagaggggatgctgcagtaagagatttgaaaaatgcagatcagatccaggggaataaacacaaagatgttggcacaaagacacttgatgttacatccggtgcatcaggcactccatgctcaagcaagatggttgtttctgctaaccataacgtgcattccttaaacaagacaaattttgtggaggatcatggcgacactgatgctagcaaagctgacttgaccaccccatccagagaaattctgcctgcaaatgtacttgattcatctaatgttgccagagggcgaagtcaagaggattatggagccacatgtactcctgatgcagcagctggtcagtcaaccattaatgacaatgtcaccaataataatattggtttgaagtcaggaaacaatgcttcgctcaacatcaacaacaaaagttctttgaaacccttagagaagtcggtactgcctgaacaatattcagctaaccgtataggaccacttcagggggctgatgggagcatgatgagatctgattctagtatctcgacagcacgtaagggagataaaataattgctgatttagctggcgtccaggttctgaaaggtggtgaaaatatacaggatgagaatgtactggatggtgcatattcccaaaaaaagaagtgctccatttccccagttttgttcaaagtgcaaaatggagatacggggaaagaaactggtgcgttgaactctccttctgcaaataggcttagtgacacatctgaaccagcaatttggtcatctgtaggaacaaatccaagtgaagctaataatgttgatttgggaaagcaacagtctggctcatctaaatcaagatctaggactgcactcaagcatggtaatctggttgatggaatcaagctccctgaatattcttcaagtgagacaaatgcgcagcctccaccgaaaccaaaagaattgctcgccacaagcctttcagccactgttcacgatgtaaagagatgtccagatttctcttttcaaaacaaggatggtgattatgcacaagatagtggtaatgcattgaatcaagatggctcgccactgatgcgcaagacagaaaacgttcttgcaaaggtcagaacatctgacatatctttacacagttcaaggaaatcaaaacttgttccctcttctggaaatggtgatactgagatgtctgatgcacttgatattgaaaaaaataaggcagcagtggcttcaaattgcaagcctgagaaagtggtacctgatgaaaatataaaagcagaccagcttaaagactttccaggtacttcaaacaatgttctgcgccaaacaggttatttaaagaaagtagcatctcgtaaaggaatgaaagcaagcacaaagagacctcgtagtgctagcaaggtggttgatgagccagtagttgacgatggtaagactaagacagtggtttctgagtcagagcctgataaaatgattgctcacaagcacattggtgaaacagctaaagatggccctgatagtgtaaacgcagcagaacacagaacaaattcttcagacaaagttcttacagatggagcgagtaggatttccagaagactgcagaatgttcacaccatgaaaaatgatagacatgcagcttccaacttggaatccagtaagatgatttctgaggaaaatactggaattgggataacccctaagaagtttgtgagtaatgcaactactgagggacatcaaacaaattcaccgaaaatgttacccaataccagtatgaggaatacatttgccaagaggtctcgggtatctgacaccaaaatgactggtgaatcatcagctgataaaactgaaacagtggctggcaagtcactatttgatgacttatttccttcccaaaacattggtcaccctaaaaagctttcaagtagtgcaagtgctgacggctgtggatcactatcctgtaagaatgcatcgcctgccagagttaggaatgcagttgccaagaggaaaataaaagctctaggagacaagtcagacagcaagcttggaaaaattggtggtgccattgtatctgcagctaaagctgtggcatcaaggggaattgaagaaagctcatgcaacatcaacaaagtaagttctgatcaaaattctgtgaagaccgatggaatgagagatgtatctggattattttcgagtgatacttctgtgatagacaggtcagaaaatctgaataactctaagttgagatgcagcaaaagaaataaatctctttctttagaccatgaaaaggagaatatgcaagacaatggtactctcagttctaaatccaatggtagaactgctattatgaattccaacttagatgcaaattcgatgaagcacggtgcaaatatgttcaatgagcccaatagaataaaaggaaacggacctggcaccttgatcacgcctgagcctacatgttttattttaagtggacatcgccaacagagaaaggactatagatcaatacttcggtgcctgaaggcacgagtttgcagggattcacatcattggtcataccaagcgacacattttattgccccagaccctctcaagagaactggaaaattgctttgcagctgcagcagctggcaagtggatactgaaaactgattacttgacctcttgcaatgaggttggcaaattgttggacgaagaaccatttgaatggtctggtacaggccttaatgacggggaaacaatcagctttgaagctcccaagaaatggcgtgttttgaggcagcagatgggccatggtgccttctatgggatgcagataattgtatatggacagctcgttagtccatcgctggatacagtaaagcgtgcagtacgatctggcgatggcaccatcttagcaacctcgccaccgtacacacggttcttgaactctggcgtcgacttcgctgtggtatcttcggccatgccaagtgcagacgcatgggttcaacaattcatcagtcacgatattccttgtatcactgctgattatcttgttgagtacgtctgcaagcatgggcatccgctcgacaggcatgttctcttcaacacaaacgatctggccaacaagtccctcaagaaactactgcaaaaccagcaagaggtggccacagatgtactgaagccacaggaggacggagatcccgacgacctgagctgctcggcgtgcgggagtacggaccggggcgaggtgatgctcatctgcggcaacgaggatggctcgaccggctgcggtgtaggtatgcacatcgactgctgcgaccctcccctggaagctgtcccagaacatgactggctgtgcccccagtgcgaaatgcccaaagcgacgaagaaatctgcgtcacgcgtagctagcaaatcgagagtatccaagcgaaaaaggtgatttttctgccttttttttctgctttcaccctgttttattgaacagaataaacggtgtgtttattttcgtccgttgtaaagtttttatcagtggcagagatgctgtctcggcatttctgagtgtagttttttctcattctgctgctatacaggcgtgttttcccc

SEQ ID NO: 16917 - DNA, 3221 bp, Oryza sativa
  ref <308>: DATABASE ACCESSION NUMBER: AK067386
  ref <309>: DATABASE ENTRY DATE: 2001-12-06
gatactatctacagataatataagtaagacaaaataatatgtattgataaaactgtccaattcatacataggattttctcccctgtagaattgctttatcactttggctggacaaaaatggatgaagctaggcagccattgtccagaaaagtcccaattccttcaagtcagattaacccctatagaatggttatcataattcggctggtggttttggggtttttcttccactatcgagtgatgcatccagtgcctgatgcttttgccttatggctgatatctgtaatttgtgaaatctggtttgccatgtcttggattcttgatcaattccccaagtggtttcctatcgagagagagacttaccttgatcgattgacattgaggtttgacaaggaaggccaaacatctcaacttgcaccaatcgatttctttgtcagtactgttgatcccttgaaggaacctcctttggtcacagcaaacactgttctatctatcctcgcggtagattatccagttgataaggtttcatgctatgtctctgatgatggtgctgcaatgctgacatttgaagcattatccgaaacatctgaatttgcaaagaaatgggttcctttctgcaaaaagtacagtattgaaccacgtgctccagagtggtacttccaacagaagatagactacctgaaggataaggtggcaccatactttgttagggagaggagagcaatgaagagagagtatgaggaattcaaggtgagaatcaatgcattggttgctaaagctcagaaagttcccgaggaaggttggacaatgcaagatggaactccctggcctggaaacaatgttcgcgatcaccctggaatgattcaggtcttccttggccaaagtggcggccatgacatcgaaggtaatgagctacctcgattggtgtatgtttcaagagaaaaaaggccaggctataaccatcacaagaaggctggtgccatgaacgcattggtccgagtatctgctgtactaactaatgctccatacatgctcaacttggattgtgatcattacatcaacaatagcaaggctataaaggaagcaatgtgttttatgatggaccctttggttggaaagaaggtttgttatgtgcaattccctcaaaggtttgatgggattgatcgtcatgatcgatacgccaacaggaacgtggtcttcttcgatatcaacatgaaaggcttggatggtatccaaggccccatctatgttggtactggatgtgtctttagaaggcaggcattgtatggttatgatgcccccaaaacgaagaagcctccgtcgaggacctgcaactgctggcctaaatggtgcatttgctgttgctgctttggtgacaggaagagcaagaagaaaactacgaaacctaaaacagagaagaagaaaagatctttcttcaagagagcagaaaatcaatcccctgcatatgcacttggtgaaattgaggagggtgctccaggagctgaaaatgaaaaggctggtattgtaaatcaacagaagctggaaaagaaatttggccaatcttctgtttttgtcgcatccacacttcttgagaatggtggaaccttgaaaagtgcgagtccagcatctcttctaaaggaagcaattcatgtcataagctgtgggtacgaagataagacagactgggggaaagagattggctggatctacggatcagttacagaagatattctaactggttttaagatgcactgccatggttggcggtcaatttactgcatacctaaactacctgcattcaaaggttctgcaccactcaatctttctgatcgtcttcaccaagttcttcggtgggctcttgggtctgttgaaatattcttcagcaaccattgccctctttggtatggatatggtggtggactaaaatgtttggaaagattttcctacattaattccatcgtgtatccttttacatccattccactcttggcttactgtacattgccagccatctgtttgctaactgggaagtttatcactccagagcttacgaatgttgccagtctctggttcatgtcactttttatctgcatttttgctactggcatcctggaaatgagatggagtggtgttggcattgatgattggtggagaaatgaacaattttgggtcattggaggggtctcttcgcacctctttgctttgttccagggacttttgaaggtcatagctggtatagatacgagtttcactgtgacatcaaaaggtggggacgatgaagagttctcagagctatatacattcaaatggactaccttgctgatacctccaaccactctactcttattgaacttcattggggttgttgctggtgtttcgaatgcaatcaataacgggtatgaatcatggggacccctcttcgggaagctcttctttgcattttgggtgatcgtccatctttacccattcctcaaaggtttggttggaaggcaaaacaggacgccaacaattgttattgtctggtccattcttctggcttcaatcttctcactcctctgggtccggattgatcctttcttagcaaagaatgatggtccacttctggaagagtgtggtttggattgcaactagggagttgggaactcccccatcggtgtgtgctgaaggaatacacacttggttctgtgtagatagaaacacgaaaggtgatgttttgcttttgtcccatggtggtagctcagcctcatatctgcaatatttgggcaaaccggaggctgcggcaaccttgtgaacttcggccaccaagtacagccaaactgcgtttgattgtccagcattatttattactgctttggtggtaaatttaattgggtgagctgaacagaaggtgttggcattgctgttcatgtacaaacttgtgtctcaataaggcaggcaggaatggatctgctatggagtagaaaggtgatgcacagtatttatgtagtgaaacgtgtgtgggtgcccattgaagggcttgttcattccttgtttctcttttttacttatctagaaccaaatggatcatttagtgttagtaatgtagtgcatccagtgttgtaaaggcgccctatttttggttggtaattgtaatcaatatatacttctgttgtcttgacattttcaaagaaaggttgtaaggatgatcgtgatcagatataatatactcgtttctttttgtg

SEQ ID NO: 16918 - DNA, 3245 bp, Oryza sativa
  misc_feature (1638)..(1638): "n"=any one base of a, t, c, or g
  ref <308>: DATABASE ACCESSION NUMBER: AK067387
  ref <309>: DATABASE ENTRY DATE: 2001-12-06
ggataaaccccctcccacactctccactctcgagccatggccctcgccgccgccgccgccgccgcggcagcggccgtctccttcccgcccttgctctcccgtcccgccgcctgcgtgctcctccgctgcggccgccaccgccgcctccctcccctcctcctccgcgccgcctcctcctccacctccagcgccccggacttcaacatcaccttcgcggagcccaccgcccccgccccctcgaaacccaaaccctcatcccccgccccgtccgcggagcaggtggtgccgtggatcgtgcgtggggaggacggcaagccgtccatgcgcaccgcgccgccgccggacgtcctccaggccattgcgctggcggaggcggaggccaagaaggccaagaaggacccccgcaggagccacaagggcgccgccgcccttgccacccccgtcgccaatgccaaggtgagggagaggaaggccgcccccgcgacggcgccgcccaagttctccaaggccgcgaggagattctacaatgagaatatcaaggagcacgaaccgcagcggctcgccaaggtccttgccgcggcaggagtggcctcacgaaggacatgcgaggagctcatcttccaagggaaggtgaccgtcaatggttctgtctgcactgcaccccagaccaaagttgacatctcaaaggattctatctatgttaatggaaaccgcatttccaagaagcttcctccgaagttatattttgctgttaacaagccataagggtatatttgttcctgtggtgaaccaaagtccattatctccttatttgatgactatttgaagggttggaacaagattcaaccaggagtaccaaaaccgcgcttgtttactgtgggtcgtcttgatgttgctacaagtggtttgataataattacaaatgacggtgagtttgcccagaaactctcacacccttcgtcaaatataatgaaggaatatgtggtaactatagatggaccagtgcacagaaatcaccttatagctatcagtgaaggcacaaaaattgatggcgtcaaatgtatacctgatctagtggaaccattggatgtacaatccaatacaaaaaggacccggattagaatagcggttcatgaaggaagaaatcatgaagttcgtgaactcgtgcagaatgcaggcctagaggtttgtttgtatgctcaatattttttttctcaagttttccctttatgttttattgatcatatcttaacatttcccattgtgcaatatcaaatttggtaactcaagtaatttggttctagaatcaagagcaaatgttgtttgttaatcccttatctgattgaattgttagaaatgaggacgattaatgatcagtagcactattgacaaattaacagtatgttttagaagaggattgaaatgcatcttatgtgcttcagagtcttcttttcaacagaaatattattatgatgatcgaatattacaacgacagagattagcagtgtgctaaagacatagtgtacttactaaaaaaatgtcatacacctagcacattgcgcttcagagtttttcttctcaaacctgcttatgatgatatactacattctactatatagttcttagaacagtagcttntgagatgcctagcatgtttattagttgatattatctcaaagcactttgcagatctcaattcttgtgcttctacaagcactacagtgcataagataaattgtactaactgtaatacctgtacaacggaacatcacttgtctgaaagattttgttcacatcagcttgggatttcttcctagtcttaggtgtttctaaaaacaacagtgaagtctaagaagtgcacttatcttatattcttatgggtgaggtaggcatatatccttgtgtaccagtaagtgcgttttttgctggaattgtataccttggaatgttttcccccctctgggaagtagctgatattttatccttgttcttgataggtttatgccttgaaacgtgttcggataggcaggttcaggcttccaccagatctcaggtaatgcagtttaccacatctgtatatgtttgaaatggaccattatacatttacactgtctttttagcatcttagcacctactcgacatgacatgttcttttcatgtaaaagatatgaacactgaacactatatactgtaagaaaaagatcatgtctatgaaacatcgcaagaaagagcatggcactttcttgctgtaaatgatatgaacaataactatatcataagacctgtcaaatattgtgaggtaacatggtgctgtatacttgatagcatctgccagcaggcatgctaagacctgtccagtatagttggctgattcaaagataactggtataccatcattttagaggcatgattccatgcacaaaatgataaattaatttggtatcctggacctttttgttttccatttattcttacagactgggaggaaaaataacactgaatattaacccttgttggatgttacatgttcagaattgggaagtttgttgaacttaaacaaactgatctcaagtcactggaaggcaagaagtagagtgaaaacctgggtccacgggtgctaatttcgacggtaatgtggatccgcacaactccatcgaagaatagcaattgctccttctcacgtcaaggtgaaagctactccacaccaatgcctgtacgttaagttggtgcggatggtgaagatagacaaagacatacttttggcttgaagaacacacaagctgcttggaagaacattttccagtgcccaacaaggcagcagtgtttggtggtggagatgggatattgtcaggttgagggttagtgatagaggctacactttatcaatatatatggtggtggagatgggatattgtcaggttgagggttagtgatagaggctacactttatcaatatagatgctcttacgtgaggtacaggaggtatacgaaccattttgctacacgattcaacacttatcaacaagtagcaatccaggaggtatacgaaccaaattctctcgtaatctgtattttgagcaggaattaaccatgttatggttctgctacagctggaatattattgtgattgacaaaagcatgttcctttttattcttgaacattttgccaatggtagcaatgctacccaaaaaaagacattgtataagtgggtatttgaaagttgctaaaaaatggagtaaatttc

SEQ ID NO: 16919 - DNA, 1887 bp, Oryza sativa
  ref <308>: DATABASE ACCESSION NUMBER: AK067388
  ref <309>: DATABASE ENTRY DATE: 2001-12-06
tagaaccagtttcctctctcgacgcgggttccggccggagctgccgccggagggcggcggcggctaccggcggtggcagaggtggctcaaggcggtggctgcgcggagggtggagccagcggcgggcttccctccctcctcccagatccgatggaggcggaggtagaaggcggaggcggcgcgaagggtggacgccgcggcggtgggtccgctgggaggggtgagggcggtggcgtcggcggccctcccctccggatctggcgaggcggctacgtccgcggctggattcggcacctccgccgtcgtcgctgtggtgcgacctcccccgttcccgaccccctatattggataaggaggggaggagggcgaaggggagggtgaaggcagttttggagggcggctacgccgggaggggggatggcggtggcggcggtggccagatgcggacctccgacgcgcgcggcggacggcgcgaagacggcgaacggtgagtcaccttcccgcctctccctctccctagcctctgcgtctccctcttcctctcctcccctcccctcccacctctcctctcttggtggagtggtggcgtggtgcggggactgccgttgccgacgaggccagctcggagtggcggaccatggcgcgagggagtgtccaacacgcaacccctcccatctgctgcctccgtgcctcctcctcctgtgctgacggctccggtggaggccctcttcgatcgccaccgccaccgtgccctgctacccccttccgcttccctttctccacccgtgtccctctcctccgagtagcgttaccggccgcagcccctctcctccgagcagcgttaccggccgcagcccctcctcctgagctggctgtcggtgccatgccgcgccgctcctcggatgagtcgatgatgccgcgacactgagccttcgtcggagagcatctgatttggccctttgtgcccaggtggagccgtgaaggtaatggccgccgccagccagtggaccaccttcttggtccccctacgacctgcgcgcgtcgatctactaccggggaacgccggatgcaggccgtcgtggctggatctaccagcgctggtgtacgacggcacgaagttttgcaatggcgtcgtgcttgggacaataggagttggtgcgattttgcgccttttgccacaaccaacctcaacatggtgaatttcgatgctttgcttgcttgcgcaaatcagcagatgtctttgatgcttgcagggtacctgtgcgtgcactgtgtatttgtctctgagaagttactgtgaaggaggtgacatgtaagatgctctaacatttttcactcttcactgatcctacagttttatcttccaatgttctaagtcactggaacaagaacgacatggcagagaggataagaagagaaggggtgtccttttctctgaaaagataagaatagctctcttcaagtatgttcaagtaggctagcgtgaaggttctcaaggaggtgaccaagacgaggaaggtgcctgtgctggaggtgcccttggcgttgaccaagatcaagaaggcaaatcttgagacatcctcattctttgagactcttagagggacagagttcccggtcaggacatggatgcgcatctttgtgaaggttagaaatagatgcatgattgcttgcaagagcagttgatttggtttttctaaaaggactttttttgcttgcttacttgcttagttcgttgggtaaaaatgtcaggatcagctgaagaaagggtagtgtacaatgtttttatgctgcatgagctccttaattaatcatgttcttcattatttgtcatggtagtgaaatagtgatgatgctttagcagcccagttgccatgggcattcctg

SEQ ID NO: 16920 - DNA, 1974 bp, Oryza sativa
  ref <308>: DATABASE ACCESSION NUMBER: AK067389
  ref <309>: DATABASE ENTRY DATE: 2001-12-06
tgaccgaggccctcgccggcgccggcgccgccacgcccatctccatccccgaccaccacttcttctccggcgagctcgcctcgggagacgaatccgcagctccagaggcagagaatcgaatgctactaccacccgtgaaaggtacggtgtgtcgtgtaccgccttgaaatcttagctggttcgccggtgatcatgccgtgaagccgccgccgcaggcatcttcccggcgagcgagttggtaggggcgcttccactcgcgtagctacgaatcttggccttcccggcggcgattggatggtgcccctgaccctgaggtgaattccaagaagatccaagaaccatcccctccccggatggatgacgcggaggcgaacatcctcgcgtccctcggccgcgtgcgcctctgcgacctcgccgccgccgacggcctcccgtccgacggctacaagatgtgcgtgtcggccctgatgcagtcgctggcgcagtactcggcggccgtcgtcgagctgcctccggccgacggcgccctgctgaggtcggggctggactccgcacgcctcttcttccaccagcgagggtacggatccggcgaggccggcggcggcggcggtggcggcggctcgggtgatgcccgggagtggtgcaagacgtctggctactatgctgatcctcagatgtggctggaaatgtatgatttcaggcccggcatcacgccggtagagccgaacggtgtggcggaattgccgccgtccgggttgcctgatatgttttcggtgcttgggaaggtttcccgggaggtcttggacgcgattagcttctcgctgaatctgcgtagctccacatttacggagttgcttgacaacatacccttgagaagccaggaggtatcatcttctgttctttcggcatgttgtcattcgaggccgtcgatggaaggagcacagcagcatagcgtcgcttctcaggatgatgaacaattgctcatgttttcggatcaggagaaccagattgacaagactttgcttacgctggttaagtcggataggtcgggcctgtatatcaaagatttgcaagggcgctggattcttgtcgatggggatcttggtccgcttgatattgttgtctatcctggccttgcgctttatcgggaaacagctggctatgtaaacccagctgtgcacaagacggaggtcggcaacttgcaggaatgtatgtttgggcggtgttcgttggtgttcaagctcatgcctaggtcagttgcaaggctgagtggtgaagagatgagggctgctggccatggtgttgatgctcagtttcaggtccccatactagttaatgatttcatgcagacagaacattcagcaaatcaactttttcccaagaacaatgaaccatcaccacatgttgaacaggaagcatcgtataactttgtgatgaagagaaagaaggaaggtagaaaaacaaaggcactccctccttccaaaagacttcgcctagaggcgcagagggtgctcaaggagcgtgtccaggatattgcggataagaaaggcatcaagctgagattttgcagtctcagggactgtgaaagccacataaaatcgttagaccgtccatgtgagaacatcagaactgaaatcggatggccgccaggggttccatttgtccatccacatgaccttccaaacaaagcaaagctcatgtttctggaagcctatgaacccggatggactgcctcccagcaagatttaggttggatcagtagtttaatgatctcacctacatgctgaggagtgaggagctagaaatgtattgctgacgccaaatggatgtagaaatgcataccaagattactgacagtctgacaccaaacgccgttgagaacattgagcttgagcatctgtaaatgtaacctacttactgctgcgattgtgttatattcagatgtgctgtgatcggatcgagatcctttgactt

SEQ ID NO: 16921 - DNA, 2646 bp, Oryza sativa
  ref <308>: DATABASE ACCESSION NUMBER: AK067390
  ref <309>: DATABASE ENTRY DATE: 2001-12-06
gagaagcagctatatatcccttatcctcttatcgcctctcaccctctagcttccctctccactgcctccctcgctcgctatctcctgcctaagcgctaagctaagcgacctgcagttctgcaatgctaaggccaacgtagagctgccgcttaatcccgtctcgcttgattggtttctgacaagaacgagattatcgagaggtttcaattcattagcttagcttagctaattagcttgagggacgccagccatggcgcccaaggcagggaaggccaagccgcacaaggccaagggagacaagaagaagaaggaagagaaagttctgcccaccgtgctggacgtcaccgttgagacgccggactacacgcagctgacgctcaagggcatatcaacggacaagatcctcgacgtccggaagctcctggccgtccacgtggacacatgccacctcaccaactactccctgtcccacgaggttcgtggggcccagctcaaggacacggtggaggtcgcctccctgaagccgtgccacgtcagcatcgtcgaggagggctacacggaggagctcgccgtggcgcacgtgcggcggctgctcgacatcgtcgcctgcaccgccgcgttcgggccgaggaagagtgcgcccgagcagaagcccgcatcgccgtcgtctcccgatgcgccaccgccaccgcccccgccggcgtcgcccgacgccgccaagacccccgggtcgcccgccggcggcggcggcggcgttggcgccggaggcggtggaggagaggagccgatgtacccgccgccgaagctgggacagttctacgagttcttctccttctcccacctctccccgcccctccattatattaggaggtcgacgcgcccattcgttgatgacaagacagaggacgacttcttccagatcgatgtaagggtttgtagtgggaagccggtgaccatcgtggcctccaaagctggattctatccagcagggaagcgagcgctcatcagccactcccttgttgggctgttgcagcagacgagccgggcgtttgatggagcttacaaggctcttatgaaggcttttgttgagcataataagtttggaaatcttccttatggattccggtcaaacacttgggtggtccctcctgctgttgctgatttgccatcggtgtttccaccccttccaactgaagatgaaacatggggtagcaatggtggtggtcagggaagagatggaaaacatgaccataggccatgggcaaaagaatttgccatactggctgcaatgccttgcaaaacagctgaggagaggcaaatccgagacaggaaggctttcctactccatagtttatttgtagatgttgcagttcttaaagctgttgcagctattcagcaaatggtccctgacaagagttcacttgaaacaccgaatgacaccacaaatccagatttgcacacgcaacaaattggagatatgaaaataacagtcacaaaggacaaagcggatgcaagttctaagttagatgtcaagttagatggaagtcaagctccaggaatgctgtctgatgaacttgctaagagaaatctgttgaagggcatcactgctgacgagagtgcaacagtacatgatactgctactcttggtgtggtggttgtgaagcattgtggatacacagctgttgttcaagttccagcagatgctcaactgacaactgtttctctagcacaacatgatattgacattgaagatcagcctgaaggaggtagcaacgcactgaatgtcaatagcttaaggatgctgcttcataaaccatgtattcaaccatctggaggagttcagcggttgcaaagttctcctcatggccttccttctccctcagacagtatagtagaatcacctgcaactgcatctccacaagtttctgaaattagccagaccagtcctgaaggaaatgatacaaccagtggggtcgatactgaaaatgggagtgaaaaacaggacactgatggcaagaaccatgtggaaagtaaagacggcgaaggggagcctgagcaaaccgaagcttccaaaggtgatggagatggtgcaattaccccggaagatggttcagccgtgactgaaaatccaaagtcctgggcagactacagtgatggagaagctgaggctgttgaggttgcaagctgagaaaagataaaccttctcagtacacacagaaaattttacctcttttacagatgagacttttttcttctggacagcatacaaatgcaaaaccggcacactgctattttgtgtagagaattagttcctttcctgatccatctcatggtatgtagcatctacacgtgcttctgcagttccaatggccttgaaaggttatgcaatggcagagaactttgaagatctcttcctgagagtgatcgatgagccctttttttcagcttgctttgcatttgctccaaagaaacttgggaagagcaagcacacgagagattggttagcgcatatataccatagttcatagtcttccctttttgcctatcattttgttcaacttgttattatgtactggaccatctgtcgacataacacatgtgaacttatttttactctgaattttgatatattagaattgttgaacc

SEQ ID NO: 16922 - DNA, 1564 bp, Oryza sativa
  ref <308>: DATABASE ACCESSION NUMBER: AK067391
  ref <309>: DATABASE ENTRY DATE: 2001-12-06
gtagcatgtttagtgtggcggaacagcagcaagctaaaggtgattggatgctgagagtcaacgggagggtgaagattatggatcagaccatggtggggatgacattgaagatagcctccaaagcccacttatttctcgtcaagcgacaagcgtggaaggaaaggagatcgctgcacctcatggcagtataatgggtgctgtgggaagaagtagtagtctcatgcagggcggggaggcagtaagcagcatgggcattggtgggggatggcagttggcttggaaatggactgagagagaaggtgcagatggcgaaaaagaaggtggcttccaacgtatctacttgcatgaagagggtgtgacaggtgatcgcaggggctctatactgtcattgcctggaggtgatgttcctcctggtggtgagttcgtccaggcagctgctcttgtcagccaacctgctctttactctaaggaattgatggagcaacgccttgctggccctgctatggtgcatccatctcaggcagttgctaaaggtccaaaatgggcagacttattcgaacctggagtgaagcatgctctgtttgttggcatagggatacaaatcctgcaacagtttgctggcattaatggagttctgtactacactccacaaattcttgagcaagctggtgttggtgttcttcttgcaaacattggacttagctcctcatctgcatctattcttattagcggactgacaaccttgctgatgcttcccagcattggtattgctatgaggctcatggatatgtctggaagaaggtttcttctccttgcaacaatccctatcctgatagtagcactagctatcttgattctggtcaatattctggatgtggggaccatggttcatgcctcactgtccacagtcagtgtcatactctacttctgcttctttgtcatggggttcgggcctattccaaacattctctgtgcagagattttcccgaccaccgttcgtggcatctgcatagccatctgtgccctaacattctggatcggtgatatcattgtgacatacaccctccccgtgatgctcaacgccattggactcgctggagtgtttggaatctacgcagtggtctgcatactggctttcctgtttgtcttcatgaaggtgccggagacaaagggcatgcctcttgaagtcatcaccgagttcttctctgtcggagcaaagcaggccaaggaggactagttgctcggatcaagtgatcaatcagattgctggtggtaattttgttgcttccaaatcgcgctgcgggttaaacctgtgatggatgctttgttaaagaatcttggaagagatcaaaatgcagtgagcctaaagagatgatttggctgtacatcatgaggctgaatcctgtcgtagactggattttggagcttaggatatgtagatcatctgttccttttggtttggtcattttccatttgtgtttctttggaattcttctccctgtaactagtggtctatcacagttgtgttactggttttgccttactcttgagtttgttttcttct

SEQ ID NO: 16923 - DNA, 2387 bp, Oryza sativa
  ref <308>: DATABASE ACCESSION NUMBER: AK067392
  ref <309>: DATABASE ENTRY DATE: 2001-12-06
gacacgcctccagcctccgagcttgtcgcttccacctcccatggcgtccaccaccaccaagaacgccctgctcctcctcctcctcctcctcctcctctttcctctcctccactcctccctcgcggacgtcgccgccgccgcgccgtcctccgcgtcggcggcggaggtggacgcgctgatggagctgaaggcggcgctggacccgtcgggccgcctgctgccgtcgtgggcgcgcggcggcgacccgtgcggccgcggcgactacttcgagggcgtctcctgcgacgcgcgcggcagggtggcggcggtgtcgctgcaggggaagggactcgccggcgccatctcgccggcggtggccatgctgccggggctcaccgggctgtacctgcactacaacgagctcgccggggccatccctcgccagctcggcgacctccccatgctcgccgagctctacctcggcgtcaacaacctctccggcaccattcccgtcgagctcggccgcctccctgctctccaagtactgtagctcgggtacaaccagctctcagggagcatccctactcagctgggccagctcaagaagctcactgtgcttgccctccagtccaaccagctcaccggcgcgatcccggcatctctcggggacttgccggagctcgcacggctggatttgagctcaaatcgcctcttcggatcgatcccttccaagctcgccgcaatccccaagcttgccacattggacctcaggaataacaccctttcaggaagtgttccttctggcctgaagaaactgaacgaggggtttcacttcgataacaattcagagctctgtggagctcactttgattctctgaaaccatgcgcaaacggcgatgaagacgataatgaagaaggcagtaaaatggctcgtaaacctgaatcaaccaatgtcaagccactgcaagctccacagactatgaatgtgaacagagactgcgacaatggcggctgctcaaggtcatcgtcgtcgtcgacgacgctctcttcaggggctattcttgctggaacaatcatcatcatcggcggagcggcggcgtgcgggatatcggtgatctcgtggcggcgccggcagaagcagaaggtcggcggcggcggcacggtggagagcttggaaggacgagctagtagtagcaatgcgtcgtcgtcgttgatcaacgtggagtactcgagcggctgggacacctcgtcggaggggtcgcagcaggggctccggctatcgccggagtggtcgccgagcgtgaggtacaacatggaggaggtggagtgcgcgacgcagtacttcgccggcgcgaacctgctcgggaggagcggcttcgcggcgacgtacaggggggccatgcgcgacggcgcggcggtcgccgtgaagagcatcggcaagagcagctgcaaggcggaggaggccgacttcctccgggggctccgggcgatcacgtcgctccgccatgacaacctcgtcgcgctccgcgggttctgccgctcccgcgcccgaggcgagtgcttcctcgtctacgagttcatggccaatggctccctctcccgctacctcgacgtcaaggacggcgacgtcgtgctcgactgggccacgcgtgtctccatcatcaaaggcatcgccaaaggaatcgagtatctgcacagcagcaaggcgaacaaggcggcgctggtgcaccagaacatctgcgcggacaagatcctgatggaccacctcttcgtcccccacctctccggcgccggcgagcacaagctgctcgccgacgacgtggtgttctcgacgctcaaggacagcgccgccatgggctacctggcgccggagtacacgacgacggggcggttcaccgaccggagcgacgtctacgccttcggggtggtggtgttccaggtgctgacggggaggaaggcggtgtcgtcggagctccgcctcctcggcggcggtggcggcgcggagtactccggcaagctggacgacctcgtcgacccgcgcctcggcggccggttctccaggcccgaggccgccaagctcgccggcatcgcgctgctctgcaccagcgagtcgccggcgcagcgccccgccatggccgccgttctgcagcagcttggcgccacccagtagtgacagcgtcaagctgccattgtcactgtaggttcaccttgtattattagctaggtgcctaggtgttgtaggagctagctagctgccattgtcgttcttccaagctccaccttcggttcctttctcaggaactcgatcgtttgcaagttagccattgttacatttgccagaattgaagaggttactgcatgattaacactacaataaaattttccatatatgttttctttttccaaac

SEQ ID NO: 16924 - DNA, 2365 bp, Oryza sativa
  ref <308>: DATABASE ACCESSION NUMBER: AK067393
  ref <309>: DATABASE ENTRY DATE: 2001-12-06
gacaaatcgaacgcccatttccccaacgcctcgcgccacccgcgccgatccgttcgcctccgccgccgccgcggccgcctcgcgggctccccggcgacccccccgctcgttcccgtgccgtgccgtgccgtgtcggcgtgtgcccccgccctgcctgacctgtcgtcggttggatcggaggtccaatgcctcttttcaagaggaaacctttctccttacttgagccccccaaggacttggattctaaggagaaggttttccaaattcggttcacaagggagatattccgagattaccaagactacataaacaggttgaatctttatcggcaaagggtttggtcatgtaagatatccggaaaatcaaacttgacttttgaagaagctttggtctccgagcatcatgcagtgtcaaaggctcagaaattacccacagaactgatggctcctgttcttcggatgattcaatacagcactcttggattatatgagcttgttgagaagatatatgctagcctgcaggaagctgtatttgaaggattagaattatatgctaaacaggatggtttagaggctgcttgcaggattttgaagattttagggtctgatggcaccaagatgtatgaagttggttggcttcttagggacaagactatcatcagtacgtcagtgatcaaaggtgaagacttgattcaccggaggccacctgttagtaggaatacgctgaagatttttattagagatgcaacttctcaaaatgccccatgggttatacatgaaaatcttgccaaaagatatggcatacccattgagcccccgaatgacatgatgtttggtgaaggtttgcaaaagaaagggaggaaaagacgtgaggatggacctatgggagatcccaaaaaaaagatgaagaacgatgaggaacacataaatgttccaattaagtacccaatagatgatctcttagtacaaccttctgcagatgatcatgctttattgaagagacctcctctggctacagattttagagtaccaaaatattctgtgggcgatctccttatggtatgggacttctgcttgtccttcgggagggttctgaatctatccccattttcactggtagatttggagaatgcaatttgccacaaagaaagcaatgcacttcttgtggaaatacatacagctatattccacttgcttattaaggatgaaggtgactatttcactattctgcggaccaagaaacggaagctaaaggtgactttagtaacatgggctgaatatctctgtgatttcttggaaatgacaaaaactgaagaactcaccagaaacattgcaacagtaagaaagggttattatagtcttattgatactgatatcaaacttaagattctccgggaactagtagaagaagctattacaacttctcctgtaagagagaaactaagtgaacgggtggaccagcggcaagcgctcgctgcgactaaaagagagagtactagaaaggcaaaggatgagcagaactcaagcattgatggattgcaagatgacaatgagagtgttgatgagcagggtaaggggaaagaagaaaaggataagaacaatatctctcgaagcaagacagaagggaaacgccatggggtacagcacctcgaaacagagattgaaaaattatccatccgttccagcccccttggaaaagacagacactataacaggtattggtttttcaggcgtgaaggaaggctttttgttgaaagtgcagattcaaaagaatggggatactacagcactaaggaagagctcgatgtgttaatgagctcactgaacgtaaaaggtttaagggagagagctctcaaacggcagctggacaagttgtacagtaagataagtaatgctctggagaaacgatcaaaagaaatcacacacaaattgttgcttgaagaggctgtattgcgccgttccacacgtgtccgggctcaaccaagggataacccatccatgtcattcctgaagtatgtcaacaaatggaaggataactaagtagccaagaggacagcttgtccgcaggtgggggaactgagctagctactcgatgacagggttttgttttcagaggaacatatatgaaggtctgatgaggtggtatgttatttgttagccaatcctcatggctgttctttgagcaatcatcactaggtagcaaaaccaattaacctgttggtttacagccttacactggactgatagagcgctaccagagctagtttttggagctatatacccagtgtaacttatcttacatgtaaacatggtattagcctcaggaaccatgagttgctaaactgatatgctgctgatgttatgcc

SEQ ID NO: 16925 - DNA, 2728 bp, Oryza sativa
  ref <308>: DATABASE ACCESSION NUMBER: AK067394
  ref <309>: DATABASE ENTRY DATE: 2001-12-06
gatgggaaatgctctatctgttttcgtcgttggaaagcgtaatcgagaatgccgttagctatccgaaggcatcgccgtcgtctccactctttcccgccacgccatggctgccgccgtcgccgccctccccggcaagctcccacggcagccgccgccgccgccgcctccaccttcacctcccaattcgaccttcccgcgctacccgaagtccttggccgcacaccccgcgctctcctcgagccacccctccgacgtgtcggcgctgctcgccgccgccgcgcgcgccggcgacctccgcctcgggcgcgcgctccaccgtaggctcctccgcggggacctcctcgacagagacgccgtcgtcgcaaactccctcctcaccctctactccaggtgcggcgccgtggcctccgcgcgcaacgtgttcgacggaatgcgcggcctgcgggacatcgtctcctggacggccatggcgtcctgcctcgcgcgcaatggcgcggagcgggagtccctgctgctgatcggcgagatgctcgagtcggggctacttccaaatgcttacacactgtgcgccgtggcacacgcatgcttcccccatgagctctactgcttggtcggaggtgtggtccttgggttagtacataagatgggactctggggcacagacatagcagtgggcagcgcattgattgatatgcttgcaaggaatggggatctggcatcggcacgcaaggtgtttgatggattaatcgagaagacggtagtcgtctggacgcttctgatttcgcgctatgttcagggcgagtgtgcagaggaggctgttgagatttttctagatttcttggaagatggctttgagcccgataggtacaccatgagcagtatgatttcggcatgtacagagctgggatcagtcaggttggggctgcaactgcactctctcgcactccgaatggggtttgcatctgatgcttgtgtgagctgtgggcttgtggacatgtatgcaaagtcaaatatagaacaggcaatggactatgctaacaaggtattcgaaaggatgcggaagaatgatgtcatatcatggactgcactaatatcaggatatgtgcaatctggggttcaggaaaacaaggttatggtgctgtttggagagatgttgaatgaaagtatcaaaccaaaccatataacatattccagtattcttaaggcctgtgccaatatttctgaccacgattcaggcagacaggttcatgctcatgttatcaaatccaaccaagctgctgcacatactgttgggaatgctctagtcagcatgtacgctgaatcaggctgcatggaggaggctagaagggtattcaatcaactctatgaaaggagcatgatttcctgcataactgagggaagagatgctcctctagatcatcggattggaaggatggacatgggcatcagcagttccacatttgctagtctaatcagtgctgctgccagtgtaggtatgctaaccaaaggtcagcaattgcatgccatgacactgaaggcaggatttggatctgatagattcgtaagcaactcccttgtttccatgtattctaggtgtggttacttggaggatgcttgccgatccttcaatgaactgaaggatcggaatgtgatctcatggacttcaatgatcagtggcttagcaaagcatggctatgcagaacgagcactttcattgtttcatgacatgatattaactggtgtgaaaccaaacgatgtcacttacattgcagtgttgtctgcctgtagtcatgttggtctagtgagagaagggaaagagtacttcagatcaatgcagagggatcatggactcataccaagaatggagcattatgcttgcatggttgatctgcttgcaagatcaggccttgttaaagaagcccttgaattcattaacgaaatgccactgaaagctgatgcattggtttggaaaactcttctcggcgcttgtaggagccatgacaatattgaggtaggtgaaatcgctgctaagaatgtcatagagcttgagccacgagatccagctccatatgtccttctctcaaacttgtacgctgatgctggtttatgggatgaagttgcaagaataaggagtgcaatgagggacaacaacttgaacaaagaaactggcttgagctggatggaagttgagaacaccactcatgagtttcgagctggtgacaccagccatccgcgagcacaagacatctatggtaagttggacacattggtcggagaaatcaaaggaatgggctatgtgccggacacaagcattgtgctccatgacatgtcggatgagctgaaggagcagtatctgcttcagcacagcgagaagattgccgtggcatttggtttgattactacttcagcaccaaaaccaatcagaatatttaagaacctccgtgtttgtgctgattgtcattctgcaatcaaatatatgtccaaggccaccagaagagagataatattgagagatagcaacaggtttcacaggatgaaagatggggaatgctcgtgcggagaatactggtgagctgcacagcgcaggtttgtctttgctaatgatcctgatccaggcttaacacagtgaagcttttcttagatagttgtagttcataatttttgtagttgctttgtatagttcataattttttagttgctttctgttttgtacaatcacatgttggct

SEQ ID NO: 16926 - DNA, 1594 bp, Oryza sativa
  ref <308>: DATABASE ACCESSION NUMBER: AK067395
  ref <309>: DATABASE ENTRY DATE: 2001-12-06
gtagcttcgaatcctcttccattccctccttcctctcctctcctctccaagaccaagaaccagcaggagcaagcaaggaaggcgccgaattcgatcggagcaggcaggacgggtccgggatcccgcgccgccatggagaagtacgagctgctcaaggacatcgggtcgggcaacttcggtgtggcgcggctgatgcggaacagggagaccaaggagctcgtcgccatgaagtacataccgcgtggcctcaagattgacgagaatgtggcgagggagatcataaaccaccgctcgctgcggcacccaaacatcatccggttcaaggaggtcgtgctcacgcctacccacctcgcgatcgtcatggagtacgccgccggcggcgagctgttcgaccggatctgcagcgccgggagattcagcgaggacgagtcgaggtatttcttccagcaactaatttgcggcgtcagctactgccacttcatgcaaatttgccaccgggatttgaagctggagaacacgctgctggatggcagccctgcgccgcgcctcaagatctgcgactttggctactccaagtcatcactgctgcactcaaagccgaagtcgacggtcgggactcccgcgtacatcgctccggaggtgctctctcgccgggagtatgacggcaagatggcagatgtatggtcttgtggggtgaccctttatgtgatgctcgtcggtgcttacccttttgaggacccagatgatcccaagaatttcagaaaaacaatcgggagaatcgtatcaattcagtacaaaataccagagtacgtccatatatcccaagattgtagacaactcctctctcgaatctttgtcgcgaatcctgcaaagagaataacaataagagagatcagaaaccacccttggtttatgaagaacttgccgcgggagcttacagaagcggcgcaagcgaagtactacaagaaggacaacagtgcccgtacattctcggatcagaccgtcgacgagatcatgaagattgtacaagaggcaaagacaccacctccatcgtcgactccagtggccggtttcggttggaccgaggaagaagagcaggaggacggtaagaatcccgacgacgacgagggagacagggatgaggaggagggcgaggaaggcgatagcgaggacgagtacaccaagcaggtgaagcaagcccatgccagctgtgacttgcagaagagctgataagatgttgagttcaagctttgctgttgccggcaagagggtgtttttgtgcatgtttgtactttgtggtagttgtgggggtgatgagatgtcgcatccttttcgttattagtttgtctttgtagcttttaactttctgttgttgccttgggtcttccttttcttttatcctgttctttttttttatcttgtgatatgttaacaccgtaaattattactaccaaataggctctccagtgcctttgtaatggttggatggttaagatagcaaggttgtatatagcttgtggaataaaccttatttcttgacaagtgtttatttagggagacaatattttttcttttcaccaacgagataagcaac

SEQ ID NO: 16927 - DNA, 1065 bp, Oryza sativa
  ref <308>: DATABASE ACCESSION NUMBER: AK067396
  ref <309>: DATABASE ENTRY DATE: 2001-12-06
gaagtgacaagtgcaacaataatcgttcacatagggaaaacaaaaaagaaaggtagaagccccactctccttgtacgtacgacagcatgatcggcggcgccgccaggccaccgacaccgccggcggtcgtcgacaagacgatgtgcgccgcgtgcgacatcctgaagctcctaccgacaggcaccgtgctggccttccacgagctggcgccgtccttcaccaaccacggcggcgcgtgcggcgcggccagccggtacaccaccgcggcgctcatcgccgcctgcaccgcgtcctgcgtgctgctctccttcaccgacagcctcgtcagccatgtcgacggccgccgcctctactacggcgtggccaccctccggggattccgcccgttcaacttcgaggggacgcgcgaggagatggaggagaggttcggcgacctcccggggatgaaggtcagggcgctggacttcgtgcacgcgcacgtctcggcggtcgtgttcgtcgtcgtcgcgctcggcaacgccgacgtgcagggctgcctcttccccgacgccggcactggcttcacggagatgttcaggaacctgccaatgggattagggttgctggccagcatggtgttcatgatcttccctactaccaggaagagcatcggctacacggacatgatgccgcacaaggaagactacgggaaaggaggtaataatattcctggccagaccacgccgtcggtgtgatgaagtaaacataacatgatactccatttatactttataggaaggtataaatgactgtacagtgtaaatccgtagtggtgtgtagaagttggtatatatattggacatatatccaagcatggaactgtagaatgtactcatgtggggctttaagccctctttctttatatctaaactagcatatatgtggtgtaaaaaaatcatcggaaattacatatatctcgcgcgttgcagcggaatttgtaggtaattgtcaaggaaaacatatttggataagttacctacataagattagacagagtaatgaaaattgtggattttatttattacc

SEQ ID NO: 16928 - DNA, 2014 bp, Oryza sativa
  ref <308>: DATABASE ACCESSION NUMBER: AK067397
  ref <309>: DATABASE ENTRY DATE: 2001-12-06
gggaggtctctctctccataggactagtctgaactagaggggattaactagggtttaatcaaccgcgtcgaggaccatggcggccgcagcggaggtggatgcggaggcgaggagcatcctcgaacgcgcagcggcgtcctccttcccaccgctccacgccatccaccacctcctctccgtcggggtctgtgtgcggtgcatctttcggttctttggagcctttagttatgcagcaccatgcctttctcttacggcatcagttctgcattcgtttcttgaagagcatgacgattccgcaaaaagtgggtcttgttcatgtttgtcaaaagatgaggcgtactgctctatttgctttggagtgttactgcccacctgctatcaagatgatggtgtagaaccactccgtagtgtttctcctatcgataatgttacttcaattatatctgaagcagtccagagagagggtcaccaagtcgatgagttctccctagaaatttcactgcgtgcagttatagcagctaatgatcgtgccattaggttatatatgaaagagaaatatggcagtgcaaattggttcgatgaaaaaatattttctcaacagacaatgtcagtgaaggaggccttgagaatattgctagtaccgtcagtagaaaaacaaatgaatgtgaaacatggtaataattcatttcgaattcgcttaacttatactcatgatgaaggttcacaaaagcttctaaggcttctgccaaatgaccgtggtcgtaaaagaaaaacagaatcaagagatggaagcagtaaaaggggctcaacagatgatgataaacaaatattaagtgaatcagatgcattcatcaacaagaaccttgaaggcattcaagatcaagacttccgtagtttatttcaattgccacctgaaaaggtgttagaaccctgccatcttgtgatatcttgccaacggtcacccatatatattggtggaagatacttgaagctttcaaggaatgtcagccagtcatgttggataattgatgatgagagaatgggggaagcatcagttgaggagataattggggagaatgtccgtgccatctgcaaaggtgatggctataagttccatgctgctggaagagaagatattgatgttcggatgcttggatctggtcgtccattcttagttgaagtcttgaatgtgcgatctattccatctgctactgaagttcaacaaatagcagataagattaatgactctgaaaagaaacatgtcagggttagaaatctcaagctggtaggcagtgaaatatggacaatgatgcgggaaggagaagcagagaagcagaagcagtatgctgccctcatatggacgtctcgccctctgacggatgatgacctacataatatttctcttatcaaagatatggaaattgtacaaaagacgccaataagagtcttacatcgtagaagtccattagagagaaaacggattatacactggatggagattgaaaaaatttctggcgggtcaaactattacctgttgcatctatgcactcaagctgggacgtacataaaggagtttgtgcacggaggtcttggacgcacacacccaagtgttggcgtcatgttaagctgcagagctgagatactgcaactcgatgtcactgacgttaagatggacttcctgcagtaatatgctattgtcatattgtatcatgctcagttcgtatcattggttattggtgttgtacactatctgtactgatgaaatgcgcagcctgcagaagaccacaaggcaagttcagaaaatatgtcattttactatagtataaccttctgatgagaggctatttgagaaattgagctcagtctgctccaatgtcaacttacagctatgtattatgagccacagttttgccaaaaaaaacatcatgcttatactggcttagggcctgtttaggaagcttatagctgctccaatgttaacttacagctatatattatgagccacagttttgcc

SEQ ID NO: 16929 - DNA, 3493 bp, Oryza sativa
  ref <308>: DATABASE ACCESSION NUMBER: AK067398
  ref <309>: DATABASE ENTRY DATE: 2001-12-06
gcttcctttcccccctccgccccgccccagattcctccgccaccaccgccaccgccatggacgacctcgagcaggccatcctgctcgcctcggattcccccgccgcggccgccgcctccccggccgtgcgcgccgaggcgctcgcctactgcgcgcgcgcccgcgacgagaccccgccgtcgtcgctcctccacctctgcctctacggcctcgcctcctccccgcacgcccacgtccacttctggtgcctccagaccatccacgacgcgctcctcctccgccgccgcctcgccctccccgacgacctcgccctcctccgctcctcgctgctctccctcgccgtctcctccaacgccgcctcccctcccttcctccgcaacaagctcgcccagctcctcgccctcctcgtccgcttcgagtacccccatgtctacccttcctacttcctcgatctcatcccgccctcgccgccgctgccgggacccaccgacatgttcgcccgcgtcctcgtctccctcgacgatgacctgctctcccaggactacccgcgcaacgccgaggaggcctccgatgccgggagggtcaaggacgccatgcgcgcgcagtgcgtgccccagatcgcccgccactggcacgaggccgccgtgtccctccgcgccgccgaccccgccgtcgccgcagtagccctcgatgcggcgcggaggtgcatctcctggatcgatgtctccctggtcgcgaatgacgtgtttgttcccttgctctttgacattgcgctgtccccggggagcgtggctcctcttgctgccgcggcggtggggtgcctctctgctgtggcagcaaagaggatggacgcgagggcaaaggtggcgttgctgaggtcgctcatgtctgcccagaaggggtttggtagccctgacagcggtttgaaaatggcacatttggtgacggcatacgctgtcgaggctctcgagtgttatcgcaagcttggctctagtgatgctgatggagccgcggcattggaaatgctggaagaggtgctgccagctgtatttgcggccgcagagagcggcgatgatgatgaggttgattcgggctcggtgcttgagtttttatctgggtatgtgagtacgatgaaggcaccgacagagaagcaacttggacacttgggacagatactggaggtggtgcggatgcagatgtcatatgatccagtttataggggtcatcttgatgtccttgacaagatagggaaggaggaggaagacctgatggcagagcagcggaaggatttaattgcactatttcggagcatttgtcgtgtggcaccaggtgccactcagctgttcataagagggttgcttgtgacggccctttcatctgcagaagttagtgttgaggatgttgaggtcgcgcttactctgttttaccggcttggggaaatagtgggtgaggaagagatccggactggagctgggttaattagggagcttgtcccaatgctcctttcagcgagattctcatgccacacacaccgcctagttgcattagtgtacctagacacaattagccgctatatcaagttcatgcaggagaatgaccaatatgtgccacatctgcttactgtgttcttggatgagcgtggcatacaccatcagaatgcccacgtgagctgccatgcaggatacttgctcatgagagctatcaggctgttgaaggctaagctagtgccttacttggataccattttgcagagcttgcaagatgccctagtgcaattcactgctacggactgggcaaacaaagatattaagttctccagctcagaggatggcagccaaatattcgaggctgtgggactgttgatcggcattgaagaggtgtcaccagataagcaggttcagtgcttgacagctttacttaatcctctctgtcaacagatcgagtcacttgttatggatgccaaagcacaaggacttgaagaatcatctccaagagctataggtcttcaacagattattgttgcattgactatgatcagcaagggatttaatgaacggcttgtgatgggaagcaggccgacacttggcgttatgttcaagaagacccttgatgtagttttgcaagtcctcatctcatttcctaatgtgaagcccctgcgatctaagatcatatcatttctccaccgtatggttgagatattaggcatttcggtgcttccatgtattccaattgcactgcgacagttgctcgttgataatgaggcaaaagatatgtcggaatttctgtacttaataaaccaaataatatgcaagtttaaatcttcagcaaatgccttattggaggatgtgtttcctgccatcgcaagtcatttatctgtgatactatcacacgatgccttttcaaatggttttgcaagcaatactgaggaaatgcgtgagctgcaagagctggaaaagagattttacgcattcttgcttcatatagcaacacatgatctgtctacagttctcctaactcctagttgtaggcattatctagagaacataatgcagttgcttttgattacttcatgcagccataaagagatatcacatcggaagacatgcgtacagacttttgtcaaccttatcaaagactggtgtagtagctctgaaattgaagataagcttcctggcttccgagtgtttatgattgagaagttcgctactggttgctgtttgcagagtgtccttgacaagtcatttaacttccgtgatggaatttcgattgccctgtttggtgaaatcatgatggctcaaaaggttatgtatgaaagatttggcgagaactttgttgtaaattttgtaacaaaacttcgagaagcacactgcccaccagaccttgctgaacagtactaccaaaagttacagggaaatgatatcaaggcattcaagtcattttatgaatcacttgtcatgaaaataagacaacagcagaatgggagtcttgtcttcagatagcgtcattcaattattttaaatctgtttgccagtgaaagattcctcagttctacaatttgaatatagggtagttgtatcatctatgtacataaagctctaccatttctgagatcagaagatgtatactgcgggaatatttttaccgagcctggctaccgtggcaaagttccttgatcaaggcatgttagtgagatgcaggggatacatccccagagtttctgctgtgagcatacagggtttcattatgtttgttttgatatttctctggaagtgatcattgttctgctccgagcttgaaattttttgtaaggcgattcgggtgaagctaaacagatgggataggcaaaagagtgatgtgtgggccgtgtttttcctgacagaaactgtcacaccgcctgttgtcgtgttaccaaattttggcagtggtttttcacccctttgttagctggggtgctgtacagattctttaatatagttgcgtcgttcgcattaat

SEQ ID NO: 16930 - DNA, 1693 bp, Oryza sativa
  ref <308>: DATABASE ACCESSION NUMBER: AK067399
  ref <309>: DATABASE ENTRY DATE: 2001-12-06
acaacacgacggccgctcgccgatcacacgctgacgcgcacacaccggcgatttctcagccgcaatcgccatggccaccgccaccgccacctccctcgcctcctccgccgcgcaccgccgcctcccgccctcgcgctcagccgctagctccatcctgagagcccccaaccggggccgcctctgccccggctccccgtcggtgctccgcgcgtcgtcctcgtctccgtcgtctccccagcccaccgccggcggtgatgagggggaggaggaggaggaggggcggaggctgtcgaagcagtcgtcgtgggaggcgaaggactccgagggggatgactacctctaccgcctcgggaaggaggccgacaacatgaacatcgccgtcggcgcgcggagcggcatcgtcgacgacctcttcgtcggcaacttcctcggcaaagactcggatattgtgttcgattaccggcagaaagcgaccaggacgtttgagtacctgcaaggagatcattacatcgcacccctcttccttgataaagttgcatgtcatattgtgaagaactaccttgcacatattcttactatcaagattccccttatacttggaatctggggtggaaaaggccaagggaaaacattccagactgaacttatatttagagcaatgggtgttgaacctgttattatgtctgctggagaactagaatctgagaaagcaggagaacctgggaggcttatacgtgaccgatacaggacggcttctcaagtaattcaaaaccaagggaaaatgagtgttttgatgatcaatgacctagatgctggtgttggaagatttggtaacacacaaatgacagtaaataatcaaattgtgattggaactttaatgaacttggcggataatccaaccagggttagcattggccagaaatggagagaatctgatgtaacacacagagtgccaataatagttaccggaaatgatttttcgacactgtatgctcccttgattcgtgatgggaggatggaaaagttctattggcagcctggccgtgaagatataattaacattgttcaccgcatgtatataaaggatggtttgtctttcgaggatgtatcaaaagttgtagacacttttccaaaccaagctctggacttttatggagctttgagatccaggacatacgatcgggcaatcttgcagtgggtagaagagattggtggtcatgaacaactaaatgaaaagcttctcaagcgaaagaaaggagaggagcttccaacatttattcctccaaagaccactgtagatgcgttgattgaatctggggactctctggtgaaagagcaagaactgataatgaattcgaaactgtcaaaagaatatatgaagaatttagatgattagttcaaaacaaaaggtctaatagagaaagtactcgaggtgcctatctcaacccgattttgtatatttttgcatctctgaaaactgcacctttctttctctctctctttggtgcccctgcatcctacattctacagaacagttgcatgtgcaagtatacgatagtgtataaaagaacatgaaaaggtatacaagaattttttcggctgtgttttatgtattttagatatctttatataatcgtttgtacaatggtttgcaactctgaactatatataatgaacttcatatattatagtc

SEQ ID NO: 16931 - DNA, 1338 bp, Oryza sativa
  ref <308>: DATABASE ACCESSION NUMBER: AK067400
  ref <309>: DATABASE ENTRY DATE: 2001-12-06
gggtctccctttgcttcttccgttgcaattccattctcctctctctcctgcttctctctctcctcctcttcttcacctcctcttgtctgtccatagatcgagccgctcagaccaaatcttggatgcgttctctcttctttctcgctgcgagggaggcgggttgttcgatctgcgggtgaaatcgagcgagagatccctagacctccccctacttctctgtagctgtacatatttcaagagaggaaattttgggctggtttctgatacggttcgagaagatttttggcaatttcttcggattttcctccccttgtgggttccttggttcattgagaagaatcaaatgggtgatgtgtcagtcaatcgaccgatcaaggcggagccagctgcaggcggcattgctcagggcaatcgaatcctggacatgatgtcgtcagggtggacagatgagcggcacatgcattatataagctcaatggaggcttctttcgttgagcaactctacaatcacgaacaaaatgatgctggcaacggattcaaggttctccgtggtggggtgtgggagaaactcaaatttgatcggaccagtgcttgctcacggatcgggagaaaatactgcctgcccgcaagcccctggatccagcatttcaggccgcgcgaatgcagtagcaatgcaaggaatgatgcggcggaggctttagtgggtgatcatgaatctggtattcagactatccaagggaggactccgttgtcacatggaagggagtgggaggcttgcaaggaagaaaaagctgttggtgaaagtacagaggtctctgatcagaattttgctgatgatgaggcggaggttgatgcagaatcaagcaaagcatgcaagagaaggaagttaagaagtgctcttacacggaattaccaagttgttccatctgacaaactgtttgcttccacaaaagctgatggaaggaaagatgctccagagtaaggcatgcaagagtggatctggttgaatatgcagtcaatgagaactggatgagttagtattggcgatttagtagtatagttctgaactctgtagagtctgtcttggtagaagaataataggatcgatcactcacaacatggtagatttattgtttgatcatattgttgtaatggtttttttttgtgtgtgttgctgtgttctggcaactgtttgtttgcaatgtgagtaatatgtttatgtttgccacaagatgagaatgatgcaaagcccatcattccttttgccataattccattgtacatacatgtactcccatcatgatattgagaatgaaagatcaccaattttgcagaatg

SEQ ID NO: 16932 - DNA, 2889 bp, Oryza sativa
  ref <308>: DATABASE ACCESSION NUMBER: AK067401
  ref <309>: DATABASE ENTRY DATE: 2001-12-06
aaaattatttttctccccccgtcttcctcgcctttcctgcaggtaggcccccgccaccgagccctctgttacctccccccttctcctccgcttcacccgacgcctcctcctgcccgcccggatctacctcggcgccgcgtcggcgggcggaacccaccggcggccgcgcggggaggaggcgatcgaaaaaacccgaggggggaatcgcgccgggataatcctagggcagaatgttcaagttcctcaaggaggtggtcgcgggatccggatcgggcctcaaggacttcccctacaccatcggcgagccctacgcctccgcgtggggctcgtggacgcaccaccgcggcacctccaaggatgatgggtcgcccgtgtcaatcttttctctgtcagggagcaatcctcaggacaggcacttggttgctggtcggaatggtgttaagagattacgaacagtgcgtcatccaaacattttatcctttcttcacagtactgaagcagaagttcctgatggacctgccatgaagcatacaatttatattgtaacagagcctgttacgccactttcagaaaagcttaaggaactgaacctgggaggcacacagagagatgagtactttgcttggggtcttcaccagatatcaaaagctgtgagctttctcaacaacgactgcaagcttgttcacgggaatgtatgcgtgacgagcgtagttgttactcaaactctagattggaagcttcatgcttttgatgttctttctgaatttgatgctaacaacgaagcctctaatagccccatgttgcaatttgaatggttagttggaacacaatataagccaatggagctaacaaagtcagattgggtgtcaattaggaaatcacctccatgggcaattgattcctggggactggggtgtttaatttatgagctcttttctggtgcaaagctaaccaggacagaggaccttcggaacactgcttcaatcccaaagtctttacttccagattaccagaggctcttgagttctgccccttctcgtagaatgaacccttctaaacttattgacaacagtgagtttttccagaacaagttagtagagaccatacagttcatggaagttcttaacttaaaggacagtgttgagaaagatagctttttccgtaaactaccgaacatagctgagcagcttcctcgtgagatagtcctgaaaaagttgctccctgtgctggcatctgctcttgagtttggttcagctgctgcaccagccttggttgtattgttgaagatgggttcctggcttccagctgaccaatttagtgcaaaggttttgcctacaattgtgaagctttttgcctctaatgaccgagctatccgagttagccttttgcagcacatagatcagtttggggagtcattgacagctcaaactgttgatgagcaagttttcccccatgttgccactgggttctctgatacttctgcttttcttcgtgaactgaccttgaagtctatgcttgtattggcacccaaattatctcagcgtacgatttcaggatctctcttgaagtatctatctaagctccaggttgatgaagaacctgcgatcaggacaaacactacaattcttcttggaaatattgcaaactacatgaatgatgggactaggaaaagggtattgatcaacgcatttactgtccgtgcattacgtgataccttcccccctgctcgagcagctggcatcatggcgctaagtgtcactagttcatactatgaaatgacagagattgcaactcgtattctgcctaacgttgttgtcctcacatttgatccagatagtgatgtgaggaccaaggctttccaggctactgatcaattcttgcaaatagcaaaacaacatcatgaaaagcttactatgggagacaacagcgcagccgaagctactggtatccagttaaagcctggaaatgctggtttacttgggtgggctatgagttctcttactcagaagggaaaaggttctgaccatggtccggtttctagtgcaaatgctagcaactctcaaatttcagcaacctccagtgtcacatcagataatagatcttccaccgtagcatatgcaccatccacttctagctctcttgatcaaactgcaccagcatcagcaaggtcctcggtggatgggtggggtgaaattgaaaacgataatactcaggaagagaatggtagtgataaagaaggatgggatgatgtagatccgtttgacgagaagcctccaccatctcttctctctaacatacaggctgctcagaaacgtcctgtggcgcaaccaaaacaaccagtatcaaattcgtcaagattaaatcaaccaaaggtgcccaaaccagaagaggatcctctatggggttctatagctgctccagcacccaaaaatgcatcgaagtcttcagacatcaaaccttcaacgtcgcacaatgatgacgatgacctctggggttcgatagctgcacctccaccgaaatcagctgggaagcccttgaagccaccagcagcagcaaacagtgacgatttatggggtgccatcgctgcacccccaccatcaaccaaagctagacctctagcttcatcaggtaggggtcgaggaacaaagccagctcagccaaagcttggcgcacaaagaataggcaggacgtcttcaactgggatgtgaagcgccatcgtcatacaagtgttgtacaaggatgaatttttcttctctttttttttctttcggtttctgtcgagaatattcccattttgtaaactagcccaatcatttatatggacatgattatgcccaatgtattatttcacaattgtgtattacgatagcttcaggatatatgtacatc

SEQ ID NO: 16933 - DNA, 2238 bp, Oryza sativa
  ref <308>: DATABASE ACCESSION NUMBER: AK067402
  ref <309>: DATABASE ENTRY DATE: 2001-12-06
gactactctctctctccagatctcgccccaccgccatggacgtcctcgacgccggccaccgcgccacgccggagccctcctcctcctcctcctccgccgccgccgccgacatgtccggcgcctccgtcctcccgctcgccggcgccgcctaccagccctacgtctccgagctcctctccttctccatcgagcgcctccacaaggagccggagctgctgcgggtggacgcggagcgggtgcggcggcagatgcaggaggtggcggtggagaactacggggccttcatcgccgcatccgaggcgctctccttcgtccgcgcgcagctcgaggggttcgacaggcacctcgaggcactgatagaggagataccgaatttaacatctggctgcaccgagtttgttgagtcagcacagcaaattttagaagagaggaagctcaatcagacattactagccaatcacagcacactgcttgatctgcttgaaatcccacaactgatggacacatgtatacgaaatgggaactatgatgaggcacttgacctggaagcctttgttagtaaaatatcaaagttgcaccctgatttacctgttatccaaggcttagctgttgaagtcaagaagacaatacagtcattaatttctcagcttctccagaagcttcgatcaaatattcagttgcctgaatgcctccgtattgttgcacatttgcgccgcattggagtgttcagtgaatcagaattgcgtttacagttcttgagatgcagggaagcttggctttctgggattcttgatgacctggaccaaaggaatgtatatgggtatctaacaggcatggtgggttaccacagaacacatctatttgatgttgtcaatcaatatcgagcaatattcaacaatgataagtccggaagtgatgagaactacgatggtggattgcttttcagctgggcaatgcaccaaataagtaatcatcttaccactcttcaagttatgttgccaaatataacggaaggtggctctctctccaacattcgtgaacagtgcatgtattgtgcaatgggccttggcttggttggactggatttccgtggcttacttccaccaatttttgaaaaagctgtgttaaatttgttttcaaagaacatgggtacagcagtcgagaattttcaggttgttctggattcacatcgttgggttccaatgccatctgttggctttgtagcgaatggagttgtggatgagacttctgatgatgtgacgccgccttctgttttaatggagcatccacctcttgcagtctttgtcaatggtgtttcagcggcaatgaatgagctaagaccgtgcgcaccattgagcttgaaaaatgtacttgccgaggaggtggtgaagggattacaagccgtttctgactccctagtcagatacaatgccatgcggatgctgcgtggaaatgagtcctctcttttcctttcactttgccaggcatttattgaggtcgcatatccttactgctctgcatgttttggccgatgctaccccaatggagcaatattgatcacagagcgacgaagcacattcgacgcagtcagccagctgctgactgtacctgcaaggtccaacagctcagggatcagcatcgaacggaggcaatcaggcagcattgagagaaaacagtctggagccattgaacgtaagcaatcggaaggcatcgaaagaaagcagtcgatcgacgagagcgcggggacaacagccaccgacaatgggaccccagctaacggaccacctccagtggcgaacgatgattctgggacctcctcagcaccagctcagcctgatgggcaaaccactgcagcagcaagtacgtagctttgactttgttaatgcctttgatggaacctgtcgaagttttttggtcatggccttgggttatcgtcagccaacaagtgtctctactgcaagattatgcctgacgagagttcagtttcggttttctcatggtcttacaatgtatacaagcatctcataccaagatctcggatcttaatttgtacaatacagccattaatttttttagctggtcatcattagtccatacctagatgttgtagagtgaaagattgtttcagggtgacaataagccgataatgtgaagtgagcgtgctacgttgttaactgcagagtactgcgcctctatgttttcttcttttccattaaattactgttcattatttctcgg

SEQ ID NO: 16934 - DNA, 1000 bp, Oryza sativa
  ref <308>: DATABASE ACCESSION NUMBER: AK067403
  ref <309>: DATABASE ENTRY DATE: 2001-12-06
gaccttcccctgaagagagagagtgagagagagagagagagagagagaggagacgccaccacgcgcaccgagctcgcgattccaatccccgcacgcctcctccgccaccgccgcctcggcctccgccgccgccgcgaccagggttaggatcacagttgcgatggaacacaaggaggctggctgccagcagcccgagggcccaatcctttgcatcaataactgcggcttctttggcagcgcggcgaccatgaacatgtgctccaagtgccacaaggagatgatcatgaaggaggagcaggccaagcttgctgcctcctccatcgatagcattgtcaatggttgtgacggtgggaaggagcatattgttgctgccagtggtagcacggcggtggcggtggctcaggtcgaggcgaagacgctcgttgtgcagcctaccgatgtcgcgggcaccagcgaggaggttgctgtagtccccaaggtcaaggaagggccgaaccggtgcgctacctgtaggaagagggttgggctgacgggattcaactgccggtgcggtaacatgtactgtgcgttgcaccgctactccgacaagcatgaatgccagttcgactaccggactgcggctagggatgccatcgccaaggccaacccagtggtgaaggctgagaagctcgacaagatctaaggcggctaggggcgtggaatggattgcaacctacaagatttcaacatccacctttgctgctctatcctcacacttcttcttgtcggctgctacatttcttaaattgttcaactttgtgatgcacactgcatcctggcagccgaaagaattcatcctctcagtcaagtcaagtggtttgcgtgttgggtatgttgtgtaatctttattcttggtggttttcggtcagtattgtggtgtctcatttagctagctctgtgatgtactatgtcccatgcttgctacatttcaatcagtaatagttatcagcaatggtccatc

SEQ ID NO: 16935 - DNA, 2869 bp, Oryza sativa
  ref <308>: DATABASE ACCESSION NUMBER: AK067404
  ref <309>: DATABASE ENTRY DATE: 2001-12-06
ggcgtgcagcgcaagtcgctccacacgcgcgcaccattcgattccctcaaaatgcaaaaaaaaaaaaaaaaaatccaaatcggcggtgagccggcgatgagccgaggcggcggcggcggcggcgtagagggagcgggagccggcgaggccgcgatggctccaaactccaaggcgcaaaggttggtgcgtgcggtgcgacgatctccccccctcgccttcgccctctccccgattccggccattttttccggtgttgttacctccctcgattcgcggcggattcgtccaagttcgaaacgcactgttcgtctctgggtttcgctttggctgttggtttgatccgttggctccatctcgatctcgtgctgtgtttttctttttcgtcgtctaaatccgtaataatattccgtggatcttcgtctccgcccaactgccgtaacagcaacatcacgaacggcttgtaagactctctgtggttttgatgattcaagcggtttgatttgacgggacaatcttggtaaaaacgatggagcaggagtgtggatgttgcaaactatggttaaaggccacgtattttggctctatatgttggtctagctggtactaggtgactactacttcctccatttcacaatataagtcattctagtatttcccgtattcatattgatgttaatgaatttagataaatatatatatctagattcgttaacatcgaatatggaaaatgctagaataacttacattgtgaaacggagagagtactgtttagtgaggaaaacacaccagtctaatcttcaattcttcatttaggaacaaaaactcttgaaggatgatatatgcaggtcctcatcaggcggcttggatgacgtggggggtgatgggtagtacttgtctagtgtccagaagcccaggcaaagtgttataaatgatatctggagcacgatggaatatgacaaaattcttgggatgctgaatgtattggagtttctcctaaatttttaggagctaactggcagcagtcagctattacttctgccataaaagcaggtaaatcagcttagctgaggtagtgataaggtgaacctttgataggtatggagaagggggaggctgaatttttgcaccttccgttaataataatgaatcatgctttggttaattcagctagatgttagctcacctacaaatatgcttgctagtttacagtctactattttttgttattcatatctgtcttcagagttcagtttgcacatgttcttcagaacactaggttaaataatgcttgggatgtactgctggaccttaagcatgggattacctcaattttaaagaaagtttctacgtggtaaaagctcttagtgatcaggatcttttctcatcctatttgtgtctgctgactccataaaaaacaaatccctcaaagcaaaatagcatttacccagaatggttctaaaacttctcatccaggaagtaacagaatatgacaaatatcatcttgttgatccagtggtgcattgttaagctcttccattgtaaacagaacttgtgaactcatgagcaatggtaccattaaggccagtggcggagccagaaattatataagactagggctaaggtaaggcttgactaatggagtattagttttctgaacaatttactcaataaaatttaagcaagtttttgaaggcaggcctagggctcaagccctagctgccctaggcctgcctccacccctgattaaggcccggattaagttcaaatgaagatagataacttggatgcactattcgtttgtcagtctagctaaagttgaatacaattaccttttggactgctcatacacatggtgacatggatgcgccttcttgtattagcatctactctcactaatggtataactgaaatatgtatattctaagtgctcttaggcttgttggttctttaaacattacctgtagtaataagcattatgtaaccatgacaacttttttttttgtttttagctaaagttgcatggacagtgtattaaccaattgttctgatgagtgatgacttcatgtactaattccagctatccaaatgaacaatatgaaaataaggcagtttacagtttgatggtctttgctgcggattttacagtctgtatccaggtatagatgtatagggatgccagcatgtatattctttccatagtgtaatgcgataggttttattcattattgatgatagaacagatttagcctgacatttcaattctatagtgctgattctattcttcaccactccttaatattactgtgtgtcgtggtggcatttgtctaatccatcattccagcttggtgacactaaacatcttgagcataatttggtgagcttgtaacggaggctgctagactaggaagccccacaactagagcactcatttttttcccgatagaagtatatatacatgatttgttagtctttttcagtggatacaccaataacattaagattttcttgcgcatacactgatacacagctttagcctcatttctcaaaggttgaccttcagcactcctcacagcttcagattttatggttttgcctctctgcaatctttccttgagtacccctgccccctgagcatttgacttaatttaaagctagtatcttttttggcaggttacaagttggttgatgcatctactaatgcgtataacaatattccttgtcggtttaacagttctttttctgcaaatagagcaagcatttgcctttcgttcatgcttgacaagcacagatatcaacattgaattgaccagctttgttctggcaagttcatctatttatcataatgaagtaacaattaagagagccgagg

SEQ ID NO: 16936 - DNA, 3844 bp, Oryza sativa
  ref <308>: DATABASE ACCESSION NUMBER: AK067405
  ref <309>: DATABASE ENTRY DATE: 2001-12-06
gtgtgtcagcacaggcagaggctttgctcttgctccggtccaagccaaggtgggcgccccgcaagatatcttcttcttccccaaatcgaggacccgattgcggcagctccggtggccggagcagctccctggtcgacgcgtcgccgtctccgtcccggtcgctgccggattccgcgcgcgtgggcgtccatcggatggcaattgggtacccgcgctcgccgtttcatccggtgagcatttcgtcgagcagttggtaggcggggggagttcggggtttcttgattcatggggaggagctttgccgttgatttcctgcgctgaagcagttcatcgtccagtttcttgggcaatcgtttctagggaagcaaatgagatgtctctgctgctagacgcgagctctgttcctcgtttttaccattctcagaacttgacgattgagcatggcagattagggtcgtagagaaaacggtgttcgtgtcagcttcttgaggtcagagagccaagaagccatttgggtttttcttggttcatggaggaaatgggctctgctcagctttctgccctagctgtgtgtgtctgcattttcggatgcctagccatggctgatggccagaacgtcactggaggtgatggttcaaggccagctgagctgcgcatcggtgcattattcacatttgattcggttatcggtagagcagtgatgccggctattgagcttgctgttgcagatgtcaatgccgatccaggtgttcttcctgggacaaagttgagcgttataacgcaggataccaattgcagtggctttcttggaaccatggaagcgttggagcttctggctaaggatgtagtcgctgtattaggtccacaatcttcaagcattgctcatgtcatttctcatgctgttaatgagttccatgttccgcttgtctccttcgcggcatctgatcctaccctttcttcccttgaatatccttactttgtgagggctacaacaagtgattatttccaaatgagtgctatagctagcatcatcaatcaatatcgatggagagaagtcattgccatctatgttgatgacgactatggtagaggtggcatcacagcattaggtgatgctctagcaaaaaagaagtctaagatagcctacaaagccaaattgccacctggtgcttcaaggactaccatcgaggatatgttgatgcatgtgaatgaaatgcagtctcgcgtctatgttgtccatgtaaaccctgactctggcctggcagtttttgctgctgcaaaatctttgggaatgatgagtactggctatgcatggatagcaacagactggctctctgcagtgttagattcatctgatcatattagcactgacagaatggaacttactcagggggttattatgcttcggcaacatgtttctgattctggcattaagcattcgttggtttcaaggtggaacaatctgaccaggaatggaggtcattcaagctttagttcttacagtatgcgtacttatgattctgtatggttagttgctcgtgctgttgaagattttttgagtgaggggaatgcggtatctttttctgctgatccaaatttgcaagatataaaaggaagtaaccttcagttagattccctcagaagtttgaacaatggagaaagattactggagaaagtttggcacacaaatttcacaggggtttctggcctggtacaatttactgcagaacgagatctgatccacccagcttttgatatcttgaatattggtggtacaggtttcagaaccgttgggtattggtcaaacatttctgatctttcagttgttgctccagaaaagttgcattcagaaccactggactcttcaacaaacaatatagagcttcatggtgttatctggcctggtcagacgtctgagaaacctcgtggctgggtgtttccatatcacgggaagccgttgaggattggggttcctctccgcacgagctacaaagagtttgtgatgccagataaaggacctgatggagtaaaggggttttcagttgatgttttcaaagctgcagtaggcttgttgccctaccccgtttcattcgattttattttatttggagatggtttgaagaatcccagctacaatgaccttattgagaaggtttctgacaaccactttgacgctgcaataggggacatcgctattgtgacaaatagaacaagacttgttgattttacccagccatatacagaatctggacttattattttagctccagcaagggagattgaatcaaatgcctgggcttttctaaaaccattcaccttccaaatgtggtctgttctaggtgttctcttcctttttgtgggtgcagttgtttgggtacttgagcatcgtactaatactgagtttcgtggacccccaaggcaacaaattatgacagtatgctgagttttgtaccatttcaggtttagtttttctaccatgtttttcgcgcacagagagaacacagttagtgcacttggtagatttgtgctgcttgtctggctgtttgttgtgctcattataaactcaagctacacggcaagcttgacatcacttcttacagttcaggaactcacatcagggatacaggggctcgatagcttgatatcgagtccaagttcaattgggtatcaagttggatcttttgcgagaagctaccttgtacaggagctcaatattgccgagacccgattggtaccactaaacagcccgtcagattatgcaagagcgctagagttaggatcaggaaatggtggtgttgttgcaataattgatgaacttccatacgtggagatcttcttgtcaaaatactgcaaattcaagacggttggccaggttttcacgaaaagtgggtggggatttgccttcccaagagactcccctcttgctgaggacttgtcaacagcaatcttgacattgtcggagaatggcaatcttcaaaggatccacgatgaatggttaactgggacagaatgcagtgcagatgacaatgaggttggctcaaaccgtttgagcctttcaagcttctggggcctctacctcatctgtggcttttcatgtgtccttgctctcttaattttcttcttgcgaatatgctgtcaatacagtaagtacaataaccaggttggacttgactctcctgaaccagagattgtaactcgatcggcaaggttaactactatcaagtcaataatctcatttgtggataagagggaggaggaggtgaagaatgctctcaagaaaaagcctaatgacagtctgcagccaaggacaggaagcacaggagaacaatctacattaccaccatgacacatttatcactgcctgactgacatattcaacaaaatgcataattttgcactgggcttgctggcagcttcagaaacccggtgatgatttgttctggttctgaaggtcaaacctgtaggagctcctcagagtattttctctgaactctgaagcatgacaggaacattctgaattgtgcccaacagtaacatgtctgaatctccttccaacagctacttccaggagaagtagagcattggttgcaagttcaatttcaaactagttgagaagtttgaacctctgtcaagttgagaggccccttttttcgttcggaagcaacctctgacaagttcttgtagctacaatcttaagcatcttccaaataagttgagaagtttgagtctttgtttggtgtggaatttgtctggttgagcatttcctttcactattgcactgtgctgaaaaggcagtaacatatcttctcttttcaattggctatgcaaggaaacctgtttcagt

SEQ ID NO: 16937 - DNA, 1097 bp, Oryza sativa
  ref <308>: DATABASE ACCESSION NUMBER: AK067406
  ref <309>: DATABASE ENTRY DATE: 2001-12-06
tgaggaagaaaaaaaaatcgaacaaaacagaagagggagaaagcttggggaggaggagctcgtcgcgatcgatggaggtgggagcgaaggtgcccaagaaggccggcgccggcggccgccgcggcggcggcgggccgaagaagaagccggtgtcccgctccgtcaaggccgggctccagttccccgtcggccgtatcggccgctacctcaagcaaggccgctactcccagcgcatcggcaccggcgcccccgtctacctcgccgccgtcctcgagtacctcgccgccgaggtgctcgagcttgcggggaacgcggcgcgggacaacaagaagaaccggatcatcccgcggcacgtgctgctggcgatccgcaacgacgaggagctcgggaagctgctggccggcgtcaccatcgcgcacggcggggtgctgcccaacatcaacccggtgctgctccccaagaagaccggctccgccgcggccaaggaggccaaggagggtaagacccccaagtcgcccaagaaggccaccaccaagtcgccaaagaaggcggcggccgcttagggcacacgcaatgccggcttggtggtggtgtcccccgcttccctctccctcttgtctgaactgaaacgctcctatctgttgtcaatcgtcatcatcatcgtcttcgttgcatgctatatcatttgtcgtgaatcggttcggttgtttgtacgtaatttgtggtgttttctgaatagatggacagtcaagccaatcagtttgtacccgtgtaggttaacaccggtgtagggtcgaggagtgtggtctgggcagagggatgggggaactgtgaattgttagatgctgcctgtaataatattgttaagatttggataatttcgaacaattgatctgtgtttggtagtggatgcacatatatgcctcctggtgggttatttggttcttcgtttgtgtttgggtaattattgaaaatagcattgccatttggggtgcttgggtggttggggaaatgctgtttctcatgttatgtagtggcactttttagcttgatatcatgtaatgtgattgctttacatacattatgagattgtattc

SEQ ID NO: 16938 - DNA, 1276 bp, Oryza sativa
  ref <308>: DATABASE ACCESSION NUMBER: AK067407
  ref <309>: DATABASE ENTRY DATE: 2001-12-06
gagagtgagacgaagggaagaaaaaaaaaaaaactaaaatctcatcggagatggcgagaggcggcggcgtcgcggtggccatggccgtcgcggtggcggcggttgtcctcctgctccaccctgccgcttctgcggcggcggcggggccgaagaaggtggcgacggccgcgaggaaggaggacatcccctacatccggtgccaggtctgcgagcggatcgcgcgggagatctcggcgcaggtggcgaagaagcagcaggcgctcccggcagcgaagaaggtgccggagatcgagatcatcgagatcgcggagaatgtgtgcaacctgaagaagcaggaggcagactggatgctcaagatcgatatcgtagagaaaggcgataagctcgagctcgttgagcaagatgaggaagggcactgtaatgcagaatgcaaaaccattgagcgtgcatgtcaggaggtgatggggtatgctgatagcgatgttgctgaattcgtctacaagaaaaaaccttcagctgatcagctggtcaaatttctttgcaaagatctttctgaagcatgcgttgtggatccaccaccagttccaaaagatcgggtccctggcgaaccttttgctgctaagccatcaaaagatgctgagatggataggatattgaaatcgatggagggtattccaggagctccaagcatgaaaatgtactctagagatgatctgatgaagaacaattttggtgttgacggtgatgatgacgatgatgatgaagatgaggacgatgacttcccaaagaacttgggaaaagttttcaaagataagggttcaccaaagaaagatttgaaacaacaagttgtgaagcagatcaaggatacaggcaaaaagttaaaaggccatgtgaacaaggtgtcaaaggtggtaaagaaatggtggcaagggaagaagaaaccttcaaaatccagcaaaactgaactctaaataccacggaatttccagtccaattttgcattctcctggagatagattgattgtcggaaggttagcgtgccccccagcaaaacatccacagctttcatagatgatcagaacataaacgtgtacaatttttttccagaaattttcagtgtacacctaaactaggaaggtaactggacgagttcggcatgaatattcatgagtcatagtttgcaagtttaggaaaaacaccaattgattgttgctatgccatactctgtaaaacaacggccataccagtaaattagatgattggctgtctgaagttc

SEQ ID NO: 16939 - DNA, 3080 bp, Oryza sativa
  ref <308>: DATABASE ACCESSION NUMBER: AK067408
  ref <309>: DATABASE ENTRY DATE: 2001-12-06
gagactagagccttccgtcgtgtcagtgtgccacccaaactcaccatggcttctgacttcaaggcaatccccttgatcgacattagcccacttgttgaaaagatcgatgatccaaatatggccaatgacaaggatttgctgcaagttgtccgattgttggacgatgcatgtagggaggctggattcttttatgtgaaaggccatgggattgctgagtcgctaatgaaggaagttagggacgtcacacacaagttcttccaacttccttatgaagaaaaactaaagattaaaatgacacctcagaatggatatagaggataccaaagactgggcgaaaatattaccaacggtaaacctgacatgcaggaagcaattgattattatgcgcctattgaacctggtaaatatggagatcttgccaaaccaatggaaggaactaatttgtggccaaaatatccatcaaattttgatgcactactaaaaaactatatcagccttctaagagatctttccagaaagatcatgcaaggtatagccttggcattgggtgggccagttgatgcttttgaaggtagaaccgcaggagatcctttttgggtttgcaggttgattggttatcctgtatcaaccgatattctagaagagcatcgcactgacactggctgtggagctcacacagactatggccttctgacattggttaaccaagatgatgacatatgtgcccttgaggtcaaaaaccaatcaggtgagtggatttatgccaaaccaatcccgggaaccttcgtctgcaacattggtgacatgctgaaggtttggtcaaatggaatatatcaaccaacacttcatcgagttgttaacaattcccctcgttaccgtgtatctgttgcctttttctatgagtcaaacttcgatgctgccatagagcctgttgagttctgccgggagagaacaggtggtgtcgccaagtatgaaaaggttgtatacggggagcatttaattaaaaaagtcttgaataacttcatcaaataaatttgcggaacagaaaaaacaaacgtgtatgcactccaagatcatatcacatcatttatcaataatactgtttgtgaaattttattgtagcacttgttgcatttctataatttgctacattttaggggctatcttaacactaaagatagagttcctttatggttcaccgtactatgctatagtagtgggttgtactagtgatccaacgattcgttggcataataagcctggcctaaggtcatgcctgtaactcgcctggcatctgtttggttgctaccctgaggattctagcctgataaatcttgcctgagtgtactcgcctgagtcaggcgtacaaaatgggtggcctgagcatttcgctccacctgcctgagtaaaatcaccgctcttctatacagtagtgaaaacgagaccacttcttcctcctcctcactgctagcctagggttcttgcggagaccagttcccatcgattcttccatggctccagcagcggtgaccaaggaacttgcagatctggtggccagttgtttctttttccagtaaaagtcctgcatttggtgatctgttagagcgtagctctgaccgtgagagctagcagattgccaagcccccacaatctttgccacgattttctgcagcaagttcataacatggatataggaggaagcaacaaacatggcaagggaaaaagtaaggcacgcaaaggagttgggggatcaggtgtgaggtcaaaacccataaattggccaccagcattctctgaatttcttcttgactggtacattgaaaagaagttagagctgccaccaaagggagtgatcaagaagatgcatcacactgcttgcacatcagctattaatgcaaagtatggcagtacttacaatgttgatcaggttcaacgacactataggtgccataaagagacttgggcacttgtagctcgccatctaaatgagagtggtggtggctgggatgagacaaacaaaatgttgtctctctcccaatctaccttggatagcctatcgattaatgaccgtggaattctttcaaagcctattcagttcttcgataagctgcaagagttgtttagtggttcctcggctgatggagcgtttatggaagatccttcaagtgttgctgattttgatgatgaagctgatgaacttgataatttcaatgatatgtcaacctatgctgaaacaaaatatccacaaggggaagactcggacaaattagaggcagacagtgatgattgcaaggaggtggcagcccttaatgcagcaactgcagcccttaatgcagcaactagtcaagtttcatcttctcataccagtggtctgaagccaaacaagaagagtttcaaaaagtgtgggaagccaaagaccttgcctcaatcacataatgataagggtaagcttaaggcaaagtcatcatctggattgcatgatgatgatgatattgatgtgctgatcactagtaccttggttggaatcaaagataaccttgccaaaccaatacagactgcagcccctcaagatccaaatgcccctctatgggacatgctcaagaagattgccttagaacctgaagataaaatgagagttggactacacctttgcaagccagaatttcaagctcatcgcagttttcttattagcatgggtcaagaatatcttgaacgttgggtttacaagttcttatctggtgatgatacaggcctctagtgagctataggtgcatattggttgcaaaagctaatcgtggttgatgagggtctatattttgctgcacccttttggtcatgcaattgccgcactatatatgtgtttagacaattgctaaatattaacatagatactatgatgatgcatgctgtgacatgctaatctgctagtagtgttgctttctaacttttggacaagttgataaccctagctttgtggcccttttcttttgtcttgtttaactcgtggcattactggctagaactgatctgtatgatggctgaaacttgatgttaaatatattcactatttccctgttgcc

SEQ ID NO: 16940 - DNA, 3780 bp, Oryza sativa
  ref <308>: DATABASE ACCESSION NUMBER: AK067409
  ref <309>: DATABASE ENTRY DATE: 2001-12-06
gaactctctcactctctcagatccaccgccgctgccgcctcctcctcctcgacgccgccgttgcctcctcctcctccaccgccgctgcctctcactctctcagatccaccgccgacgccgcctctcactctatcaccctctcacatccaccgccgccgcctcctcctcctcctccaagccgtcgcctcccgactgccaccgccgcctccttctcctcgacgccgccaccgccgcctcgtcctcctcgacaccgccgtcgccctcccggttcaccgaccacggcctcctcctccctcgtcgtccacgagccctcatggatccggcctccccgaccaccgccgccgcctcccggttcaagatccggcctccccgaccgccagcgcctcctccacgcccaagaccgccgccgccggcctcctctcgaagtccgccaccgccggcttcctctccgccaagtcctcaagacagacgtcgcggccgcttcgccgaccgccgctgccacgccgccgcctctcagatcctcaagaccaatgtcaagcccgcccccaccggcctcctttcctcccaggtacacttcctctcccttgttttttttatgcattgtggatgcaatggatgcagtgtatgatttttgcatgaattttggatgaattagatgtatggatgcagtggatgttttttgcattgtatagttgcatgaattagatattgctatgcagtggatgttttttgcattgtattgctatgcagtggatgcagtggatgaattttgcatgaattttagatgaattagatgtatggatgcattggatggattttttttgagtgcttgacaagtataggtctaaattaacaaatactattagcatctggcatgttttccagagctaaaatttgtaggcagaatttgctactggacatctaaaatcatgtaattggctggaagacaacacagaaacgtgacactgcgttggattccacatataacttgtgtaaatggtcgtaggatacccgaggcattattttattatttccaggcaaaaagaggagagagaatttcgaaatgacggaagtgcccctggcatcgcaccatgtaaccctaactacgtccgattgaactagaccctgtcagactcgttgctccctccacaaacactcgaaatccccaaatctaaccttaggcggcgatggtggcagtggtggagatggttggtagcaatgacaggcaatcggtgctagaagcggctggttgaactacacccaatcggactcgtcgctcccgccacacacaccggaaatccccatccaaacctatcccaaggtggcggctgtggctttggtggcagctggtggctgcggcgggctatcaagtggcactggaagcggcggcagcggtggtggaggtggtggtggtgcatcaaagatggatggctcggcttcatcattggtcatgcgtcaccgcactggtgagtttcccttcaggaattgtccattatgtgtgacacaattggaggcacgaatgtcgaggaccctattggtgtttcttaacgatattactagaaatataattcccagcaatggcgcagaaactctcgtggtatattatggttaccgatttcatctgtaagcgcacgaatataccattatagtatttcacccgagagtattccaagggtatcgtatttatttaatcccgtgggatgattataatagagagagctatactaataatttatatattacttgtaataatcaaagtctaagaaggggttaagataatgaatagggtagagtgacacacagcaagagaattgcatactctcataataaatcatctaagctaagtggaacgaaaatagaaagaatctattcctatacttctaatatacatacacattatacatacttcctagttatatgattatttagctaataccctctttccaaatgccctcgtggtgcttgagaagccactcctgattgccgagtttcttacgataatccgtcatgaccatccaactagggctaaatacggatgagtaccctccccaggaaagtaacttaggattatatacatgcgcggaggaatacccgtactgagctgtcaccatcagcggcccacctcgacatgttcgcagcatataaccccaaataacgatatccagcaatctaaacaccacgcttaaattaccaaatactatcctaatatcatcgtcatgacatagagaaatcgtatacatgatcattatgctcacaccattgcatttcccagataagctagcatcataattaatataatttggatatataataaagttggtattcatatactcggaaagtaatacaataccagagtagtataaagaagaatattctaatatatcaatagtaaaatcaaagaaatactaatcaagaaaaaaaacatcaaagccggccgtccagcacttatgtgttgtccatagcctttaaactacgattttgttaaaaatactacacagaaataagtaggggacaaaaattataactattttcatcacctcctccttgttgtccctctccgtccttcaatgcagggtatagtattcactatgctatcgtaaatactgcaagggtatacatatggttgagttcaggtggcatcagtgaaaggctaatgtaggcaatgtatataaagggacatactaactaatagaatcatttgtgagtgtgccaatagtgtattaagtgttaaatgatgctataggctgatctttggggttacggctacgtcgatgtgggactgatgttccagggcattacataagaaagccttggcaattatagtcaactttatccgttagagagacattcatgtctatttttaatggtgttattgtattattcgattgaagtggtatgtttagactatttatacatagatgtggaaataagtggtgaacaccaagttaagcggtgtagatgatttttagtgtattaataatgtataatttattttagtggtattaatgttgttttattaaaaatgcacatagcttttgaagcaagaacaatagaggagtttatatatgaccacgacaaaaagatttttatttaaatatgagagatattcttattcttatcatatttagtagtatattccatctattttacggtaaatatttttctttttttattgctagataatttacatttccttaattacattgtatatagtgatgtatgatttattttatcattcttttttttaacaacaaatattctctggcttatatcccatctttatagtgtttgaaatacagccctacgatatatacttacgcgaatgcgcgggctaccttgttgatttaaaatgaactctctcttgctggtcacttcggcagtggccaggttaaattcattggccaagctattatggaatcaagacagcacgaagccgcagaggaggagctccaagcacgagcaggctcgactctcgagtgcacaggcggacaagctcgagcacgacgggcggcgtgacgggcgagctcgataggtcggtggacgagctcaacgaatcagagcaatctggaaggaggcgagtaggaatgagatcggcggcaacacaaatggcaagctccatagcagcgctacgttgaatgaatcccaccttgatgtcgagattttacttcccatcataccctttgtaatggacagttggatatgaatggtacctcgtacctcatagtaccttgtgagaccttttcaaggatgggaaagatgctcataaaatttgcttacgct

SEQ ID NO: 16941 - DNA, 1961 bp, Oryza sativa
  ref <308>: DATABASE ACCESSION NUMBER: AK067410
  ref <309>: DATABASE ENTRY DATE: 2001-12-06
gtggtgggttgcaagccgcccggctgtgagaaagccaggcaggaggaggcgcagcagcactagccgcggtataaaacatccaagcgctcctccatcgtcgccaccgctccggtttgcctcccgcgcgagccctcgtcgacgccgccggtatattgctgaaggaagaagagcaccaacctatttatcatgtcaggaggatcttcaccaaggtcaagacgaagcagctttaattctttatcaagagatctcgaactcccttcagagcaaggttgtctctctgttattgtcctcggggcttctggagacctagccaagaagaaaactttcccggcactcttccatctttttgcacagggatttatacaatcaggtgaagtgcatatatttgggtatgcgagatcaaacctttctgatgatgggttaagggaacgcattcgtggatacctcaaaggagcctcagaagaacatctctcagactttttgcaacatataaaatatgtcagtggttcctatgacagcggagaaggatttgagaaattgaacaaggaaatttcagagtatgagaagtcaaacaaatcagaaagccctcgcaggctcttctatttggcattgcctccatctgtctacccttcagtctgcaaaatgatcagaacatattgcatgaatccatctggatggactagagtcattgttgagaagccatttggaaaggacttggactctgcagaagaattaagtgcccaacttggggagctatttgacgaaaaccaactctacagaattgatcactacttgggaaaagagttggtccaaaacctgcttgtgcttcgttttgccaaccgcttgttcttgcctctttggaaccgtgacaatattgataatatacagattgtattcagggaggactttgggactgacgggcgtggtggatattttgatcaatatggaatcattcgtgacatcatccagaaccatttgttacaggttttctgtttggttgcaatggaaaagcctgtctctcttaagcctgagcacattagagatgagaaagtcaaggttctgcagtccgtgaaccctataaagcatgatgaggttgtccttggacaatacgaggggtacaaggatgaccctacagtgccagatgactcaaacaccccaacttttgcatctgtcgtgcttcgggtacacaatgaaagatgggagggtgttcctttcattcttaaagctggtaaagcactaagctcaaggaaagcagaagtccgtgtgcagttcaaagatgttcctggtgacatctttaaatgtaaaaggcaaggaagaaatgagtttgtcatacgccttcagccatcagaagccatgtacatgaaacttactgtcaaaaaacctggattggagatggccaccgagcagagtgaacttgatctgtcatacgggatgcggtaccaaaacgtcaaaattccagaggcatacgagcgtctcatattggatacgatacgaggagaccaacagcacttcgttcgccgagatgagctgaaggctgcttggcagatcttcactcccctgctgcacgacatcgacgaaggcaaggtgaagtctattccataccagcctggcagccgaggccccaaggaagccgatgaactgagcgagagggttgggtatatgcagacccacggttacatatggataccacccacccttgcatagacagacagacagacagacagtagtattgtttagctaggaagagtgcctctaaactgttattattgcggatatattcgtttcatattttcacgataacgcctgactagtgtctacctggcgttgtaataatgtgttgcttcgtaagtataactgctattgtgaaataaaagtgcatgtttcgatcgatgaacagtgtcaggttttgggcattgtagatacactgatgatgaatggatggctgccaacattgttgtttg

SEQ ID NO: 16942 - DNA, 1241 bp, Oryza sativa
  ref <308>: DATABASE ACCESSION NUMBER: AK067411
  ref <309>: DATABASE ENTRY DATE: 2001-12-06
ggtgggttgttgtagcgaccgatcgacgacgacgatgtcggcggtcgagaggaagacggcgtgcgtcaccggcggcaacgggtacatcgcttctgcgctcatcaagatgctgttggagaagggatatgctgtcaacacgacggtcagaaaccccgatgacatggcgaagaactcccacctcaaggacttgcaggcacttggccccttgaaggtcttccgcgccgacatggacgaagaaggaagcttcgacgatgccatcgccggctgcgactacgccttcctcgtcgccgctccgatgaacttcaattcagagaatcctgagaaagatctggttgaagccgccgtcaatggaacgctcaacgcgatgagatcgtgcgcgaaagtagggacggtgaagcgcgtgatcataacatcgtcggacgcagcgatctccagaaggccgctgcaaggcgacgggtatgtgctggacgaggagtcctggtctgacgtcgactacctgagaacagagaagccgccagcctgggcgtacagtgtgtccaaggtgcttttggagaaggccgcatgcaagttcgcggaggagaacaacatgagcctcgtcaccgtgttcccggtgttcaccttgggcgcagcgccggcgccggtggcgaggacgagcgtccccggcatcctctccttgctatccggtgatgagacgcatctcgaagtcctgaagcccctgcagtgggtcaccggctccgtgtcgatcgttcacgtcgacgacctctgccgcgccgagatattcctcgccgagaaggagtcatcgtcattgtcgtcggcagagtcgtcggcgaggtacatctgctgcagcttcaacaccaccgtcttggcgcttgcccgtttcatggccggaaggtacccgcagtacaacgtcaaaaccgaccgcttcgacgggatgcctgagaaaccgagagtctgctgttcgtcggagaagctgatcagggaagggttcgagttcaagtacacgaatatgggcgacatactcgatgaccttgtagagtacggcagggccctgggaattctaccacattgaacgaatagctgatgctgctctaccttcaacctagctgtcacgaggaccgaactggagtatgcgcttgcgaaataagtgatcagtgtttttaaagaaaaaaaaatagtacagtgttttaagatgagcctaatacacagtggataatggcaatgaagtttaatacccttagacc

SEQ ID NO: 16943 - DNA, 1765 bp, Oryza sativa
  ref <308>: DATABASE ACCESSION NUMBER: AK067412
  ref <309>: DATABASE ENTRY DATE: 2001-12-06
ggctccctccgaccgaccgccacaccaccaccccccacccctcttctctctctctctctctctctctctccacatccccatcgtctctcaccgcgttgctgctgctgctgccgcctcggccaccgcgcgcccgcccgcgcgtcgcacgcagcttcttcctcttcttcttcttccccaccctctccacccgatgcggcggtcggcgccgcgctgctgctgctgatgcgggcggtggtgaagaggcgacgagggggagagcgcgggcgctgctgcggctattggagatccggggcttcgtgcgattagtggggtcgtgtgaccccacgggacccaaagtggatccatttcgacggggatggaatctgggagtgagttctatgcgggcgaaggtctccagatcgacagcaagtggctcatcgacccaaagcttctctttgttgggccacggattggcgaaggtgcacatgcaaaggtctacgaggggaagtacaagaaccaaaatgttgccatcaagattgtgcacaagggggacacccctgaggagatggtcaagagggaggggaggttcttgagagaggtgactatgctgtcaagggtgcagcacaagaaccttgtcaagtttatcggggcttgccttgagcctgtcatggtggtggtaactgagctactagtggggggctctttgcgcaagtgcttggttggccttcggcctaggagcctggagcctcgtgtagctgttggatttgcgttggatattgctcgagccatggaatgtttgcatgcgcacgcgatcattcatcgtgatcttaaacctgagaacttgctgttgaccgcagaccagagaacagtcaagcttgttgaccttggtttagcaagagaagagacattaacagagatgatgactgcagagacaggaacataccgttggatggctccagagttgtacagcacagtgacattgaggcatggagaaaagaagcattacaatcataaagtagacgtttatagctttgcaattgtgttatgggaactccttcacaatagactgccctttgagggcatgtctaacctgcaagctgcttatgctgctgctttcaagaacattagacctagtgcagataatttgcctgaggagctatcagaaatcctaacaacctgctggaaggaagaacccaatgagagaccgaacttcacgcagatcgtacaaatgcttctgcattacctttccaccctttcgccaccagaacctctggctccgcctcggacgttcagttcagagaatgcaatcttgcctcctgaatctcctgggacaagctccctaatggcttctcgaggcgacctcggcgacacaccgaagggcaagatggaagacaagccaagggggttctttttctgcttcagccagtgctattagcacagaacaaaggaaactcccctggaggatgcaaatatgaagagaacattacctcctgatgcacagcggctcggatcacggcccggcggcgagtcccggtgcccatagcccatacccaaagaatggcagaagttcttgtagaactgttgtttctgctagtcagtccacccctcttttcttctgacatgtttaacataccggcaggataaatcgagtaagcttttgactcctgctatcagtgatgaaaatagttctgtcgtatattttcggtggacaagttattcaatgtctaaactgcgcccgctcatcgtatagtaataatccgcattcatcagttttctcctgtgctgg

SEQ ID NO: 16944 - DNA, 2320 bp, Oryza sativa
  ref <308>: DATABASE ACCESSION NUMBER: AK067413
  ref <309>: DATABASE ENTRY DATE: 2001-12-06
gtgggggtggggtgaggcacgtgcggcggtcgcattccgggaagaccattaaggtgaagaaagatggtgctggtggcaaaggtacctggggaaaacttatagatacagacacagatgcatgccttgaccgcaatgacccaaactatgacagtgatgaggaaccatatgaactagttgaagcccctgtttcaaccccagtagaggactacaagaaatctgttgccccaattattgaggaatatttcagcactggtgatgttaaattggctgcttctgatctgaaagagttgggttatgatgatttccaccgttactttgtcaagaagcttgtttccatggcaatggataggcatgacaaggagaaagagatggcgtcagtgcttttatcatctctttatggtgatgtgatcagttctacccaaatcagactaggctttgtgatgctgctagaggctgttgatgacttggctgttgacatacttgacgcggttgatgttcttgctcttttcattgcacgagctgttgttgatgacattctgccacctgcttttctcagcagggaaaaagcgagtctctccgagtcttcaaaggggatgcaagttgtacagattgcagaaaagagctatctttcagcaccccaccatgcagagttgcttgaacggcgatggggtggttcaactcgcaccacagtagacgctgtaaagttgaggattactgatcttcttaaggaatatattaagaatggtgacacagctgaggcgtgtaggtgcatcagagaattggcagtgccattttttcaccatgaggttgtcaagcgagctctcactcttggaatggagagtccaactgcagaagctcttattgtcaagcttctgaaggaagcatctgaggaattgctgataagctctagtcagatgatgaagggattttctcgtgttgtagatagtcttgatgacctatctcttgatataccatctgcaaaatctcaattccagacattggtatcaaaagcagtttctgaaggatggctcgactcttcgtttgtacatgtaggtgccaatggggatgtccaagatgatgaacatgagaagctgaggaggtacaagaaagaggctgtttctatgattcatgagtactttctctctgatgatgtacctgagattattcgcagcctcaaagagcttggttctccagagtacaaccccgtctttattaagaagcttataacaattgctatggaccgcaaaaacagggagaaagagatggcttcaattcttctatcctcattaagcatggaattgttctcaacagaagacattgtcaagggtttcataatgcttcttgaatctgcagaagataccgcacttgatatattggatgcctcagatgagctgggactgttcctagccagagcagtgattgatgatgtgcttgcgcctctgaacttagatgagataagcggcaagcttccaccaaactgcagcggggctgaaacattgaacatggcgcgctcccttgccactgcccccatgcaggagagaggcttctgagatgctggggcggtgggacaggatgggttgtggaggacacaaaggacaagatagcaaagcttctggaggagtacgagagcggaggcgatgtaggagaagcttgcaactgcatccgcgagctgcacatgccgttcttcaatcatgaggtggtcaagaaggcgcttgtcatggcaatggaaaagaagaacgacaggatcctcggtctgctgcaggagtgctttggtgaagggatcatcaccatcaaccagatgaccaaggggttctcaagggtgagggatgggcttgatgatctggctctcgatattcctgatgccagggagaagttcctgtcctatgtggagcatgccaagaagagcggatggcttctaccctcattcggcgtcgctacttcagcttgaaccaatgttatgagtgagcaggaagcatcaagctggaccggaccgatgaacaacgaagcaagaaggcacatgccgtgatatttgctgcatccaagatattccaagttgatgattttcatttgcgttttctgatgcttgtcgttgtgcttgcgcgtgtaggtagcggagcgagcccctcttacttgtggttgttgtggtggcttatgtgtctagatctttcacctctgacacacccgttgctgttgttagttgcattccatttttaacttcccccatagacccttttttacttcacaagtaaaaacagagaaaagaacccccgtcatgtaaaagttgctccctgcctcagcatttgcatctgttgcttacccc

SEQ ID NO: 16945 - DNA, 1455 bp, Oryza sativa
  ref <308>: DATABASE ACCESSION NUMBER: AK067414
  ref <309>: DATABASE ENTRY DATE: 2001-12-06
gccccctcttttcttcccccctctctctccccccagcatcgtaccaaaccacacaaccgcagcgacggcaacacgaagctctcctctccggcgagaatagccaagaacgcgacgcgaccacacccaagaggccgaacagatcgagctcaagaaggttttagcccatggggatggattactacaagatcctgggcgtcgacaaggccgccagcgacgacgacctcaagaaggcgtaccgcaagctcgccatgaagtggcaccctgacaagaaccccaacaacaagaaggaggcggagaacaagttcaagcagatctccgaggcgtacgaggtgctgagcgacccgcagaagcgagcggtgtacgaccagtacggcgaggaggggctcaaggggcaggtcccgccgccgggcgccggcggggccggcccgggaggcgcgacgttcttctccaccggcggcgacgggcccaacgtgttccggttcaacccgcgcaacgcggaggacatcttcgcggagttcttcggctcgtccagcccgttcggcggcatgggcggtggcatgggcggcggcatggggggagggcccgggatgcggacaggcggcacgcggttctcgtcgtcgatcttcggggacgacatcttcggctcggcgttcggcggcggcgccgacgggcaccacgggatgcacggcggtggcgccgggagggcgttgaaggcgccggcgatcgagaggaagctgccgtgcagcctggaggagctctacaaaggcaccaccaagaagatgaagatttccagggaaatcgctgacgccagtgggaagacaattccagtggaggagatcctgaccatcgatgtgaagcctgggtggaagaagggcaccaagatcaccttcccggagaaaggaaacgagcagccgaacgtgatcccggccgacctcgtcttcatcatcgacgagaagccgcacccggtgttcacccgtgacggcaacgacctcgtcgtgacgcagaagataccgctcgccgaggccctgaccggccacaccgtccacctgactacgctcgacggccgcagcctgacgatcccgatcacctccgtcatcaacccgggctacgaggaggtcgtccgcggcgagggcatgcccatccccaaggacccctccaagaagggcaatctcagggtcaagttcgacatcaagttcccggcgaggctcaccgccgaccagaagtccggcgtcaagcggctgctggggcagtagatcgagcaactgcaccgatgtagtatcaaagccttttcttgtgttggtggtgttgaactggtgatcatccggcagccgcgacgaatttctcgttgagagctttttcaggtcatgtgacacgatgcaaaaaggcaatgcggccttagatgtgtgagatactgatgagaactagtagaaacgttatacacagcttttgtggtgc

SEQ ID NO: 16946 - DNA, 1564 bp, Oryza sativa
  ref <308>: DATABASE ACCESSION NUMBER: AK067415
  ref <309>: DATABASE ENTRY DATE: 2001-12-06
gtgaatcaagagaaaatgtccatcccctcaacctctcctctgtacctccccctctttagtgtcgcccattgacgccggcaagttgggagaggtttcagctgacctggaatcgagccaagattctagcaagttgtacatcttcgacgttgtgtctggagccactgcagaagacgatgtggagctcatcgctcgtgcgctctcatccgtagctgccaacaaccctgaagcagtctgttagttcatccgctgcctcacgccggagaaggttgtgcgctcgttggattgggacctcctcaaatccgacaaactaagaaagatggctggcggagggcacactcactggactaaggacgaactgcaagcgttcctagagagctacatggaggaaattgcagctcgcaacatcacatcgtcttgccccaaagctcaggggtatgccaactcgcaagcttagatgctggccaaggtaggaaagcaggtcactaggcagcaggcagcaggtgaagaatttctaggatggttgccgccgccgattctagacatggacatggctggaatctatggcaactgggctaggaaggaacccctacactggcagcatcggcgccagcccagagtggtgggaatcaatggaagggatgaggagagggggcaagatcatttatgcgtggtcatgtcagattcatttatgaacaccatgctgttttcagagggaggactgttgtcggcaaccgttcaagtgttcctgtagctgaacctgaatagcagctgctgccagccaaccctggtgtcattgatgtttagcaccttgtcaacttgtcggagtcgccaccatcatctgagccaccatcaaggcttatcaggcgtagggacaaaagtgtggcaacaccgagtagtggatctaggggttccaaaaagacccacagtgactccacaggtgaggctttgtagaggctcgcaaatcttagggttaagtccagtgagagcaaagcacaaaagcagcgggagtaagaggtgaggagtgctagggcttgcattgtgctgatcaagtgtgacccctacttttacgagttattccttggtgatgccattactcaggagatgcgtgagtattacattctcttccactatgccatgaagtttcctaatggtggaggttttccctctaccatcatgctcaggaggttggtttccacctggtggtggagggtttgatggggacgatgggggtgaccctggggatgatggcactgggggagctgatggtgcaacattgtgctgatgggggatggagctggtagtgttgctgctgctgggagcgttgtgtgctgtgtgttgtatgccgaagctgatgggagtgtgctgctatgtgctgtgtgtgatgctgtgaggtgtgtgctgttgttgtgagctgcagtttgcagttgagtgctagctgctattaagtgcaaaagctgatgtttgctgctgcaggaggctaaagctcaagtgtgctcaagcaacctttttattccatcgtgatgatagttgaataatgtgttcgattttaaaatcaacacttgtg

SEQ ID NO: 16947 - DNA, 1358 bp, Oryza sativa
  ref <308>: DATABASE ACCESSION NUMBER: AK067416
  ref <309>: DATABASE ENTRY DATE: 2001-12-06
ggtctacgtcgacggcagcttactttgagagccttggtaggatgagctccgcggccatgaagctcgccgtggtggccgcgctcatctcggccgccgccgtgggcgcccgcgcctgcctcgacgtcggcttctacgacacgacgtgcccgacggcggagacgctcatacagcaggtcgtcgccgccgccttccgcaacgactccggcgtcgcgccggccatgatccgcatgcatttccacgactgcttcgtcaggggctgcgacggctcggtgctgatcgacaccgtgccggggtcgacgacgagggcggagaaggacgccgcgccaaacaacccgagcctccggttcttcgacgtgatcgaccgcgccaagtcggccgtcgaggcggcgtgcccgggcgtcgtctcctgcgccgacgtcgtcgccttcatggcgcgggacggcgtcgtgctgtccggcggcctcggctaccaggtgcccgcggggcggcgcgacggccggacctccctcgaggacgacgcgctcaacttcctgccgccgccaacgtccaccgccgccgacctcgtcgccaacttcaccgccaagaacctcaccgccgaggacatggtcgtcctctccggcgcccacaccatcggcgtctcccactgcgactccttcaccaatcgcatctacaacttccccaacacaaccgatggaattgatccgtcgttgagcaaggcgtacgcgttcttgctgaagggcatctgtccgccgaacagcaaccagacgttcccgacgacgaccaccttcatggacatcctgacgccgaccaagttcgacaacaggtactacgtcgggctgacaaacaacctcggcctcttccagtcggacgcggcgctgctgacggacgccgcgctcaaggccacggtgaactccttcgtgcgcagcgaggcgacgttccggctcaagttcgccagggccatgatcaagatggggcagatcggcgtgctgtccgggacgcagggcgagatcaggctcaactgcagggtcgtcaaccctgtcaatgtcactgctactgcagctgatgatcaccaccttacttcctcttcctcctcttcttcagatgaagtggctgcaagctaattaattaactgattaccactgcttgttagtaggtgtgcatgcacagacagtgattgagatgtgtgtgaagttcagtgtgatgagatgattagatgcttcaattgtttgttgcagttacagtgattgagagacatcagatcttgtttacctgatgtaggtgttggtggttgatactgtcaccatcttgtgcttgtcagtctgaaaaataaattgttgcatccagcatgcactggtgcc

SEQ ID NO: 16948 - DNA, 2577 bp, Oryza sativa
  ref <308>: DATABASE ACCESSION NUMBER: AK067417
  ref <309>: DATABASE ENTRY DATE: 2001-12-06
gcctgtaaacggcgaagtgcacaggctatgatggaaacgggagcagcatgaatattcttcaatcgttactcaagagatagtgctttcacataggaactgaactgcaaacattctttatctgccctctctgctgcaatgatcctcaacttgattatattatttctgggtagccatgctgcaagtgcatcaaataccctttttcctggccaacctctctcaggcagtgaaaccttagtatcagaaaatggcatttttgagttgggttttttctccccaagtggtacaaagcactacctcggcatacgatacaagaacattacaagcagcaatccagtaaacttctggctgggaaacaggattcccattactaacttccttaatgcaacattgtatatcgatgccggtgaactttatattgaggagcttggctctgttatatggacctcaaattcaatgaaaaatgcatcagacactgctgtggcagttatccttaatactggaaactttgtagtaagagatcagctcaactcttctatggtcgtatggcagagctttgatcacccagctgatgcactgctcccaggagcatggcttggattggatatggtcatcggagccaacatcttgcttaccctgtacaagcctccttataattgtaccctcatgattgaccaaagtaggaagaggggatttatcatgttcattgatgggcatgactatcttggaacatttccagattgggtggttacctatgaagaaaatggcagtttggtacgattaaatgatccagaaattccaaatgaaattgaattcatgaaattgcatctggggcaagtcagtttgttgaagtggataaataatgcaacaagtagtggttggcaacctgtgtggagctacccttccagctgcaaagttagtgcttttcactgtggtgtgcacaagcacaggaacatgcaaatgcattgatggtttcagtccaacggagccaagtgaatgggagcttggacattttgttagtggctgctctagaattaccccctcaaactgtcaaggtgctgtttccaccgactcgtttgttttgttagacaacttgcagggctttcctgacaatcctcagaatgtgacggcagcaactagtgaagaatgtcaagctgcctgtctaagcgaatgcttctgcgcagcatactcatatcattctggctgcaagatatggcacagcatgttgcttaatttgactttagctgataaccctccatacaccgagatttatatgcgtataggttctccaaataaaagcaggctgcacatactggttttcatactaatttttgggtcaatagcggttattcttgtcatgttgatgcttctcttgatatacaagaagagatcctcatgtgttgcaagccaggcaaaaatggaaggttttcttgcagtgtactcttatgcacaggtcaagaaagctacaagaaacctctctgacaaactgggggaaggaagctttggaagtgttttcaagggaacaattgcaggttcaacgattgttgctgtgaagaagctcaaaggcctagggcacacagagaagcaattccggacagaggtgcagactgttgggatgatccaacatactaatcttgtccgtcttttgggattctgtactggagggactagaaggttgctagtctatgagtatatgccaaacggttctttggattctcatctcttttcagaaacctcaagggtattaagttggaatcttcgccatcggattgtcattggtattgctagaggtttggcctacctgcacgaggaatgcagggactccatcatacattgtgacattaagcctgaaaatatactacttgatgcggagttatgccccaaaattgcagattttggtatggcaaagcttcttggacgggaattcagcgcggtactcaccagtatccgaggaaccattggctatcttgcaccagagtggatatctggacagcctattacctacaaggcagacgtctatagttttggtgtcctgctcttcgaaataatatcagggcggaggagtacggagaaaattcaacatggaaaccatcgatatttccccctttatgctgctgctaaagtgaacgaaggagatgttttatgcttgcttgatgacaggctggaaggaaatgcgagtttgaaggagctggatgttgcctgccgagttgcttgttggtgcatccaggatgatgagatccacaggccatcaatgaggcaagttattcacatgttggaaggtattgtcggcgttgaattgcctcctatcccggcttcctttcaaaacctgatggacggttatgatagtgatttatattctgtggaagtttgatattggatctcttcagttgctagtagtttttattgcgtgtttcttgaccttgatctgtatcactctattctatttgttttgtagtattcggctatgtagctgtctttgaactctgtttagtctgaactatgttccattgttgtcaattctttgtaatgggattatgttgtggttgaagtcttgcataagtataacttcatttgcccatt

SEQ ID NO: 16949 - DNA, 1590 bp, Oryza sativa
  ref <308>: DATABASE ACCESSION NUMBER: AK067418
  ref <309>: DATABASE ENTRY DATE: 2001-12-06
gagctaagctaaagctacctagctaataggatacactgattaggagaacaatatggcacaactgaggcttacgctgctggctatgtctttgctgatactctcgccggcgatggacggcggcggtggcggcaccgtccaggcgcagatcgtgccggcggcgatctcgttcggtgactcgaccgtcgacgttggcaacaacaactacctgcctggtgccgtcttcaaggccaactacgtgccttatggggtgaacttcggcagccgccgtaagccgacagggaggttctccgacggcaagatcgtcaccgacatcaccggttgttaacttcacacacgagtacacatagaccatagttacctgcatgctatttttgcaaagttgcaattatatattttggttaaaaaatgatatgatgcagctgaaacgcttggctttgagagctatgcaccaccgtaccttagcccgcaggcgaagggggataaccttctccttggcgccaactttgcctccgcggcgtccagctaccatgacgacacggccgccatgtatgatgcaattactttgacgcagcagctcaagtactacaaggagtaccagtccaagcttgcggcgttgatcggccagaagaatgccaccgccatcctgtccgacgcgctgtatatcgtcagcacagggaccggcgatttcatccagaactactaccacaacgcctcgttgtcgagccgctacaacgtcaacagttactgcgatctcctcatcagcatcttctccggcttcgccaacgttgggggcgcggcggattggtgtcacgtctctgccgccgctgggctgtctgcctgccacaatcaggctgtatggcaagggccgcagcgggtgcgtggagaggctcaacggcgatgctgagaccttcaacaacaagctgaacatcactgtcgaagcgctggcgaagaagcattccgacctcaagatcgccatcttcgacatctacacaccgctccgaaacatgtccgagtcacctgcatcgcaaggcttcttggaggcgaggaagacttgctgccagacagggacaaggaagacgagggtctacctctgcaacccggcgacggcggggttgtgccgcaacgccagcgacttcgtgtacttcgacggtgtgcacccttcagaggcggccaatcttgtcatcgccgagtccacgatattggcagggataagcctagttacctaactcactcggtctgactctgaactaccatggcaggtgcatgaaggcgctacagttcatcatcaattagtttcgaaggttgtgttgtgttttcaacctaagaaaaagtgttctccagtgatccattcgcatatacaaacaatatagtttgtttctataaatatgtgcgtcagtctcctactgacctgcataactgcaagttaaatccaacttaaaacatgtcatccaactaagtatgaatgacgaacagtgttactctactcttttttttcttcttcatttttattaagattttttcctacccagactagcagctctcagaacatgctgtaatgatcttaacagaaaagaagtcaaatcgtttgcc

SEQ ID NO: 16950 - DNA, 3306 bp, Oryza sativa
  ref <308>: DATABASE ACCESSION NUMBER: AK067419
  ref <309>: DATABASE ENTRY DATE: 2001-12-06
ggatcgtcgagcgctccttctagggtttctgcttcttctcccccccaccaaatccaggtctccacgcgagtcgacgagcggcgccgccatggagttcgacgagtacgagtacctagagaagacggtcgagccctccgcgccgtcgaccaacggctccggcgagaaggaccgcgccggctcccgccggcgctcctccggcggcggccgcgacgacgaggagcgcgggtcgaagcgctcacgctccggggaggaccgggaccgggaccgtgaccggcaccgaggcggcggcggcggccgggagcaccgggatcgggatgacgggaaggagaaggagaggagcagccgcagccgcggcaaggatgcggagaaggataggggcaaggatggggagaaggataggagcaaggaagcggagaaggataggagcagggacagggacagggacagggacagcgagagggacaggcgcagggagagggatagcgggagggaacgaagaagcagcagccgccctgagcgtcgccgcacggaggaggaggagatggtgagggagctccagaaggagcgcgaacgcagcgaccgcaaccgtgactaccgtgaccgcgatgttagacgtaggaaagatgacggtgcagagccagaagctgatccagaaagagatcaaaggactgtatttgccttccagctatctttgaaggcagatgaaagagacgtctatgagttcttctcaagagcagggaaggtccgtgatgttcgccttattatggacaggaactcgcggcgttccaaaggagttgggtgagttcttggtacctctttatttgctctgatgtacaattgtacattcctttcactggatgttttttctagaatgtacatgtgttctttgactttaacaattcgacttccagaatatgtgggctaaaattttgacccggccataggattgttgttagtcatggatgactccttgcttccataacacatgcaaaatactttgaacatagcaaatatgacattagaaaagacaataatcaaacagtttgagcacacaatatcaccaatttgtcgtttgatggaacttttggggagtatcaggagctttcgaataagcatgttacaatcgtgatgcatgttttcttgtaaaagctcagaagcatattgaagccaccagcagtggtagatacatgtttcacgcttaagtgtgctaatttggaacaagtgcacacttgcaaacaaatatcattacacaagcaacagtagcattgctatgtcaactaggattacccagatctatgcctgctcttggcaagagaaccataactcaaaaaaaaaaacaagtgtgcttcaatcaaaatctacttgtagcctgggcacgtgccagttcaacttccaaatggtatgccttgcttgagtatacattaaattgcaattttgtacacgctttgtctagtctggtttagcttattagagttaatgctataggataaatttggttactacgacaaatgtctcctgaaaagctttttatagacaatttattttgtttaaatttctctttggaaatctaattgattggtagtttttttttgttttgaatattacttatcagactctactacattttgttttttgatctatttctggttgtataattgcataaacacttatatagttcgtaattgattttttttcttggggaacatttttcatcagtttgtcatactcaacaggattgcacactgaaatatttataatttggtctacctgctgggattgtcgacagttacaagtaagatggaatattagatcattctgatgccgtcagcaatcttggacagtttgattccagattatttgacaaaacaattggtgcaggtttttaggaaataacgaggatgcccaagaacgaaatttaaaagtttgctgcacacaaaagtttaatccaaatttctaagtttctgcgagcttatgaaaaaaagactaacatatatgagactacttataaaatgtacttccttgacagtttttagttggatactctgatacgagtactaaagatctatataacatggcaggtacattgagttctatgatgctatgtctgttccaatggcgatagctctaactggtcaggtgcttcttgggcaacaagtgatggttaagccctcagaggctgaaaagaatctagttcagtcaaacgtggcatcaggtggaatagcttcaggtggagcaagaaagttgtatgttggcaacctacattccaatatcactgaggatcaattgagacaggtattcgaaccatttgggcaagtggagcttgtccagctgccggtagatccactaaccgggctatgtaaaggtttcggtttcatccagttcgcacggcttgaagatgcaaaagctgctcagagtttaaatggtcagcttgatattgctggaagagtaattaaggtctcggctgttactgagcaagctggtttgcaagttgggggtgcaactacgggagatttagatgatgatgaaggtggaggtttggcattaaatgcaagctctagagctatgctgatgcgtaaattggaccggagtggcactgcaaccagcataactggtggtattggtattcctggtgtgaacacatctgttgagttaccgtctgcatcggttactggtgctcctctgccaaccacttcactcatacaaccaacaatacctgctattggaacagttcctggcatacaaattcctggtactcaatctgcagatattggttcacctactgagtttctattgctgaagaacatgtttgaccctgcagtggagacagatcctgattttgatttggatattaaagatgatgtccaggatgaatgctcaaagtttggtgcagtaaatcacatttttgttgacaaaaatactgctggctttgtgtaccttcatttcgacagtgtagcagctgcgacagctgctcaacgcgcactgcatggtagatggttcgcaggaaagatgattacagcgacctttatgactgctcagcagtacaaaatgaagttcccaaactagcagactagtgatgggtggcaaagatcgagttggcatacaagtgtgtgaggtgaatctggagccgttcagccgttcgatcaaattcgtaatagtggagcagctacattagttcgtttcctgtaacattatggcgtattggatgaatctcggtccgaatagttgcatcgtaatgatgactgaatatgtgatcaactgcttatcaccctttttgataggaactgttcccggtgacaaggcccttct

SEQ ID NO: 16951 - DNA, 1589 bp, Oryza sativa
  ref <308>: DATABASE ACCESSION NUMBER: AK067420
  ref <309>: DATABASE ENTRY DATE: 2001-12-06
gtaaggggacaactactatcactaaatatctagcatccttatcctcttctttgtctctttcccttcctcctcctgctccaccacgtggctgccttctcctctctctctctctctccttctcctcctccaagttaccaggtaccaggtatcacggataccaggtacaaggtattaggtatcatggtaccagataccaggtaccagccggtaccagatttcaggtatcaaaggtatcagtcggtaccaaaggtaccaagcaccaggtaccaactgatacccaaggtactaggtatcaagatggagtgcacgtggaagcggagaggagtcacttaaattatcccgttacaacgggatcccgttttgtagccgctctcataaatatattataattataaccagtctcttatagttggattacccaccatggattagtctcttgtagttggattattcccccaccatggattagggtgattaaaccggacctcttgttgtgcaggcagtaaaaggtggttgtgtgcttgttgtgacacaacatttacccccaaatttagctctcatttgagctcgtcagctaattaaatatgtgaagatcaagttgctgcagttgatgattttgaattatggatcattcaatcatgggaaagagacaaagaatggtacactggtaatgatcggactttgagccgatttatatatgaggatcatttaaacatgggaaagagccaaagaatggagttctagaggccttcaagagcatggtttctggtcagcacggtagatttcatagagttgtggtgcagaacattctgaaaaacctatgtgcctatgccaaaccagacagtgactgccaatactccatgcagaaattttctgtagacaacatctcgatggcacttagaactatgtatcagacagacaatcttataggggaggacatggaggcctttcttggccttgttttgcagttcagcaaacttctctgtgagaccgatttcatcgaggctgtcaacggaaatggaatcggcttaaggaattttgtacagaagctgaaattaatcctgaagcaagcaaattcacatagaactgaagcaagcgtacaccctggaatcagaagatccgcaattgagcaggtcatatggatggcgcaactgaagcctgaacctcactgcatcgaccatttcatcgactgctaaatgcgggacgatctggtgatggcgcagcagacagccagaagggcatggcaagagaatttcaagctttcatctggaggcgtctctgtcctggagtacgaagagtcccttcgctctgttgcctcgagggcactgaagctgatcctcggtgtagggatgaaaacggtcggaaacggtcggaaaaaccctctaccatttccattttcattttattttctcgaaaatggaatcggaatggcatactcggaaacggtaacgatatcggtaatgtcggtatatcggaaacggaaccgttggaacgggaatctaccgatgtcggccagaagtcgaaaattcatgtcggaaacagcgaaccgtggtatcatcccacatttaactatatatgaagatggcctt

SEQ ID NO: 16952 - DNA, 1309 bp, Oryza sativa
  ref <308>: DATABASE ACCESSION NUMBER: AK067421
  ref <309>: DATABASE ENTRY DATE: 2001-12-06
gatctgcttccctccatccccaccctatcgttccccattcccacctcctccccactacgccccgcgccgccgccagcctggggctgccgcccggccgccgtcctcgccgtggtaaggcctctcctgtcgccgctttcgtcgtccgcctcccctcccccctccctcgccccgacgtggtgtgcgccctctctccgtcgccgccatcgtcgaccgccttcctccgtcctcgccacctccctaagcaccaccaccattgtcctcccctcgaatccgcctccgtcgtcggcccatcagcgccggcgctcgccctcccgcatctcctcctctcaagtgatgcctcctgccgccattcccacaccgtgcagatcgggggaggtggaccttggcctggcggaggtccccactgcgccccgctccgctggccgccgtcgtcgccgtggtgcgtcctccctctgtcgctgccttcgtcgtccgcctccccctggattgagtggatctcgaccccctagattggcaagggaggggaggtgcatgcgacggcgagcacccttctttccccctcaacccgacaaggcacatcggccctccaacctctccgcgggctccctcccaacccgtctctccgtgcgccgcgctctctacctctccaccactcctcctacctattgctttctgccgcttctctctccgggtcagctcatccccatccccaccggctggagcagcaccgcagtgggaaagggacgacgacttcacctgcctcgaccactcgaacgacccccaaaagtgtcctccccaacctgcgagataacgaggggctggctcagcaccgagccttcgactggagtgcgcctccctcaacatcatagtgacggagtctgccgctgaaggacgtcaacgcccttgcccagaatgtgccgttggatggagcagaggtgcgcggagcatgtgatgaacgcagttggcaagtttgctgttatgtgcaggaaggagggcatcaagcaactgggagttgtgttgcatatggtgcatatctggagcaagcacatccgcctatactctgcaggaatctttcttttgtgttcttcagagaatccactgttcttttttttttttacctgtcaatgcgtcagcggtggttgattctgaattttgttcgactaaattttccttcttcgaacggcagcaaatctcttaatttttgctgccccgattggttctacgtgttgtcctggttttttcgttggcttactgtatgtctgtatgtccaatttttctgcaggaaagttgtgtttttatttcatggacc

SEQ ID NO: 16953 - DNA, 3462 bp, Oryza sativa
  ref <308>: DATABASE ACCESSION NUMBER: AK067422
  ref <309>: DATABASE ENTRY DATE: 2001-12-06
gagtttacagattttaatttcgaaggagagagaaaaaaaaaagaagggagagctcgcagtcgcagcgccggcggagggagaagacacggcggcgatggcggcgcgggcggaggcggcggcggcggcgccgcggccgctgcaggcggcggcgatcggcgtctgcgcggagacgggcttctgggacgcgctccgccgcctcaagctggacgtcctcggcaccgacgactcccccatccccatcaccggttattatactccacgccaatatgagaaaattgcaagcctctttaggatatgcccagaatcgatactgccaccttctgccaattcctttggcgataggaacaattgtccagtcccagggaccctactaaacactaataacatgagaggattccaaaacttggacagagcacttctactgaaagctgaagcaaagaagatcttgcatgatattaaatctggcaaagtagaagagaatcctgctttgctactaaggttccttgtgatatcatttgctgatctgaagaattggaaagtatattacaatgtcgcattcccctcgttgatttttgactccaagataactttgctcagcttgaaacttgcctcacaagtgcttaagcaagaagaggcaacatccttgtctaatgcatttactgagtggcgtaaatcaagtgaaacaacagttgttccattctttctgatcaatatatccccagattcatctgctactataagacagctgaaggattggaaagcttgccagggcaatggccagaagttgctattcggattttatgatcatggtaatcgaggttttcctggatgggctcttagaaattatattgcattcgtgagcctgcgttggaagattgagaaagttcattttttctgctaccgagaaaaacgaggacgtcctgacatacagcagtcccttgtcggcgaagcatcatttccggcacctcatgcaggctgggatgaacctgattatgtgcctgaagcaattggatgggaaggagaaacggccgggaaggaatcgaaagagatgaaaccgaaagaaattgatctttcttcaattaatccagcaagtcaagatgaagaaaaacagctgatgcacttgaagcttatgggatggcgccacttccctgtgaatcttgacaagttagctggggtccgttgtcttttgttgggtgctggaactcttggatgtgaagtcgcacgcctacttatgacctggggtgttcggaaactaacagtggttgatgatggttgcgtttccatgtctgatctagtcaaacaatccctctacacggataaggattgtggtgtcccaagagtgactgcaatagtcccacatctaaaagaaagatgttctgcggtggaagttgaaggcatccaaatgggaataccaaagcttgagtataatatttctgccagcaaaatatcaagtattactgatgattgcaagcgtctccaaacattagttgattccaatgatgtggtcttcttgttgaatgaaacatgggagggaatgtggcttccaactcttttatgtgcagacaaaaacaagattgccattactgtgttgttaggatatgacaattaccttgtcatgcgacatggtgctggtccaggaacaaaaagtggaggtatggatgaagggattgctcagatagagaatttgtccacacaagacgctctcggtcggcaaagattgggctgctgtttctgcagtgatactacttcccttgttaattcagatcataatggagcactggatcagcagtcggcagtaatattacctgggctgacctcagttgcatctggcaaagcagtggagctctttgctaggatgttacatcatccagatgaaattcatgctccaggagatattgctggtacagacactgagcatcagcttggtctattgccacatcagatgcaaggatcgctctcaaagtgtgtcttgtcaactgtgctgtgcaattcctcaagcaactgtattgcatgttccaatgctgttttatcagaatatagaagaagaggatttgattttgtaacgcaggccatcacctgtccaacatatttgaaagaccttacaggcatatctgatttgaaaaaaccatttgcttctaaaatttcagccagcattcctgtttctaaaacttcggccagcattcctgtaaacctagagaagctgtccagtgcccgatgtctacttttaggtgctggaacacttggatgtgatgttgctcgtattcttatggactgtggtgtgcggaaactaacagtagttgacagtggtcgagttgttgtgtcgaatttggcaagacagtcactctacacatctgatgatcgtgacagcccaaaagcatcagcaatactagggcgtttgaaagagagatgtccttcagtggatgcaaaaggaattaaaatggaaataccaatgccaggccatcctgtatcacctaatgaagcagtcagtgtgcttgaagattgcaaacgcctccaggagttggtatcttctcatgatgctgtcttcttgctgaccgacacaagggaaagtaggtggcttccaacacttctctgcgcaaatgaaaacaagattgctattactgcagcattaggatatgacagttaccttgtcatgcgacatggggctggtccaggcacgaattgtggaagtccagatgtggttgctgctgctgatacactgtctgcagaagatgttcttggtcgtcagagactaggatgttatttctgcaatgacgtcgttgctcctgttgattccgtgtccaaccgaacactggatcaacaatgtacagtaacacggcctggattgtcctccattacatctggctgtgcggcagacctcttcacaagaatgttacatcatccagatgggatccatgctccaggagagattgctggcacaagcagtgagggtccacttggtctattgccgcatcagatacgaggatcactctcgcagtacaacttactaaccctattgggctattcctcgagcaattgtaccgcatgttccaatgcagtgttgtctgaataccataggagagggatggattttgtgatgcaggtgatcaacgaaccaacctatctggaagacctcaccggcgttactgacttgatgaaatcagcggcctattctcaggtcgagtggattgatgaagttgacgatgacgacgagatggatatatgacgtgttgcatgttttttttttcatgatgttaacacgtgtaaatacaattcatacgcatacttagtccatcagacgatgagaatggcgttcttgaatctcgaatagcctcttcttaaccaactagcaaatcacagtgtaaacattaccaatctctggtgcaacaaacaattgtaacctaggggaaaaaaatgtacactttgctaatattcaatgctaatgttgttcccattctcaattcc

SEQ ID NO: 16954 - DNA, 1743 bp, Oryza sativa
  ref <308>: DATABASE ACCESSION NUMBER: AK067423
  ref <309>: DATABASE ENTRY DATE: 2001-12-06
ggtgggtagctcaccaaaagcctagcttacttagctacgatgaacaccacggccaagctcttggcgctcgccgtcttcgcggcggcggcgatcttgtcgctggactcgcggagcgacgtgaggcagctggagataagggacggcgacgtcgagctgatccctctgctcgacggcgccgcggggccggagagcatagtgttcggcgacgccggcgatgggccgtacacgagcgtgtctgacgggaggatcctcaagtggctgccgccgccggagcgccggtgggtcgagcactcctgctccgtgccggagctgtaagtctttttccacttttggaaactattcagtattcacccgtgttgctagctgcctagtatagttctctgttgttctcatgatttggttagtagtagttggttggttagtttacgatccaggtccagggaccggacaaatacagttgcactgtccaaatccccaattaattgatgattaattgtgagcttaatatggcctgtgaggctgtgagttacatctgtacatatagaaaacaactgaaaagttcttggtataattcaacttcagagttcatatcatcaacaatgttattgttcagttcatttcattttcactactcctttttgactatcatttatgctatggtccaaataatatttatagtatggcagattccgtcctgaattgttggaacggcatttatcgattgattggtcgttgacctgaactgctgcaggttggatagctgcagaggatccaaggacacgaaacgggagcaggagtgtgggcgtccactgggcctcaagttcaatagcaagactggtgagctgtacgtcgcagatgcgtaccttgggctgagagtggtcagtccgggtgagaacgtgtctaggccgcttgttcctaagaggacaggaagcccattcagcttctccaacggcgttgagattgaccatgaaactggagtaatctacttcaccgagaccagtacaaggtttcagagaagggagtttctaaacatagttataacgggtgacaacactggaagattgttgaaatacgatccaaaagaaaacaaggttgaagtcttagttgatggcctacgttttcctaatggtttggctatgagcatcgatggttcttatttgctacttgcggaaaccacaacgggtaagatcctaagatattggattaaaacaccaaaagcatcaactattgaagaagttgcgcaactacctgggtttccagacaacattaagatgagtcctagaggagggttttgggttggtcttcatgccaagagagggaagatcgctgagtggtcaatttcttatccttggctaaggaaactaatctttaagctaccagctcaacgcattcaacgcatcacatcgttcttgacaggatttggtcgtcaagtgatagctttgaggttgagtgaggatgggaagaccatagaagcaatgagtgttcatggtgatgtcaggaagttgttcaagtctattagcgaagttgaagaaaaggatgggaacctctggataggatctgttttgtcaccttttcatgggctttatcgtatatagtttaatacatagagagagaatgcataagttataaaggtagtgaagataatagtatacaagcgtggtgttatgatatgaagcatatgtaacaaaataatagatctagcatttagtgagtgttcaaaataatggttgccaatttttattg

SEQ ID NO: 16955 - DNA, 2986 bp, Oryza sativa
  ref <308>: DATABASE ACCESSION NUMBER: AK067424
  ref <309>: DATABASE ENTRY DATE: 2001-12-06
ggccaagtttgatcacttctaaccgccgcgcccgcgcgcaccaggcacggccagtgacccagttgtacatatacccagcgcacactgcctcactagctcactcccactccgccatccactcccactactctaccatcgtgcgcgcgacgcgcgtgcgaaatcaatggcggccaacggcggcggcggcggcgccggtggctgcagcaatggtggcggtggcggcgccgtgaacggcgcggcggcgaatggcggcggcggcggaggaggcggcagtaagggcgcgacgacgaggagggcgaaggtcagcccgatggacaggtactgggtgcccaccgacgagaaggagatggcggcggcggtcgccgacggcggcgaggacggccggcggccgctgctgttccggacgttcacggtcaggggcatcctcctccacccctacaggttattgacattggtcagattggttgctatcgtcctatttttcatatggcgtatcaggcacccgtacgccgatggcatgtttttctggtggatatctgtgattggagatttttggtttggtgttagttggctgctaaaccaagtggcaaagctgaaaccgatcaggcgtgttcccgatcttaacctcttacaacaacagtttgatcttcctgatggaaactccaacctccctggccttgatgtattcatcaacaccgtcgatcccataaatgagcctatgatatacactatgaacgccattttatccattcttgcagcagactacccagttgacaagcatgcttgctatctttcggatgatggtggatcgatcatccattatgatggtttacttgagactgcaaagtttgctgcgttatgggttcccttttgccgaaaacattccattgagcctagggcccctgagagctattttgcagtgaagtcacgtccatacgctggaagtgcaccagaggattttctcagtgaccacagatacatgcgtagggagtatgatgagttcaaggtacgcttagatgcgctctttactgtcattcccaaacggtcagatgcatacaaccaggcacatgccgaagaaggtgtgaaggcaacctggatggcagatgggacagagtggcctggtacatggattgatccatctgagaaccataagaaaggaaatcacgctggaattgttcaggttatgttgaaccatccgagcaatcaacctcaacttggtctaccagcaagcactgacagccctgtggacttcagcaatgttgatgtgcgccttcctatgcttgtatacatagcccgcgagaagcgcccaggctatgaccaccaaaagaaggcaggtgccatgaacgtgcagctgcgagtatctgccctcctcaccaatgcaccattcatcatcaactttgatggtgaccactatgtcaacaactcgaaggccttccgtgctggtatatgtttcatgctcgatcgacgtgaaggtgacaacactgcctttgtccaattcccccaacgttttgatgacgttgacccaactgataggtattgcaatcacaaccgagtcttctttgatgctactttgctcggcctcaatggtatccagggcccctcttatgttggcaccggttgcatgttccgccgagtcgcactgtatggtgttgacccacctcgttggagacccgatgatggcaatattgtggatagctccaaaaagttcggcaacttggactccttcatcagctcaatacctatagcagcaaaccaagaacgctcaatcatatcaccacctgcccttgaagagtctatcctgcaggagttgagtgatgccatggcatgtgcatatgaggatgggactgactggggcaaggatgttggttgggtttacaatattgcaaccgaggatgtggtgactggtttccgattgcatcggacagggtggcgctcaatgtactgccgcatggagcctgatgcattccgcggcactgcaccaatcaacctcactgagcgcctctaccagattctgcgctggtcaggtggctcccttgagatgttcttctcacataactgcccactccttgctggccgccgactcaactttatgcaacgaattgcttacattaacatgacaggctacccagttacatcagtcttccttttgttctatctcctcttccctgtcatatggatctttcgcggcatattctacatacagaagccatttcctacatatgtattgtaccttgtgatcgtcatatttatgtcagaaatgatcggtatggttgagatcaagtgggcggggctaacactactggactggatccgcaatgaactgttctacattattggagcaacagctgtttacccgcttgcagtcctgcacatagtgctgaagtgttttggtttgaagggtgtctcattcaagctgacagcaaaacaagtagcaagcagcaccagcgagaagtttgcagaactgtatgatgttcaatgggcaccattgttgttcccgacgatagtggtgatagcagtgaatatctgtgccattggcgcggcaataggcaaggctctctttggaggatggtcactgatgcagatgggagatgcgtcgctcgggctggtattcaacgtgtggatcctgctgctgatatatccatttgcactgggtatcatgggaagatggagcaagagaccctatatcctgttcgtcttgattgtgatttcatttgttataatcgcattggccgatattgccatccaggcaatgcgttctggatccgttcggctccactttagacggtcaggtggagccaacttccctacaagctgggggttttaggattaatttgtatctccaatgttagctggtatttgtttttcccttgttgagtttttttttttttttgttgattctcaggttttactttacatgctgtgcatagcatagtacatgtacagaactacagattcgttcaataaatgaaagattagccatttgtct

SEQ ID NO: 16956 - DNA, 2359 bp, Oryza sativa
  ref <308>: DATABASE ACCESSION NUMBER: AK067425
  ref <309>: DATABASE ENTRY DATE: 2001-12-06
ggttgcgcccatccactccactcttccctcctccctccccaaccggagcgaggagtgagcttcagctgatgcggcggcggcaatgagcgtctgggactccatcctgcgcggcggcgggggcggcggcggccggcgattcatcaagcgcaaggacagcgacgccggcgaggctggtcgagcactggaggagctgaggggttcactctacaatgaatttcatacttcagaaggggccaagcgccagcagcagaggttttgcggaccaagtgttgcactgacattcaacttttttgttgctgtcgggatcatcatggcaaacaaaatggtcatgggtgctgttgggtttaacttcccagttgcactatccttaattcattacatagctgcttgggtcctgatggcagtcctcaaggcattttacttgctgcccatagctcctccttcaaaatccactcctttttcctcattatttgctttgggtgctgtcatgtctttttccactggcctagctaacatcagtttgaagcataataggtgagattgctgatttgatttctccatttaacaaatgaaaaggcatatatgcactatagggatgtgctcaatattctgtgtcttcagtgtaggattttatcaaatggctaagatagctgtaaccccaacaattgtagcagcagagtttattcttttcaagaaaaaagtttcccttcgaaaggtatatttgctagagcttagaaactataagcttcatatgctgttcagtattcagttgatctaattgttctcacaatatttaaggctagttcaagtgtcaaataattcaaataagagttgttctaatcgttcgcaggttatcacattggctgtcgtgtcatgtggtgtggctgtagcaaccgttactgatttagagttcaacctttttggtgcttgtgtagcggtagcttggattattcctagcgctgtaaacaagatcttgtggtcaaatttacaacagagtggaaactggactgctcttgcgtaagttgtgatttttgtctgtttcggcaaaaacatattgcatatatccttttctcctaacattcaggttcttttatcaggttgatgtggaagacaaccccaataactgtgtttttctttcttgttttgatgccattattggatcctccgggcttgttgtctttcaactggaatatccagaacagcagtgcaatcatgatatctgctttgtttggttttcttcttcagtggtctggtgctttggcacttgggtgaggcatattatttctatcacatgattgttcttatgttctattggcacactttttaaacgtgagatgaaactgagaaatacagctctgccaaagcttgttagtagtttatggctttatgctctgaaactttttaactcgcttgctggtgctatttgcagctagccaacaatatcttatatttcaaatgaaaaaatgttcatgcatgcctattgcctagatcattagacatggtagcatcacattcttcatgtcaaatagactcataaaattgaactgcaaggatttgcagtatgcctctaattatctgtttgtaacttcatgttacaactgatgattatagctgataggcacttaggcagtatgttgacatatagaatgtcaactgacaacagaatgcctatgtcaggttaacatcagcagctttgcaaaactcacccaaatttgatcccgaaaaatataggacattgttccgtccatttattggaaaaatgtagtttttatcacttatcctagtttgcgaaacctgtggaatgaacttaactatttcactggattttgtgtgatgcagcgcaacctctgctcttgctcatgttgtgctaggccaattcaagactattgtcataatgctctctagttacttggtatttaactctgatcctggattcaccagtctttgcggagctataattgctcttggaggcatgtcagtctacacttacctagggctgaaagaatctgccagtggtggtaagagagctccttcaacatccaggcaaaactctcatttgctgaagtccaaggttattgtagatggagaaaagccagaaacaaggcctattgattctgtttaagttgaagaattgccatttattcttgtatttttgaaaatccactagaagcattaggtgattgcatttgttgaatatttgttgtcaaccagttcaaccgacctctgagtcgcatttgttggttcttgctagctatgattcttgttttaggcgattttggtcagctattgtttgtagctgaccatgtccgttgtatatatagacacatattatttttccagtgttaagcaattttgctcc

SEQ ID NO: 16957 - DNA, 2189 bp, Oryza sativa
  ref <308>: DATABASE ACCESSION NUMBER: AK067426
  ref <309>: DATABASE ENTRY DATE: 2001-12-06
ggtcttccttccctccccctcttcctcctcttgctcttcccttccaattccaatcccgcgcgccgatccgatccattcccaccaccaccaccgtcgtctccctcactccaacctccgccacctgcgaaacctaagcttgctgctccccgacgaggctgatacgtgctgagatactactagtagcacctgtacgtctaagctagagctatggggtgcgtgtgctccaggcggtttcgggacgacgccgcgccgcgctcggtgcagccgctcgccgccgcctacgaggcgcgccggggtcgctacggccctggcgacttcgactccggcgagctcgccatcccgccgcccaagctactcacctcccacaaggtaccagaaacaggtacacttttaggaagagccagcattgctgctgtcgaggtgttagataccctcgggagtagcatgacaaatttaaatcatggcagtggatttctctctgggggaacaaatcgaggcaatagagtctgtattttagcatttgaagtcgcaaacacaatagctaaagcctccaatttgtggagatcttgctccgacacgagtataaaggaattgaaggaagaaatattgcgttcagatggagtgctaatattggtctcctcaaattccagtgaactattgtatattgcttatgttgacaaaagggatgaacttgacatcttttcaagagaagtaattcgatttggtaacctgtgtaaagacccaacatggcataacttaggacgctatttcaacaaattaacgacagattttgcgcctcaggattcaaaagagcatatggaaactactacccagcaattgatcaatttggctcaaaatacttctgaaccctatcatgaattgcatgcgctggacaggtttgagcaggattttcaaagaaaatttcatgaagaagagtcagtgccagcagccagacgtgagagtgttatgatcttgcatagtgaactaaagcgccagagaaagcttgtgaaaactctcaagaagaagtctttgtggtctcgaactttagagacgattgtggagaagcttgttgatattgtcgtatttttacataagcaaattcgggattcattcagtgaagctgtttctgtaggtgctgaccttttcaattcagagcaagctcaaaacaaaagactaggttcctgcggtctagccttacattatgcgaacataatcaatcaaattgaaaatattgtttctagaccactctctcttcctcctagtgctagggacaatctgtatcatggtctgccagtaacagtgaagtcagctctcagatcgcgattgcaatcagttaatgcccaagaagagcgtactgtagctcaaattaaagctgaaatgcagaaaactcttcgctggattctaccgattgctgaaaatacaataagagcacatcaaggttttggatgggtcggcgaatgggcaaaccttggttgcgaaatgaacaagaaatcaggctcccagctcagtatcacccgtgtccagactcttcattacgccgataaggcaaagacggagcaatacatgctcgatctggtggtgctgctccaccatttagttgtccaggtgaagaacagaggctatgggagcaagtcctcaaagcacgaccagtcccgatcccgcaagggaatggatcttcaacctgaatccaagctcaacacatctccagtgaacaacgccacatatccgagcccgttgtcggagtccgaacgcgagacgctggaccacctgagcttcaagaggacgggctacggtaggagcaagagctgcgagcctccacccaatagagggaagaaggcacatcgaacctgggattcatgccggagccatggcagctcgccggcgagggaattcggtaggaactcagcttcagagcttgacaagacgatggacctggatgtaatagatgggttagatagactgacttcttaccacccaacatcccccacattttgttaggtatatgctgcacaaaaataggtattcttttggtgttcctacggttgattgatcgtatatatatcttgtaaatgtgtgtgatctacctatatattctcttacatgtacatatatacatagcttagtagtacagccctgagtttgagtggaaatatagcaagatcacaagtgatgctctatgcctcgttccc

SEQ ID NO: 16958 - DNA, 4136 bp, Oryza sativa
  ref <308>: DATABASE ACCESSION NUMBER: AK067427
  ref <309>: DATABASE ENTRY DATE: 2001-12-06
gaccctagcgtcggcggcggcggcggtggcggcggagatgagcgtgtggaactacgtcgtgacggcgcacaagcccaccagcgtcacccactcctgcgtcggcaacttcaccggccccaaccagctcaacctcatcgtcgcgaaatgcacccgtatcgagatccacttgcttactcctcaaggcctccagcctatgattgatgtacctatctatggaagaatcgccacactagagctcttccgccctcataatgagactcaggacttccttttcattgcgactgaaagatacaaattctgtgttctgcagtgggatggagaaaaatcggagcttctcactagagcgatgggagatgtttctgatcgcattggtcgccctacggacaatggacagattgggatcatcgaccctgactgtagacttattggtcttcacctctacgatggattatttaaggttataccgtttgataacaaagggcagctgaaggaagctttcaatatcaggcttgaagaacttcaagtattggacatcaagttcctgtatggctgtgttaaacctactatagttgtcctctaccaggataacaaagatgcaagacatgttaagacatatgaagttgcattgaaggacaaagactttgttgagggtccttggtcgcagaacaatttagacaatggtgctggtctgttaatacctgtaccagctcctcttggtggtgtcataattattggtgaggagacaatagtttactgcaatgccaactctacatttagagctataccaatcaaacagtcaatcataagagcttacggacgggttgacccagacggttcgcgctatttacttggtgataatgcaggcatattgcatttacttgtccttacccatgaacgagagagggtaaccggtctgaaaatcgagtacttgggagagacttcaattgcatcatcaatatcatatctcgataatggtgttgtctacgttggttctcgatttggtgattcacagcttgtaaaactaaatctccaagctgacccaaatggttcatatgttgaagttcttgagcgatatgtgaaccttggacccatcgtggacttctgtgtggttgaccttgacaggcagggtcagggtcaggttgtcacttgttcaggagcatttaaagatggttcccttcgggtggttcggaatgggataggtatcaatgagcaggcttcagtagaactacaagggatcaagggtttatggtcgttgaaatcttccttcaatgatccgtatgacatgtacctagttgtgagctttataagcgagacaagattcttggctatgaacatggaagatgagttagaagaaactgagatagaaggctttgatgcgcagactcagactttgttttgtcaaaatgccatcaatgatctgcttatacaggttactgctaattctgttcgtctggttagttgtacctctcgggagctagtggatcaatggaatgcaccagaaggattttcagtcaatgttgcatcagctaatgccagtcaggttctgctggcaacaggtggtggccatcttgtttacctcgaaattaaggattctaagctggttgaagtgaaacatatacagttagaacatgagatctcctgtgttgatttgaatccaattggggagaatccacagtatagctctctggctgctgttgggatgtggactgatataagtgttagaatactttcacttccagaccttgaattaatcaggaaggagaacttaggtggagaaattgttcctcggtctgttctgctttgtaccttggaaggggtttcatatttgctctgtgctcttggagatggtcatctgttcagttttctgttgaatgcaagtacgggtgaattaactgatagaaagaaggtttctcttggtacccaaccgataagccttcgtacattctcatcaaagggtacaacccacgtgtttgcttcatcggatagaccgactgttatttatagcagcaacaagaagttgctgtatagcaatgtcaatttgaaggaagtcaaccatatgtgtccttttaatacagctgctattcctgacagccttgcaattgctaaagaaggtgaactctcaattggaaccatcgatgacatccagaagcttcatatccgtacaatccccttgaatgaacaagcacgtcgcatttgccatcaggaacagtccaggacactagcgttctgcagcttcaagcacaaccagactagtatagaggaaagcgagacacattttgttcgtcttttggatcatcaaacttttgagttcctgtcaatttatcagcttgatcaatatgagcatggctgctccatcattagctgctcattctcagatgataataatgtttattattgtgtgggaacagcatatgttttaccagaggaaaatgaaccatcaaagggccggatccttgtatttgcagttgaagatggcagactgcaattaattgtagagaaagaaactaaaggagctgtctattcgctgaatgcattcaacggaaaattgttggcagctatcaaccagaagattcaactatataagtggatgctacgggaggacggttcacatgagctgcagtctgagtgtgggcatcatgggcacatattggctttgtacactcagactcgtggcgatttcattgtagttggagacttgatgaaatcaatatccttgctcgtgtacaagcacgaggaaagtgcgattgaagagcttgctagggattacaatgcaaactggatgagtgcagttgagatgcttgatgacgagatctatattggagcagagaataactacaacattttcactgtgcggaagaacagtgatgcagcgacagatgaagagaggggcaggctggaggttgttggagagtaccatcttggagagtttgtgaatagactccggcatggttcgctggtaatgcggcttccggactcagagatgggccagatcccgacggttatctttggcaccatcaacggggttattgggattattgcttcgcttccacatgagcagtatgcacttatccatcagctccagcaaagggttgtcatcttctcagatgctggaccagatacaagatgggtaggagatgaggcaggggtcgcaggttatacttgctggtctcctttcaataagagcacggtgacgattgggcacatcattcctgaatattcacgctgtggtgatccttttgggcaagactgggttcctgcagaatgtgatgtttctatcaggcctggttggttttggcatgcctcagagaaaccaaaaaatgccacaactctgcttgacatatactacaaatcagttggtagaaactgcctactcatattgaatgtccccccaaattcgtctggcttaatttctactgaagatatgcaagtccttcaggaatttactgagattcggcagacaattttctctcagaattttgctgcaaatgccactgtcacagcaagcaccgtgcgcggtggccttggcaatcagcagtttgcaccctccaatgttcttcaggaaagcatatactcttactgggctccagaggaagggcagagctcctgggaaatgctctttgatctcggacaatctgcttcattcaatgtgatccagcttcaggagcctatccagatgggacaacgtgtaatcaagttccgtgtggaaatcttggtggatgaattgtggcaaacaattgttgaaggcacaacaattggttacaagaggctgtttcaatttccagttgtcgaaggtcaatttctgaagctatctattgacggtgcaagagcagatccacttatctcatttttcggtgttttcacggattcattttcagtcacatatagcttagagaatcatgagaaaccatcggttgttaatagtagtgaagtaataatgttgaggacagaccattcttttggcaacaagagtattgccacaatgtagtattgtagtggggtagtacagttatgtaaagtggtattacttcatgagcatattgaagaaatcgattcagaatgtaagaatacatgcatgttgatttgttgttgtaattcttcatcaactggattcaagaagccaagggcattcaacaatg

SEQ ID NO: 16959 - DNA, 2190 bp, Oryza sativa
  ref <308>: DATABASE ACCESSION NUMBER: AK067428
  ref <309>: DATABASE ENTRY DATE: 2001-12-06
gagtcacaatcccccctttcccctcctccgccgactcgcccaccttttcccccttccaaaatcccaccgccgattcgctcccactcgcgaaccctctccaatcccaaggtcggagagggggacagcgaagctagcccacccgcaccaccgatcctcgaagggattccagccgatcgctgcgtagctcgccggatggcgcagcagcagcagcagcaggggtcggggtcggggtcggcgtcggcgtcgagctccagcttggggctgcacctgctggcgtcgccgttcggggacaccacctacaccaaggtgttcgtgggcgggctcgcgtgggagaccaccagcgagaggatccgccgcttctacgaccgcttcggggagatcctcgaggccgtcgtcatcaccgaccgccactccggccgctccaagggctacggcttcgtgacgttccgcgatcctgagtcggcgaggaaggcatgcgaggacccgacgccggtgatcgacggcaggcgtgccaattgtaacctggcgtcgcttggccgcgctcagcctgcagttcctctcgggaggccaagatcagctgggtcctactttggcgttccagttccaaggggtgtttatgtagggggttatggtcagcaccggacacttcctcttgggtattaccaaggattcccggttccgcaatacagctacactacatatgggacagaatacatctatccacagggtacattaaacccatatgttggtcagcaatatgttccaatttatggagtttcatccgcagcaaatactgctagccaaccatttagccagttcagcccgtccatttctggtgggggtaatggttatgtggctattcatggttacaatgtgccaggaaatccatttgtacagttaactggatcaaactttagcagtgcatcgcctacacctcggcccaccattcaggccccctttttagttgcaccggttcctactcacccgcacttggtcctcccagctcactcacctcagtttacacaggctagtggttcagaccaaagagcaagctgaactatgctgccaaacatttgtaccttgaggtacccttagattgcagcaggacaaaagagcagtgctgctgtatttgtagtactggttcttacctggcaagtaatcccccttgcattcataaggttgcccttatcatggtcatcagatgtacctggaatcatgatgttgccccgatggatgggacaatgatccaagagcaacggttgctcttgtcagttttgcttggttacatcctatgtctcaatgggactgcgaccattgctgcagcttgaagctctagatacagcattattgatcctgtatctgacagctcattagcccatggagatatactggatgctggaatggagtccagcactctgtaagatgactaatccccttggattagtcatgatgcactcatatgattgttcacctaaactcctgaagaatcatcaagctactatgtggttgattatatcccagtgttgaagtctggcacaagtccaacaaatgtagcccgtcccgtcagtcttgtgtctgtctatggtcatcgtcgtgatctatgcttgatcggcctttggaggtataaatagttattgcgtccgcttcactcatcatgtccaaaatgttggaccaagatggtccttcctcctgtatctgtaacccaagtgtctaccggaactgctcagggtcgttactcgttaccaactggtagcgaggtcacgaggactatcttctatggtgttactggtatcggtatcagaactaccgtctattgtgttactggtatcggtatcagaactgttgttatgtgtttaatttttcattgctatgtgctcagcagttcctcgacttccgagaacggcactttgttgtccgaccaaaataaatcagttcggatgagaaacccatgctttggggtcttatcggtgttgtgtaagcctggattgttaaaacttgtactatttgtacaaattgttttgctgttttgcagtgatgtgtattatgtgaaattgtttcagaaattgggtgttttctgtgtgacgacaatgctctctgctcgagttagcggtatcagtcttgatcgttaaaacttgtacaaattgttctgcggtttggcagtcttgtgtattatgtggaatattgtttcag

SEQ ID NO: 16960 - DNA, 1216 bp, Oryza sativa
  ref <308>: DATABASE ACCESSION NUMBER: AK067429
  ref <309>: DATABASE ENTRY DATE: 2001-12-06
ggttgtgcacagctcttgttctccattaatccagccgtgcgtgcagttgaggtccacctgctgctgctctctgtctgctcccatcgaacaaatcaagaaccaccctctccactctccaatccaatctcgaataggaagaaggatgcttggttttgcgccggcaccaggccggccgctcttcgtgctcttcggttcctccatcgtccagttcagcttcagcaatggcggatggggcgctgcccttgcagacatctacgctcgcaaggctgatatccttctcagagggtatattggttggaactcaaggcgcgcccttcaagtcattgacaaaatttttcccaaggattcgcccgtgcaaccttctttggtaatagtttactttggtggcaatgattcggttgctgcccattcatccggccttggacctcatgtgccactagaggagtacatagacaacatgagaaagatcgcagaccacctgaagagcttgtctgagaagacccgtgtcatcttcctcagctgcccaccacttaacgaggagacgctccgaaaatcaaccagcactgtcctgagtgagatagtgcggacaaacgaaacttgccgcctatactccgaagcctgtgtatctctatgcaaagagatggacctgaaggtggttgatctttggaatgctatgcagaaacgggacgactgggcgacggcctgcttcacggatgggcttcatctgtctgaagaagggagcaagattgttgtggaagagatcctgaggatcctcaaggaggcagagtgggatccatgcctgcactggaaggcgatgccgacagagtttggggaggactcaccctatgatctcgtctcctccagcggccaatccaccgtcaacccctccgactggaccttccacaggactatccaatgggactgaccttccattcgtctcaatctcagtatctcatgatggagcatatacatgcatgctccaacgtgcaacattacatgcatgattcataattaagatccccttcggtcttactatatatgtaggggtctaatgctagctgatgacgaggggtcatggattaggcttcagctcgatcgagctgaaaaaaaatcagatttaggatgatattaactgctttgctccctgcctgctatatatcataagtgagacaatgcacatgattatctcgctatatactatgtgactcatttcgct

SEQ ID NO: 16961 - DNA, 2245 bp, Oryza sativa
  ref <308>: DATABASE ACCESSION NUMBER: AK067430
  ref <309>: DATABASE ENTRY DATE: 2001-12-06
ggtgtagtactagtacaaacacacacaacacaagcttctctcttcccttcttggttttgcccaagaaacgaaaaccaaaaccaaacccaagaactctcctcaaaagaaccacctcacttcatagctctcacaaggctcacgcacacatagagcttgtgagagcttcttctttctctctctcttgtccttgtggtagctggtgcttaaaggaggaggaggtgaggaggaggcgcaatgtcggagcagccattgccgcagcctcggagcagcatgcgggaggcgctggagaaggaggacaaggagaaggcggcggcggccaaggagaaggccgccgtccccaagaacggcggcaacgggggaggaggcaagaacggcggcggtaacggcggcggcaacggtggcgccggcgcccagcccggggaggagacgacgagggagattcaggtggtgagggaggcgtaccggagggagccggcggcgccggcgtacgtgatgccggaggagccgccggccatggtggagctcgtcgggtggtacctctacggcttctgctcctacttcatcacccacctgctgctccccgtgctgttcccggccatcatcacccaggtcgccttccccgcctccgacttcaccccggacaccaagtacatcgtcaagggcgccacctgctccatccatgagatgtccatgtaccagaggctgaccaagcattcgattgccattgatggatcccggctgtccccgttgggctggagtggcctatcatgggcgattggaatcctcattgcggctccgatcctcacccaggctgcacaccaccttgaccgtggccagtatcagtcgctcatcctcattgccgcgacatcgtttggctcattcttctgcctcctcactggcttcttcaagacagtctgggtgttcctcttctacatcctgttcattggtgcatccatcattgttgctgaggctgtgcatacacgcaatcttggactcatgatccgtggccttgcagcacatgactctggcaagcaccttgtccttcgccgtcgtgctgctgccagtcagctcaccctgtattgcactgccattggtggcattggggctgcgctcatggctgctttcatgtaccacatgcttcggcgcactgaccagctcacaggcctttgggtcgtctccatcttcagtggccttatctggttcattggtatctgccatggtctcttcacaaaccgacccagcagctcatcgcccaccacagcatttgagcctaacttcttcaccaagctcagctacagcatgacccttgtgcgatacccacaggccatcggaagcttggttgcagtgttcctttcatctttcgccacaatgtgcatcttcaccagtggcacattgtatgctattggtggtgtttgcatcaagccagtccttgtgctcgtgctctggatactctacttcctgttcccgttgatctcacttccgctgctgcacccaatccagatcatcatccgtgctgatgctgttcgcatgcagctgcttgggttcatcatctgcctatttgtgtctggtgctggtttctacttcaagagccacaggtggagagccgctcacatcattgtgatcgctcttgtccagagcacagccaatggtgtgctgtactcatttggtcgcattctgctgctcgatgcctcgccaccagggaaggagggtgcttttgcggtgtggtatgcatttgtacgctgcattggtgctatgattggcttcgctgctgcatccgctgggcctgggcgtgctggaggatcgtttgctgctgcgttcctaggcagcttcctcggcatcattgttctgatctttggtaatgtgagcaacatcggggcgctgaaggctgctgggcatctgaagggaatggaagacgagaagaggctgggcatggagaaaggggaaggcatgagtgcggttgccgattccggcgagggaagggggagggtatgatgatgattaaatgggcttgtgggaaggaaagattggaaaattgctgtggaggttgtgtttgtgagagggatttgttcttctttcttgtttctttcttgttcatgtttcagtgacactgttaattcggtgctttgccccccttggatgcatgatgatgatgacatagtggtagaggaagtgtgctagttgttaatgtgttattctttgcttggaagacaattgtaactgatgatatggttctttgttcatcgcc

SEQ ID NO: 16962 - DNA, 1866 bp, Oryza sativa
  ref <308>: DATABASE ACCESSION NUMBER: AK067431
  ref <309>: DATABASE ENTRY DATE: 2001-12-06
gagccacaccccaaattccaaatcgctacctcccccaagaaccctagctccctctccccccctctctctctctctctctctctctctctctctctctctctctctttgcagccgccgccgccgccgccgccgccgccgccgcgtccgcttcgactcccgccgccaggttctctctctccagcgcgcaggcaccatggccgaagccgaggttaaggacaacgaggtttacgaggaggatctcgtcgactacgaggaggaggtggagaacggcaccgacggtggcgccaacgccgccaacgcctccgccgatgtcgtcaagaaggggtacgtggggatccacagctcagggttcagagacttcctgctcaagccggagctgcttcgcgccatccaggactgcgggtttgagcacccttccgaagtgcaacacgaatgcatcccacaagccattcttggaatggatgtcatctgccaagcaaaatctgggatggggaagactgctgtttttgttctctcaagtcttcagcaaattgatcctgttgctggtcaagttggtgcacttgtgctatgtcacacaagggagctagcttaccagatttgccatgaatttgagaggtttagcaagtaccttcctgaggtaaaagttgcggtcttctatggtggtgttcacataaaaaaacacaaggatctgttgaagaatgactgccctcatattgtggttggaacacctggaaggatactagctctagctagagagaaggatctttccttgaagaatgtgaggcatttcattcttgatgaatgtgacaagatgctcgattcacttgacatgcgtagagatgtgcaggagatcttcaaaatgacaccccatgataagcaagtgatgatgttttcagcgacccttagcaaggagatccgcccagtttgcaagaaattcatgcaagatcctatggaaatttatgttgatgatgaggctaaactgacccttcatgggctagttcagcactatattaaactaagtgaggcggagaagaaccggaaattgaatgatctcttagatgcactggacttcaatcaagtcgtgatatttgttaaaagtgttagtagagctgcagaactgaacaagctgctttgtgaatgcaactttcctgcgatctccatacattctggaatgacacaggaggagaggcttacccggtacaagaacttcaaggaaggacacaagaggattcttgtggctactgatttagttggcaggggaattgatattgaacgtgtcaacattgtcataaactatgacatgcccgattctgctgattcgtatctacacagggttggaagggctgggcgttttggaaccaaaggacttgcaataacatttgtttcctctgcctctgactctgatgttcttaatcaagtgcaagaaagattcgaggttgacataaaggagcttcctgagcagattgatacttcgacatatatgccttcttaaagatccgggtggattgcttaaagcttacattcgaacggaaacgagagtatctccttgagatacggcatattaagaatctatcggataactaaaaacttagtgtgagaaatgctgccctatctatacttagacagcagtttagatctgctgctaagtgctgaatgccccgtaataatacttgaaatgatgtatctgggcaattgggcatgtacgtatttgaattgcagtcgttcattgtaattccgagaattttattaagatttgtttgtgttaattttgctactccgcagatgctaacgtgggttagtttatagtactttgtttatggtacttttgaggatttcaaccgcgtttcttaccgtacattttgttcc

SEQ ID NO: 16963 - DNA, 3673 bp, Oryza sativa
  ref <308>: DATABASE ACCESSION NUMBER: AK067432
  ref <309>: DATABASE ENTRY DATE: 2001-12-06
tggcgttccttaaacggaaaagaggggagaaccccaagcctcttcttctctccgtggtatcgtctcggctcggcgcgcgaaattacggttcggtccctcgcggcggccgccttccttcctcctcttccctttgcgtgcgcgcgtcgccgatccgggggagcgatggtggatacgcggcggagcgccgcggcgaagcggcgggcgtcgtcggaggaggcggcatcgccggcgacggatggggctgcggcgggggcgggggcggcggggagttccacgcctcggaggcggtcggggaagcgggcgaaggcggaggcgacggtagggactcccgcggcgaaggcggggggagcagatgcgacggcggcggcggcgatagatgtgatcgatagctcggtggaaaacctgcacggtgtggcgaggcccacgggcgccgtaccggcgtcgtcaacggtgtccaactctggagtgaagaagaaaaggacaaagtatataaatgttccatcagcggaagaactctcactctggaaggcaaggcaggcggtggcgaacgggcgtgctgaggcttggggaagactgatttctcaatcttccgagtctcattcagtacctatttatactactcattttacggttggccatggtggaaattatgatttgaggctgacagagtcatttcctggatcacttatttgcaaattgaagcatgttaagaggggtgctgctcttgagatttacgtatctaaagctgtccatgtaaatgggaaggtattagataagactgctaaggtcacattggttggaggcgatgaagttatttttagttcacttgggagacatgcttatatatttcagcaacttccagaggaaagatcaagcacatcaacattttcggccacatgtgcttttcagcaagggcaatatccagttaccaaaggtacattggatgtatcatctaaaggagccaagctatcagtaatgccctttaactttggaaatggccgccctccgttggttcctcatgatacagagatagtcagcagtttatgtaaaacaatggaggaacagagccagcttgcttctgaagaaaatttacaggttgctcaacatcaactgttgaaagaggatctgaagaaggtggtcgttaatgcaagtgatatatcagattcatttgatagttttccatattatctgagtgagaataccaaaaatgctctcctgtcttcagcgtatgtaaacttatgttgcaaggaatccatcaaatggacaaaacatatatcttctctttgccaacgggtattattgtctggtccagctggatctgagatataccaagaatcattagtgaaggctcttaccaaacactttggtgctaagctgctcattatagatccttcgttgctggcgagtggacagtcttcaaagtcgaaggaatctgagtcgtacaaaaaaggagatagggtgagatacattggttcagtacaatcaacagggattatccttgagggacaaagagctccagattatggctcacaaggtgaagttaggcttccttttgaggaaaatgaatcctcgaaagttggagtcagatttgataaaaagattcctggtggcattgatcttggaggcaattgcgaggttgaccgtggtttcttttgtccagttgattctctttgcctcgatggcccaggatgggaagatagagctaaacatccatttgatgtaatatacgagtttgcttccgaagaaagtcagcatggtcctatgatactatttttgaaggatgttgagaaaatgtgtggaaacagttactcctatcatggcttaaagaataagattgaaagtttcccagctggtgtttttattgttgggtcccagatccatactgacagtcggaaagacaagtcaaacagtggctctcctttcctttcaaaattcccatacagccaagcaatactcgacctcaccttccaggatagctttggtcgggtgaatgataaaaacaaagaggctctgaagatagcgaagcatctgactaaactcttcccaaataaagtgacaatacaaacaccgcaggatgaattggaactctcacagtggaaacagctattagaccgtgatgttgaaattctgaaggcaaaagctaacacgtcaaagatccagtcgttcttaacccgcaatggtctggaatgtgctgacatagagacatcagcatgtgttaaagatcgaatccttacaaatgaatgcgtcgataaagtcgttggttatgctttgagtcatcaatttaaacatagcacaatcccaactcgtgaaaatgatggattacttgccctttctggtgaaagccttaagcatggagttgagctgttggatagcatgcaaagtgaccctaaaaagaagagcacaaaaaaatcacttaaggatgtaacgacagagaatgaattcgaaaaacggcttcttggtgatgtgatccctccagatgagataggtgttacctttgaggacattggagcactagaaaatgtcaaggaaactttgaaggaactagtgatgcttccgttgcaaaggcccgaattgttctccaaaggacaacttatgaagccatgtaagggaatattgctttttggcccacctggtacggggaagaccatgcttgctaaagctgttgcaacagaggctggcgccaattttatcaacatatcaatgtctagtattgcttcaaagtggtttggcgagggtgagaaatatgtcaaagctgtgttttcacttgcaagcaaaattgctcctagtgtcatttttgtggatgaggttgatggcatgctgggtagaagggagaacccaggggaacatgaagctatgcgcaagatgaaaaatgagtttatggtaaattgggatggtctgagaacaaaagataaagaacgcgtattagtacttgctgccaccaatagaccatttgatcttgatgaagctgttgttaggaggctccccaggaggttgatggtgaatttgccagatgcatccaatagaaaaaagattcttagcgtaatactggccaaagaagatttggctgatgatgtagatctggaagctctggctaacttgactgatggttattcaggcagtgatatgaagaatctgtgtgtaactgctgcacattgccccataagggagatccttgaaagagagaagaaggagagagcatcagcagaagcagaaaataaaccattacctccccctcgttctagcagtgatgttcgttccctaagaatgaacgatttcaaacatgcacatgagcaggtatgtgcaagtataacatctgattcgagaaatatgactgagcttattcagtggaacgatctatatggagaaggcgggtccaggaagaagacttctctaagctacttcatgtagcctatcgctagcctatgtacatacaacataagcattagcgtaaagcggtccgggagatagacaagaaatagctcttctgttgttgttcatgtataggtgatacccagtcaaattagtcgttgatctctctattcatgtcaactgtaagttcgttaggccgaagtgtagcgtagaaaaaccggtttggaacttgaactatcaagcctgtaagcctgaccatcagatcggttgatttatgtcgacagccagtgcaattcatttaacc

SEQ ID NO: 16964 - DNA, 1939 bp, Oryza sativa
  ref <308>: DATABASE ACCESSION NUMBER: AK067433
  ref <309>: DATABASE ENTRY DATE: 2001-12-06
gtgacggaggcctgttttgtccactgcacacttcaccattccattccatggcgccgccgctcctcgatctcccctcgcactgcctcctccctcgccttcgccgccccacctccggccgtctcctccttcacctccgcctcaaacctctctcctcctcctcctacaccaccaccaccaccaccaccaccagtagctccacctcctcctcgcgagcgcctcaagttccacctagtctccatggcccctcgctccgcctcggccgccgcctgcccggcgaaactgacggcctgctctccttcgcccgcatcttcgatctcgccgccctccgcgtcccggccgccgcctgtgcgcccctcgagcgtcgcctccgtggccacctcctcaactggcctcgcgtgcgcaacgtcgtccgccaacccggcgacgacggcggcctcctcttccccgttccccatccaagcctcgccactccctcctccctgccaactgcggtggctcgccgagagaagctggcccgcgagttcaacgcccgaggcttcgtgcaattccccaaccttgccaagatgtcgcggccccccgcgaggaaacggaaggggaagaaggatgaaggaggcggcgaggctgcggctacggcaagggatactaaagacaaagtatatgtggtggaggtgatcggagagagaaaagaggagcacggcgacgagtggatggggttggtcggggaggaggggttcgggaggatcacgtggagaggaggtcccacccggttgctgctcctggacgagaactatgccaacaagagggttgatgacctcccggaggctgtcaaggttgtgttggaccatgaaactaacaaggatggatcttcatcctacgagcttgtgcaatgccaattgaccttgttctacaattactggccaatgaatgaggtaacactgcctttgcaaataccggatacagaccaaaagttcagtctgtacagattttagaggaaatactcccagaaggaataatcgttcctacagggtttgagacagtagggcatattgcacacttgaacttgagggatgaccatttaccttacaagaagcttattgctcaggtggtactggacaaaaacaagccaaagatccaaactgttgtcaataagattgatgctattcaaaatgactacagaacaatgcagcttgaagtcttagctggtattgattcccttgtaactacggttattgaaagtggtcttcggttccaagttgatctttcaacagtttattggaattctagattatcaacagaaagacagaggcttgttgaccatgttttcaaaaattctgatgttgtttgtgatgtgttctctggtgttggtccaatagcaatatcagctgcaagaaaggtcaaatatgtctatgcgaatgacctaaaccccactgcagtggagtaccttgagagaaacattgttcttaacaagctcgagagaaaaatcgaggtttttaacatggacgctagaaggtttatcagttcaatatactcaagccaacatgtgcatccagtcacacaagtagtaatgaatttgcccaatgatgctgcagaatttttagatgtgttcagaggaatctcatggaaccaccatttggctgtgccttcttgtgtaatgccaaatatacacgtgtatggattctccaaagcagaagatcctgaatatgacttccatgagaggataaatttgacgctgggtgagaacgtgtccgatgttgaaatgcatagagtgcggctcgttgctcctggaaaatggatgctttgtgcatcatttacccttccagtatctgtggcgtttgcaaagccaaattacattgcatgttaagaggacggcctataacaaattaaccatcttgtatattctttagtgggtgaatgaaaatgacagtagtgtttatgcatc

SEQ ID NO: 16965 - DNA, 3860 bp, Oryza sativa
  ref <308>: DATABASE ACCESSION NUMBER: AK067434
  ref <309>: DATABASE ENTRY DATE: 2001-12-06
gactcgctctcgcctctcccccctcctccccaccatggcggtgaaggggaagggcaaggcggtggcctccgcgtccgcatccggcggcggggtcaagcggcggaagggccccggcgacgcggcggggccctcttcctcctcctcggcggccgcggaggccgccaagcgccgccgccggtctggggtcctccagttcttcgacgacgccgccttcgtcggggacgaggaggaggatgaggatgaggaggaggaggaggaggaggagatgttcgcgtccgacggcgacgacgacggtttcttcaccgagggaaaggcagaaaatgttaacttaaaaagaactgaaaggtcacaccctcttccgtttcttgggatagttaaggaagaggagctgagtggtgatgaacttgaagaatttatcaaggatcgttattcaagtcgagtgaaacacaccccttttgatggctccaccaatgtacaggatgacgagtttaccgaggatggtctattgaaagagccagtaatttggaggatcaaatgcatggttgggcgtgagcgccaaattgctttctgcctcatgcaaaagtatgttgatctgcaaaagtttggtaccaaagttccaattatctcagcatttgcacttgatcatgtgagaggatttgtttttgttgaagctgagaaggcctgtgatgttacagaggcatgcaaaggattttgcagtgtttacataagcagaattaattctgttcctgtagctgaagttcctagcttgctatcaagccgcgcaaaaccatttgcaatatctccaggtacatgggtgcgcatgaagactggaatttataaaggagatctagcacaggttgttagtgcagatgaggggcgaaaacgggtgatgatcaagcttatacccagagttgatctccgggctatttcaaaaaaaattggtggtgctattccactaaaagaagctgcaattcctgctccacgtctaatcagttcacaagaattagagttcttcggatctcatattgaaaggaaacatgatcgccagacaaatgatttttatgaagtgcttgatggtctcatgttcaaagatggtttcctgtataaaagggttgcacttagttctttgatttactgggggatacaaccaacagaaactgaacttctcaagttctcttccactccaactattacaagttcaactgatgacttggattgggtctccagcatgtatggtcctaagaaaagaaacgttccaaaagaaccggatatggagccttcctcttcgaaagcttcatcttctaaaggaaaatactccaaggcatcttctaaggcatccacttctactgaagattacgaggataaaggatttaatctccatgatcttgtactctttgggcgaagagattttggtgtggtcattgcttttgagaaagatggtcttaggatattaaaaggtggtcctgaaggatctgcagtaactgttagaaagcaggatattaaggacgtttgtgcagacaaaatgcttactgctgttgatcataagaagaagataatatgtattaatgacaccgttaatgttctggaagggccattccagggtaagcaaggagttgttaaacacttgtacatgggcatactgtttatccataatgaaagtgaaagtgagaacagcggatttttctgcgcccagtgcagttcatgtgaaaatgtcaagaagcggaaggaactggcaagtttcacttttggaaattcggacgataatcctattcccatgttttcatatgaacaaaatgagcaacgggacaatgaaaggccttacaggagcactagagaacaacttttctcaattggggagatgctgcgtattcgaaagggtcctatgaagggctatctctgtcgagtagttcgaatatttcgcaatgatgtaactgttaagctagattcactgctgaagattgtcacagtgcaagctgagtttctttcagtcccagctaaaagaggggataactcttctggtgctccatctggtccttttggttcagaagccgataaaccctcatgggacaatggattaccatcttttggaagtgattcctggcaacccttttcaagtgctgcattaccagttcagaatgcagatggggaatctgaagttgatccatggtgtaagaaaacttcatcttctgccaatgattctgatccatggggtacgaaaacaaaatctgcatctgttgatgtatggaacaacagtaccacacaagtagagaactccagtgacaatgcatgggataaacaacctggaggtagtggacctaatattggtggaagctcttgggacagaccagcaactgataaggaaagtgaaaaaagtgacaactggggtgaggcatgcaaggagacagagaaaactggtagtgatacagatccctggggaagcaaggtcaaagagatagatctgaaagaaacggatagctggggaaaggcttcaatgcaaccagagaagaagttggaggatgatagtcaaggatggggccaacctgttggcaagtcaaaccaagaccaagaaaaaggtgcagacaaatgtggggcttgggatactgttattgctgggtcatcttcgtctgttcctggcagaggggatgatgactcctggattaaaactgatactttgcctgttgctcaagatgatgcctggggcaactcaaaagattgtagtgatggggcagctgggtggaatgaaactagaacatctaaacaaagccacagcactggaggatgggatgctgctgctgccaacctgaatgaatcatctgatgtggatgcacataaggactcatggggcaaagcaaaagatacaacagctaatgctgaagaaaaaaataatgaaagtggaaactggaacaaagctggaccactagacaaagtttgtggcagtgattggggtagtccaaagttttccagtggtgatggtccatccagctggaacaagggagacaaaattggaggagattctcaaaacggcagctggagcagacctggtggaaactttgaaggtggtcgtgggtttgggcgaggacggggcagaggcaggggccgagaatctggggatttcggtggcagaaatgaccaaggaagctggaagaactcagggactagtgacagttctggaaggccctcttggaggtctggagatcaagtgaatcaggaaaatacagcattatcttcgtgcttgacatcatctctagcctcttcagtggaaggattgtgtgggagaaggtcagcccagcactgcagcgcgcggtgcagagtcagatgagtctactgagtacaccattcattgacaacaatgacctttttgaaaccggaaatacaggaggcatgtcaagagatctaattaacagaatcccaaagaccacattcagcgctgcaaccaatcctgatcaggaaactgataactgttgtgcagtttgccttcaggattttggagcatcgcaatttgttcgggtcctgcctcattgccagcacacgttccacgcacgatgcatcgacaactggcttttcaggcacgcatcatgcccgctatgcagggctggtgtgcatatagaccatatacatatgtaaaatagaactcgcagcgcacctggtgtattttcaggcgaatacccgtgcccgcggtccgtatcataagtatagtcttgtacacataggaggcctttttttcttcccagtctttgtgtggagctatgttccagccgcacgtttttttgttacagcaataacaagttatgtactaatatacattctgaaaaaaagaactaaactaacagtctctgaattatggctgtgtactggagcct

SEQ ID NO: 16966 - DNA, 2363 bp, Oryza sativa
  ref <308>: DATABASE ACCESSION NUMBER: AK067435
  ref <309>: DATABASE ENTRY DATE: 2001-12-06
ggctgaggcttgggttctaggctggcttacctatagctagttagcttacatgatggccgccggtggccacgctgccgcggagcaccgcatacagataccagctgccccggcgtcgcagtcgggaccagctgatcataaggcggtcgccgcggcgccggagaagtggctgaattactttcttcgcttgctcgcggtgatcgaaagcgtgggcaacgccttcggcacgctggccttcacctgggccaccgtcgtcctgctgggtggctacccaaccgttctcaagcgcgattttggtattgcgactgcgataattttcctagaagccacgaggatgttcacccgcaacaataggctggattatcaattgttcttccggacgagaggtgcctttagaccactgggctggaacgggctgatggtaatcgtattcttctccgtttctatggtgtccacggttgtttgggacgcacgccggccacgtatagtatttccaattatggtagtattgtttgcggttggccagtttctatgtgctggagttctaggactgcgcctacgtatcaacagtcggttacgccgtcagatgtcgctgtggagccccatggttgcaatcttattgctggcttcctgtatttgcagaagctcgctactggccatatggatagtatatggtgtgctccttgtggttgtgctcctagtgactattagcaggttgcaattcccaattataatcaaccgagtacatggtgctttgggccgcaaatacgtattttggcgcccatttatcctatactcgtgcatgctcgctgcaattgtgttgccgatgttcatgattgataaattatatcgatatgcgatcatcgtcctcgacatatctgccttggtcattgtgtccttcggcaacctacagattccagcagcactcgtgcgtgttgtgctcgcggcgttgggctttgatcaagaggactacgatggtcacggtgacacgacaaatcttccccaatctctaactatcttctatgggatggtgcttggacaaggactactttacatcattgccgcagtattggaggtcttctcgttcatccctcggatacacctcgtccgccgtggtggatttacaggtcgatggggagcagaatctgttgatatgtactacgcatacgcctatgacaaatacatggaaggaggtctgtttgctccaaagaggatcagcctcagcaactttgccatggattctctgaattcggacctgtccaagaatcagctatacggtgtccagatgatgcatatatttctgcaaaatggtctgaccaaggcacggttgctggagaaactcaccacttcaacgcagacgatggccaggttaatcagcatgttggactggagtagtagacatcatcgtgcaactatcaggttatatgccgccaaggtcactgccgagcttgcaaagaacctccgagttgaaactgtccctgggacactgcagcttgtatctacgcttctggatgctgatggaaagccaaaaagaggacacccactcctggatgcagatgatgatcaagatcattttgttgatatagcagatagacaagataaaagacatgatatagctggtaaccaagggcagagacgagagccgattggggacaccaataacctgctggaaacaccaacccgatcaacacacatcaacgaccaaagatacatacctagaatttggcagaggatactggagtactggtcgattcccaaggagcagccattgacagacgatgatctcctccctgcactaggcatgtcaatcatttatagccttgctggctgtgatcaaaataattgtgtggaaatagacagagtaactgatctgatccccaatataattggattcacaagcttcagaagtgcaatggtaaattccgaagcacaacagaaggttctcttaaagtcatcgttgaaggtactgcagaggctcacaagcattgaaggggaaattggcataacactgcggtacaagatatcaaaacatcccttcttactgcgaaaccttgcagagatcttgcgagacaatagcagcaacaaacaagaactaaggaagctcgtggtaggaatcctcagaaaccttgccattgacagacacacaaggcaagagatgggacaaatgcaaatgctcattaccacgctgatcaaggcattcctcgattttaaaggattatttagttcagatgttgattgcttgctgccaaaggtcgccgggcaagcattggtaatgctgtcatcagaaaattcgcataactgctttgttatgttgaaggaaccagatttcattcataaactaaaaaatatgatcctaatccatggtg

SEQ ID NO: 16967 - DNA, 1954 bp, Oryza sativa
  ref <308>: DATABASE ACCESSION NUMBER: AK067436
  ref <309>: DATABASE ENTRY DATE: 2001-12-06
gagtgttgcgcctcgcgaattccaaccccgatcgctcgcacggccggccgccatggagagccccacgtcgccggcgtcgcggctggacttctacgacttcatcggccgcatgcgccgccccgccgccgccgacctcttccactccatcaggagcttcctcgcgtccctctcccagggcggcgagcccaacgccgaggtcgacggcggcagggtccagaccttcttcgcggagatggagaccgccatcagggaccacccgctttgggccaatgccaccaatcaggaaatcgacaacgcgctcgaggggcttgagaagtatatcatgaccaaattgttcgatcgagccttcgcttcatccgcggaggatgtgaaatccgacatggagatttcggagaagattggtctcttgcagcactttgtcaggcctcatcacttggacatacccaagcttctgcacaatgaggcagcgtggctggtaagacaacaatgacagatctttgagtcattatttcattgttccgggtgttagcccaaaattcagaacttcccatgtgatttttattgttcctgcacgcggcctgtacaagttcacaacgcattgttacctaatgctaatggtcaatagtctgcgactgtaacattgtgaacaatgaacttatgagttatacttataccccctagtaatatttttagatgcactctgaaagctttgtatattgatcacggtgtaaggtaaattgcaaattatcgtgttgggttactttgaattatctcttatataaaaccagcattagcttgcattttggtcaccatgtagaatatatgataaaaatgcatggggtcaacatttaagcgattatctttccctgtattcttcctatgattggttcattgctgtaattttacatctgcttgacataaaagaaatactgccacctgccatcaacacaccaatgcccaagttaactctgaccttgggatgtttatgccattctagcttgcagttaaagagttgcaaaagattaattccttcaaatcaccacgagaaaagcttagttgcatcatgagctgttgccaagtcatcaataacttgctgctaaatgtgtcaatgtcaaatgatcgaacactatcaggggctgatgattttcttcctattcttatttacattacaatcaaggtaagcttacttttgttcctatttattctttctctaatttttctcatccagattgacatgattacatgctgacagatcattgagtacttatgggggaaactattttgattcctcgaggggatgtcacctcgtttgcttaaaaaaacatctaaatgattatgaaaaattctggaaaaatttgacaacactcatataacatatctatacaactccacaaaatcttaggttgaaactcaactcacgtcgagatataaaaaaggacaaattcaacgtatgaacagagaacagtagcgtactgttcacatctaaatttatcttttttgtttctcaatgtgtagatcgaattagaacttgatttttggtagaccgatagatatcactatactctacggtctacattgtcaatttttttcagaattcttcgtaactatttatatcgaatttggaagaaaaaggtatacgaggggacatcccctcgagggattagaatccaatccctacttatggttcaagttttacaatcataaattttatgaatctcgtatcatatgtacagttaacattagggtgtttttacctttattctgtacagctaaattgggtaacattactgataaattgcattttgttacttgctaatgtgacaatgcctattttttacaatgtaactagtatagatgtttggtgtattaatgggatctaatggtcttatggtgtaaatttgattgtttctgtttgttattagttaatattactcttatatgccgcattgttacc

SEQ ID NO: 16968 - DNA, 1543 bp, Oryza sativa
  ref <308>: DATABASE ACCESSION NUMBER: AK067437
  ref <309>: DATABASE ENTRY DATE: 2001-12-06
gactgcgcacacacacacacaaacacaaagatggagagggtagcaacactggtctcttgtatagcggccgcgaccgctatgctgcttgcggtggcagcagccgcagcggggagtggcggcggcggctgcacgcggagctgcggcaacatcagcgtgccgtacccgttcggcgtggaggccgactgctactaccccggcttcaacctcacctgcaaccactcgtaccacccgcccacgctcttcctcgtcgacggcgccggcacgtcccaccaggtgctcgacatctccatctccaactccacggtgcgcatcaacagcagcctcatcgcgttcaccaagtctgccgacaagcaagccgtcatcaacacaacgtgggaggtgagaggcccgtactacctgttggatgatccttccaatatggtcgtcttggtaggctgccaagcgcggttcgacgtccggggaggaagcaacaacaccctgatcagctcctgcaccgtcgtgtgcccatcacctgatcctagcaccacctacatcggagctggcgacggctcctgctcgggcgtcggctgctgccaggcgaacatcgtcctacgctactctcgctacaccgtccagatccacgacctgcaagagcaggatgcgccgtcgtccagtcctacttttaatgatggctcggcgtacatagtagatcagccattcaattacaccggccttatgattttcgaaaaaaatttccctcaagcgctcccagccatgctagactggttcatagtaggtgataattcgacatgcccgatgtcgacgaatgagtctgcgcctgcgcctgcgtccgctgccgagtgtcgcagcgtgcacagcttttacgaaggttactacggtgacgtttctgacgatgtggtggtggggtatcggtgccgctgctctccgggttaccaaggaaatccttacgtaaaagatggatgctacggtatgtgtttaccctctctgtttttttttacggaattgccagaaaacttgcgcaagttttttttcatcccagcttcccaatttttagccgtacgatgctacgttaaaatttgtgttaaaccagttatatattataattacagtatagttacaattagttacaataagatgcaataactgtaactatattataacctctatataatttaggtataaaaggttgcctatatttttttaatacttatatacaagttatattatagctataatataattatgaggaattacatcataactatgttacattatatttaaaagtttccacttaaaaaatttgcaacagattttttagataattatcctctatctcataatatatgacattacttagttcattttaaactatccaacgtcacaacaaaataaatatatttataatatttttagatgcatctatacatgatgtgacaaatttccaactacaaaggacaacattcaaatttctctaaatctctactacttaaaaaaattatttttttaaagaagtttccgtctgtctacaacaaaaaaaagagcg

SEQ ID NO: 16969 - DNA, 2216 bp, Oryza sativa
  ref <308>: DATABASE ACCESSION NUMBER: AK067438
  ref <309>: DATABASE ENTRY DATE: 2001-12-06
aaaattccaatccggtccctcgcctcgcctcgcgtctcctcctcctcctccttcccctccccgcctccaatttcttcctactcctcccgcctccccgcgaagcttccccacgcctcagccgccaatccagccctagtgtggcggcggcggcggcggcttctagaagccctcctcttcccggactccaggatggcggcggtggcgggtagcgcgagcgcaggcgccaacggttcggcggcggcgcatcgggtgggggcgccgacgaaccccatggcgacggcgctgctcaccgatcagtaccagttctccatggcctacgcctactggaaggccggcaagcacgccgaccgagccgtgtttgatctgtacttcaggaaaaatccatttggtggagaattcactgtttttgctggtcttgaagaatgcattaagttcattgcaaattttaagttcacagaagatgacattttgttcctgcaatcagtcatgccaatgtgtgaggatgcgttctttgattatctcaggaaaaccgactgctctgatgtggaagtgtactccattcctgagggttcagtggtttttccaaaagttcctttgatgcgagttgagggtccagttgctgtggtccaactacttgagacaccgtttgtaaatcttatcaattatgcctctttggtaacaacaaatgctgcgagacaccgccatgttgctggaaaatcaaaagttttactggaatttggtttgagacgagcacaggggcctgacggtgcaataagtgcttcaaagtattgtttcatgggaggttttgatgcaaccagtaatgttttggctggaaatctgtttggcataccacttcgcggaacacattctcatgcttatgttagctcatatatgagccttgatgagatcccagacaagtccctcaagagcaaagatggttcaagagtctgcaaagattttgttagtttggtaaaagagtggcttcaaaagattcagttagcagattcgttatgtggtgtatttggtgagacaaatcaaagtgagctggcagcatttgcatcctatgcattggcttttccgaccaattttctagctcttgtggacacatatgatgttatgcgaagtggaattccaaacttctgtgcagtagcgctagcactccatgacttagggtacaaggcatctggtattagattagattctggtgatctggcctatttgtctattgaggcccgtaaagtgttccgtacactagaaaaggagtttaatgtgcccgcttttgggaagatgataattactgctagcaatgacctgaatgaggaaacaattgatgccctgaacaagcagggccatgaagttgattcctttggtattggaacttatctagtaacatgttattcccaggctgctcttggctgtgtctttaagctagttgagataaacagtagacctcgtatcaaactttctgaggatgtggctaaagtatccattccatgcaaaaagcgatgtttcagattgtatggaaaagaaggctaccccttagtagatatcatgatgcgtgaaagtgaaccatcaccgaaggctggagaacgaatcctttgtcgtcatccattccttgaatccaagagagcatatgttgtcccccagcatgttgaggagctcctacaatgctactggcctggtacatcaaataaacctagggtagagttaccctctctagaggagatcagagggcgctgcatgcaacagcttgaaaaacttcgaccagatcacatcaggcggttaaatccaacaccttacaaggtgagtgtgagtgcaaagctgtatgagtttatccattccctatggttgaatgaggccccagtaggagagttacaatagatttctacagaagttgggaaaaacagagaagcgtattctttgaagcatagcaaaatagcaatacatcaaagaaaagtagagctctgttgtaaaaaaataaaaaaaatcgtcagttcatgggcccaaccttataggatttttgctccccaatttttattagtacaaactagttatcagtatagagataggccaacctatctgactgtacatccatgatccattgtactatacgtcgttatggaattgaacatcctttttggagatttgagtccatgagatgatgagaacaaataatcgctgtaaaaggttgagatcatgcccccctttgtccttcc

SEQ ID NO: 16970 - DNA, 1166 bp, Oryza sativa
  ref <308>: DATABASE ACCESSION NUMBER: AK067439
  ref <309>: DATABASE ENTRY DATE: 2001-12-06
gagtcgctggccggccggccggccatgtactactgcctcgccgcgccgccggccgctgcggcaccggcagcgccagcggcgaggcgcgcgtcctctttcctcttcgtggtgtcggtccctcctccgactttatgggggagggtgacgggaggcgccgtgtccgcccagcggctggtgcggcggcggtgctcctccgccggcgagcccagggcggccggcgacggtggcctatccagtttttgcataattgaaggcccagagactatacaagactttgttcaaatgcaatcacaagagattcaagacaacatcaggagccgccgtaacaaaattttccttttgatggaagaggttagacgattgcgggtgcagcagcgaatcagaacttctgaaagcagaggtgcaagcagtgaagaaagtgaaatgcctgaaatcccgtctagtattccctttttgcctaatacgtcaccgaagacaatgaaacaactctatttgacatcattctcattcataactgggataatcttttttggaggcttgatagccccagtacttgagctgaaattagggctaggtggtacatcttatgaagattttataaggaccatgcacttgcctcttcaattaagtcaggtagatcccattgtggcatccttttcaggtggtgcagttggtgtaatctcggcattaatgttggttgaaattagaaacgtcaggcagcaagagaagaaaaggtgtacatattgccatgggactggatacttgccatgcgctcgctgttctgcaagtggaatgctattgaacagcaagagtttttcactttcatgtgacaacggccataatatgtggtctacaaccgaaaggtgccccaattgttcaggagctggaaaggtgatgtgcccaacttgcttgtgcacaggaacggcaatggcaagcgagcatgacccacggatagaccccttcgattagtgatgagcaattggaatctggaagtgtgtattctagctgtactgttggctgccccccctttttgtttgtgttgctgtgataggcctgaatacctgaagaatgaagttcagatcacacaacgaaagccaaaagctgtaaccgtacgatgaatgaactctgtgactagtatagaactctcgtctgtggaactttttccg

SEQ ID NO: 16971 - DNA, 2268 bp, Oryza sativa
  ref <308>: DATABASE ACCESSION NUMBER: AK067440
  ref <309>: DATABASE ENTRY DATE: 2001-12-06
ggcgcggaggacgcattggccgccgctgcagccgtggccgtggcgtccgacaagatgcgctccgtgaccctgggcggttcgatccagagggtgatgcggaggattggcggcggcggtggtggccggagatcggccgggtcgaggggcgcgccgcagcgggcggaatgcctgggggcggggagcggcgacgcgtcggcgagctgctccggggatgatagtagcaatggcactggcaagagggatggaagcagaagggtaaggatgcggcggtacagatcggagctcgagcaagaagtaaagaaactgcagaggcaactggaagaagagattgacttgcagttggcattaacagatgccatcacaaataatgctacactgatacttgagccctctgcaaagcttccaaacaaggcacaggagctaataattagcatagcctccttggagaatactgtctcaaaacttgaaaaagacctaaatgacttatgttaccaactgtgtcatttaaggaacaatacgcgacttgcagaaaataattccagatacttagaaactctagctgaagaaaataattccagaggtctactgtctacatcattacagtaccaaccaccgtcaacttgtaaatgtacaggggaggaagacatttcaacactaagagatataaagctcggagaatctgaatcaatgcaagaaaatttattccctgggcttgaggaccaacagaacattcaaaaagagagtgaagggagagagatagtatctcaagatgggcttctcgaagagcatcaagatgttccttcaaatagattgttggaaaaacactggaacgaagagatgcaagagtcctatcctatggaaaatggaggcagagaatatcagataatagatgcgttatcatttgaccaatctcatcagaggaaaagcagcatcaatggtaatgtgtggaatggcaatccaaataagctctctgaagaaatggtgcgctgtatgagagatatcttccttcgtttatctgactcatcatccgagatatcaccaaaagggtcttctgttaattcaatttcatcaacagaacgtctatctggctgtacattgacatctgtatcagattcatccttgatggcatcagtgatgcaaagcccttcagttgattcaaaccatgacagtattgatgaagttagatacttcgatccctacaacgttaatggcaaggaagttcgaagagacattgggaactattgttcagtagctgaggtgtcttggatgtatgttggcaaggaacagcttgcatatgcatctgaagctctaaaaaatttcaggaatctcgtggagcaactatcaaaggttgaccctacatgtatgacctgtgctgagcggttagcattttggattaacctgtacaatacgttgataatgcatgcatatttggcctatggggttccagaaaacgatatcaagctcttctcactaatgcaaaaggcctgttacattgttggtgggcagtccttcagcgcagcagaaatagagtttgtgattctgaagatgaagactccagtacaccggccacaactttcgttgatgttggcccttcacaagttcagagttaccgaggagcacaagaaatattcgatcgatgatgcagagccccttgtgttgtttggccttagctgtggaatgttctcatcacctgctgtcaggattttctcagccgggaatgttcggcaggagcttcaggaatcaatgagagactacatccgagcatcggttggtatcaacgacagcgggaagctcatcgtcccaaagctgcttcagagctatgccaagggcaccgtggaggactctctgctcgccgactggatctgccgtcacctcacaccaaaccaggtcgcagctgtccaagacacttcgtcgtcgcggaaacagcggcttcttggtgtgcgcagcttcagcgtcgttccatttgactcaaaattccggtatctgttcttgcctgacaacagtagctcccagcactgaaccaagcttgccctgccaattgttcagaaagaaaccaagagtagcattttgacaaactgaaaaagaaaatgaagagatcagctgtacatgttgtaaatcttttagggtgattcttttttttttttgggcttgtaaagatcgtttgtaagccatgcatgcttatataaaaactgtagtataaaggtttgtgtataatttgcttgtttttagcaacaatcaagatggtaaaattcagacagtttttcttcc

SEQ ID NO: 16972 - DNA, 2106 bp, Oryza sativa
  ref <308>: DATABASE ACCESSION NUMBER: AK067441
  ref <309>: DATABASE ENTRY DATE: 2001-12-06
gagtctcgcgtctcttctactgctctccctccacttcgactccactcctcgtctccacggctgcacctttcccactcccgttgaggccgaattaaaaataccaaaagaaaaagggagaaattccaccgcccccctcgaggcccagctcaccggcggccgacgtctccggccattcccggcgaccctccccgcccccccgccggctcatgcttctcggctcggctccggcgaccccccgagcgtagccagatctgggcgtaggtggtgggggaggaggaggaccttgctccgtcggggatggggcggggctgcggccgctggtggtgggtcgccgtggctttggtggtggtggcggcggcggcggcggcggagggggcgcgtgaggaggcagcggtggcggtggcggtggctccgcggcggcacgcgtacgcggcgatgatgtacatgggcactccccgggattacgagttctacgtggccacgcgcgtcatgatgcgatccctcgggaggctcgggtcggacgccgaccgcgtcgtgatcgcctccctcgatgtcccgccgcgctgggtccaggcgctgaaagatgatggtgtgaaggtggtctctgtggagaatttgaagaatccttatgaaaaacaagggaacttcaacatgcgattcaagttgactcttaacaagctgtatgcatggagcctagtttcctatgaccgagttgttatgctagactctgacaacattttcctccagaacactgatgaattatttcagtgtggccagttctgtgctgtcttcattaacccttgtatcttccatacagggctctttgtgcttcagccctcaatggacgtttttaagaacatgctacatgagctagctgttgggcgtgataacccagatggtgcagatcagggcttccttgctagctatttcccagacttgcttgaccgaccaatgttccatccaccagttaatggtaccaaacttgaaggaacatatcgtcttccgttaggctatcaaatggacgcatcttactattatttgaaactccgctggagcattccatgtgggccgaacagcgtgattacatttcctagcgctccatggtttaagccatggtattggtggtcttggccagttttacctctgggactttcttggcatgaacaacgccgtgaaaacttggggtattcatcggagctaccggttgtattaatccaggccctattttacattggagtcattgcagtcacccgacttgcgcggcctagtttgtcaaagatgtgctacaacagaagaatggagaaaagtactatagttttgctcacaacactcagagtagtggcagcatggtccatacttgcagcttacaccatacccttcttcctgatcccacggacggtgcatccgctactaggttggccactatatttgcttggtgctttctccttttcttcaatcgtgatcaatgtattcctcctccacccccttgcggtcctcacaacatggttggggatcatcggtgctctcttcgtgatggcattcccatggtatttaaacggtgttgtaagggccttggcagtgttcgcctatgcattttgctgcgctcccttgatctggggatctttggttaagacaatgagctccttgcagatcctgattgaaagggatgcattcagacttggtgaacctaaccagacagccgagttcacgaagctttattgaggtgtgtattgcagatacatgtcattgcatttcatcagctaattccgattcgcattggctattctgatggccaattcagttgtacaagtaaaaccgcagatgaaactacagttgcacctttaacaccacctgaaacctttggagcccgtgatattcttcgtaattgcgtaggtgacatacagggcaaagggagagaacatagtttgatgtttgtgtgtggggggtgttggttgtggaagtggaactgcagaggaacattatagagtaatttttttgttacttcatttactgctcctctaaaagagccaacacattcttggctttcttgtaattgatatcatcagttccacacgtccactatcatgagattcaggtgttctttgc

SEQ ID NO: 16973 - DNA, 1637 bp, Oryza sativa
  ref <308>: DATABASE ACCESSION NUMBER: AK067442
  ref <309>: DATABASE ENTRY DATE: 2001-12-06
gatttcttccgagttccgcttcttctccttctctctctctctcttcccacgcgcggccaaaattagccaaatcgactcctcgaatcatccgaatcgaatcgcccacttctcctctcgatccgtcctccaaaccctagaagcgaagcagcgagacgccgccattagggttagggtttgctcctcctcctcttccctctacacgaggcggcgctggcgtccatggcgcacggcggcggcgggagggcgaaggtgacgccgaacctggcgatggacgaggaggggacgcgggtgctcaacatcaccgtgctccagcgcctcgaccccgccgtcgaggacatcctcatcaccgccggccacgtcacgctctacgacttcgacaccaacctcaaccagtggagccggaaggatgtggaggggtcgctcttcgttgtcaagaggaatgcgcagcccagattccagtttgttgtcatgaatcgtcgtaatacagataatttagttgaagatctcctgggagattttgaatatcagcttcaggttccctatataatgtatcgcaatgctgcacaagaagttattggcatttggttttataattcccaggaatgcgaagaagttgcaaatctttttagcaggatattgaatgcattctccaaagcaactccgaagccaaaggctccctctattaaaagtgaatttgaagagctggaagcagcacctactttggttgaaggtccactagagcctcaaacatcgaatatcataccagctactacccatgtccaggaggatccgttatctgcattcttcagtggagctataaatgttggcagtgcctctggtttatcagttgcaggacagttaaatcaatcttttggatctactcctttatcttcacatgcaccaacaagtatcagtatatctcagcctccagctgtgcaccatttgctcccttctcaaacttcatcagtaatatcccctgatgttcatggtggaactggtgctgtggtcaacaggtcagcaagccttctaaatccatcacttttttcaccattgacatcttctcagacaacaatggcccgcaccaatcctgtggcacctactgctccacctcaacatcctcgcatcactcagcaaccacacagtgctcccttgcttcaaccctttccgttacctacagcatcgccttctccaccatatgggactccgttacttcaaccatttccgccaccaaatccatccccatctcttgcatcagcaccggtgtacagcccagtactgtccagagaaaaagtcagggatgcattacttaggcttgttgagaatgatgatttcatcgatttagtctaccgggagattgtgaaaggatagaattaacatttcaagacagccttccttccaacaggcttggtttatgtttgactagggacttctatcatctttcgtcagctattcaagttgcaggacatgctactgtatatttgttggtgtaagtccataggtgcaccatcctccattggcggagtttgtatttaagtaccattttcatatctgtaaagacgaactgaatctatctgcacgttggaatattatgtgttgtatatccttggtgcagaaaagttttgctccatacatatctg

SEQ ID NO: 16974 - DNA, 3621 bp, Oryza sativa
  ref <308>: DATABASE ACCESSION NUMBER: AK067443
  ref <309>: DATABASE ENTRY DATE: 2001-12-06
gcgggttaggtttccttctcttctccctttcccgtcgtcgccgccatctcgctcccggtcgtagcgcatccactccgccgccaccgccgccgccgccgcccatcgccctcactaacggcgccaccgccgtgacgccctcggagaagaagaagaagtgcgccgagctgacgaagtgctgcagggcgtgccggccctactacgtcgccgtcgacgaccaccccggttactcctgcaccatcgtctgatcgcgagccacagatctaacccgctgctacattctctggccttctaggctctgcagattcgcgtgtaaatcgtgttcatcggtttcaaagattcagccttgatgctattcacactcctctcttctctgaatcttaaatcttttcctacttattgcgtcgtttatgctgggcagtcgtggaaatgcaattgtgaagactgtgcctttgcaagaaacgccaaggccatcctattcagatttcagtggttaaatccagcaacaagtttataagtttttctttgtttgctcgtgctatcgaacaagttcaagaattgctgcagtccgctgctttgcagctttcgtattgagttaataatcaacacctggtttcaaagagaaaaaaaatcaatcgatatcattttttcctggagttgcacatctggcgcttgcagcatttttttaagttctagcttgtgcttattcagtatgttaaaaaaatgccaaacaattatggcaaccagaatttttcaagatcattcgttcaatgtggttcgctgatagtctgatacacactttgttttaggtaccatccacataaacctataacagttggaattggcacagtataatagtgttgtaactatatcttaattgcttctcttgtgcaaactagttccttttctcatattaggttttccctcatttttaccccctgttatattttaactgaatcagcactacaactttcttttttgtaacaaaaagatatagtgaccaagaaggtaactatgaaactataccatttcttgctgcttgaagatatataactgcttgctgttctttcacatgagaataccatttcttggatatagtaattttgtatgcttaatttgaattgttactaatactagtatctgttcaccctaggatgttactttatttcgcataccatgcatataatatgtgaacaaatcttatacattgtttttttattctttggaataatgctctctacccttgaactggaatcggaagacattggattagagcttaggatcatgctctgatagaaaccactcaaaatgctctccctttgcttattgactttctgaagttcaaactcttgctatacccttgtgtgtatttttatcgtgccgcatttgtgcatggtgactaatcatctgatagcttcatctctgaatcctagcagtctgcctcagattcaatgctcagattctcaagtaaaagatatttttgtctttatctaagcttattttttggactatctcattcagttacaataatgaaatactctatatcagatacatgtttgtattccgacggtacaagctgatgttatcagcctggtttatcatctttttaaaatgtcaacaaatctgtggtcgtgtgatctgtatgcatggtactttgtcctttgaaagactatgggataaccgtgtatcgctatgtcagtttggcttgggcacatgattaccaatgggaattttctgaacaatttcatcctcatttgtattattttccctgttgagctgagcttgatctgaagctactcgcctgtttctaattctttttaggatgcagtttgaattacggaacttgcagggtctggtattctaagaaaaactgaattaccaattgctgccgggaggtatttctgattttgaattaacatttggcagaaacttctgaatttcaactgattttgaatgaaaatttggtagaaaattatgccggacttggaaacaatcacagcaggtactatttatttagccagtcactagattgggcccgtaattgtgggattgtagccaagctgtttattcccagtcaaaatgaacatggggatttaggagagggattaggaacatgcaagggattcaaacccccaaagggattgagtgatatgggagggattcactcaatccctccctggataggttccccttggggattggaacccaaggaaccgaataaggccttagggaggtgcctggttctcccatcaatcgaggagggcaagttggatgaacgagacagtaccgagtcctcttctgttaaagtgatattgttttcaaacatccatatttatagctatatataaaaaaataaattttctaatttttgttagtgttgaattgaagtcatcactaaatagttaaattctacaaattgaaagaaaaatccgaataaatgttatcgtgaccgttttcattctcatgatgtcatgcatagatatttggatcacacattttcttcccttgcaatgcacatgcactttgctagtatgttgtaaaagttaaaacatgtcatattggttttgataaatttaattagtttttatgtaaacttgagcatacttattcacattattttttttaattcttcttattgtaaacaatattttataagatcctaaggatcgtggagtcgggatactatcatatttcgtaggattctgtgaaaataaatagtaaaatcaacatactatgaaaatttggatactataaatcgaatcggtatcatttcggtttgtgagttcgtagtaccataagatactataagagcaagtttaatagtataatcaactactagctccaaatcatctatagtcaatttaatagccgattgtacctataaacatacactacacttttataattcctggtctcacatgtcatacacatgttacatcttggagtccgtgctgcagctagctacaaatctatagcccactgctcttctctcttcttttatcttcttaaaatatgtttatagctagcttatagtctactattctacctgctctaactcacggatcgggattcggtatcgtttcggttttgtctacatattaggacaacttcagatttcggcccgggtcatctggcccaaccacgcaccactgccactgcggcagcaacatctcccttcgtattctctcctctctcggcggcggaaggtttggtgggagatggcgccaccgggatcgcggcggtgggcgtgcgtgcgggtgatgaccgggaccatcctcggcggcgcgctcggcttctacgtcatgcaccgcctcgagacctcccacaaggcgaagatggaggagaggctgcgcaagtacgaggcgcacatgagcatggtcgccaaggggaaggaggaggcgcagcagcggctgcaggacgaggcggcgctgcagcacaaggaccaggcccggctcttgccggactcatgaccttcatttagagtaatacctagcggctcagagcagtcccagatcctttcttcagaagtagatgagaaataacaaccagcatgtacttgagaaataacaatccggcattcctggcattatttgaacgcggcaagtgttttgtttgaagaatgtg

SEQ ID NO: 16975 - DNA, 2100 bp, Oryza sativa
  ref <308>: DATABASE ACCESSION NUMBER: AK067444
  ref <309>: DATABASE ENTRY DATE: 2001-12-06
ggtttggaccaatccaagcaagtttcattacttttgtactgctgggtcaccacgccaacaagttaacaaagtctttcacacatctcacatcgccatttggccatttcctctccaatggtcatggccccaataccccagccatggcatcagtggccctttctcatcctcttcttccttgtacttttctcctgtgaatctaatcttccctgcaggaatggtgtagaggccacacagagagtcttcctctatccacagtctccaaaggtctcctctattgtcagcaagggatacagaactggatatcacttccagcctccaaagaactggatcaatgatccaaacgggccaatgtactacaatggcatctaccatgagttctaccagtataacccgaacggatcagtctggggtaacatagtttggggccactcggtctcgacagatctcatcaactggatccgtcttgaacctgcaatagaaggaaatactccgagcgacataaacggttgttggactggttcagcaacaatcctcactggtgatcaaccggttatcatatataccggtgccgacacggagaagcgtcaggttcaaaacattgtgctaccaaagaaccggtctgatccttacctgagggaatggaccaagccaaaaaacaaccctttgatcgaaccggtcggtccgggtttgaactcaaaccaattcagagatccgacaaccggttggataggaccggatgggctatggagaatagcagttggggctgagctgaatggctacagtgcagcacttttgtacaagagcaaagactttatgcagtggactagagtagatcacccattgtattcttctaatgcatccaacatgtgggagtgcccggatttctttgcagtattgcctggcaagaacaatggactggacctctctgcagctatcccaaatggcgccaagcatgtcctcaaaatgagcttggattcctgtgacaagtacatgattggggtttatgatctgaaacatgacatgtttgtgccggatactgtcttggatgacagacgattgtggttgaggattgattatggcaattactatgcttcgaagtcattcttcgattcgaaaaagggaagaaggataatatggggctggactaatgagacagatagtacgtcagatgatgttgcaaaaggttgggctggcatccatgcaatccccaggacaatttggttagatggtgatggcaagcgattgctgcaatggccaatcgaagaggtcgaatcgcttcgaagaaacgaagtcagccatcaaggcttagaactcaagaagggtgatctgtttgagatcaagggaactgatactttacaggcagatgtggagatagattttgagctgacatccatagatgctgctgatccttttgacccttcctggcttttggacaccgagaagcattgccgagaagcagatgcatcagttcatggcggcttggggccatttggacttgttgttcttgcctctgataacatggacgagcacactactgtgcacttcagggtttacaaatcagagcagaagtacatggttctcctgtgctctgatctgagaagatcatcgttgagaccaggactgtacacaccagcatatggaggcttctttgaatatgaccttgaaaaggagaagaagatctccttgagaactctgatcgaccggtcggcggtggagagcttcggcggcggcggcagggcgtgcatcatggccagagtgtacccggcggcggtcgtcgacggcgccacccacatgtacgccttcaacaatggcagtagcacggtgaaggtgtcgcagctcaaggcatggagcatgacgagagcacaggtcaatgtcaggaagggatgaactgattgattaatcaaaatggaaacaagagagcaacatattacatgctaattgtccagtaagtagttaattgactacccattcatcagaactcctttggtaggaataagaaggaaatccagaatcaaaatttttagctgctcacagacttgttgatgacatctacttgctttgtagcaatatgtttttacttgtagaaaggagatggaaatc

SEQ ID NO: 16976 - DNA, 1822 bp, Oryza sativa
  ref <308>: DATABASE ACCESSION NUMBER: AK067445
  ref <309>: DATABASE ENTRY DATE: 2001-12-06
tcgccgcacatcctcctactctctcatctcccactcctcgtcgctagatggggcgaggatctcagtggtggcgacgagctacgccgccgctgccgtatttctcctcgagcggcggctgcgctcccttccaccaccgcagccgccgacttccgctggggaccaaaccctagtcgcgcggagacccgcgcttcgtctcttctgggagttccggcgagtccttgtcgatgaagaaggacgatgactatggctcggtcacaatcttccacgacgcgcgctcgcccgagcacgtcttccaggacttctgtcgccgctgcgctggcatcatcaaggccctcaccaccggtatctctctctttctatctcctctctctatcaatctatctatgtgtttctgcatttgttggtgtggaggttcaattcgtcgttgtttagttgttgtgcagacgtgggaaagctctacaagctgaagttgtgcgaccatggtgagtaaataattgttagagtagtagcacacatatatagtagaaccattatttttttttctcatgagcgttagttacatgctatacttttttattacgttaagatgacataattattgtgagaaataattttagtatgcagaaaaaaaaaattagaagtgtatacatagacagaaaccatgcgaatgttgttattctagcagctatgcacttttattatcagtgcaatgttttgttagctataggcaacttgcttttggctgagcagctttgaatctatttgtcatatatgggctagcagtaactgtgcttattcacatagtgagaacattgagctcatatgcaaagaatctgagattgtcctgtttttgtggttcccctaaaaaatattacagtaacatgtttcttatccacatgataaaagttagagctcaagtatatcaaatgattgtgaagtgaaacaatttatatttgtaaacgggaaaaaatatggacaaaatcaaattcttcttcctcctcctctgcactgcttaaaaagagtgaaagcttaactttacactgctctgcgaccaggttacacatataaatattcttttttttctcgaacagcatatacacactcgcatgtatgtaactttagtatcacagatcagagggttaccacataaaccaaaaaagatatattcatctttcagtttaactaaaaacttataaaaaaacacttcagtatcaggaaagtgagtatctgacacaattatcctgatatctgacaaacaaaaaacattaggtatgcaaaatcaagtatcatagggattgggcatcaagtctgactctttcatttcactatgagtgtaatggtatatatagtcctaccgttttactcttttatttttcctcttgctttctctgtgaacataacaatatatcaagttaacttataactactttacttatctttttttctagggaaattcgttcattcactgtaagtatcaagggataaagattgtgcatccgcacaatgagctgtatcacggatgctgtaatgaaatggttcgatgggaacatagcatcaaccctgaaatctttatcaatgcatacgattgctatgtcaatatgacgtgttagatttattttgatcccaaaatggacgccaggattgctgagatggatccaatggatgataatgaggatggtttcaccgagttggtatggcaggatatgttgatagacaacttctatgaaaacgatgtgattcttctttgtgcctgaatgttcgtttatgtatttatatttgttgtcctttgttatcagctttttaaaatggaagtgtacttacc

SEQ ID NO: 16977 - DNA, 1174 bp, Oryza sativa
  ref <308>: DATABASE ACCESSION NUMBER: AK067446
  ref <309>: DATABASE ENTRY DATE: 2001-12-06
gacctcgcttcacactagccgaggagacgcgagcgcgagctgctctcctctcctcccgccccgcgtcgccgacgtcgaggcggcggtcgacgtcgacgtcgccggggatggccgggcagcagccgcagcagcagggcccaccggaggacgactttttcgaccagttcttctccctgaccagctccttccctggcgccgcgccgggcggccgcgccgccggtgaccagcccttctccctcgcgctcagcctcgacgccgccgcggcggccgaggcgtccgggagcgggaagaggctcggggtcggcgatgacgccgagggtggcggcagcaaggcggatcgggagaccgtgcagctcaccggactcttcccgccggtgttcggcggcggcggcgtgcagccgccgaacctccgccccaccccgcctacccaggtgttccacccgcagcagtcgaagcagggcggagcagccgtcgggccgcagccgccggcgccgaggccgaaggtgcgagcgcggcgtgggcaggcgaccgacccccacagcatcgcggagaggctaagaagagagagaatagcagaaaggatgagggccctacaggaattggtccccaatacaaacaagacagatagggcagctatgctagatgagatccttgattatgtgaaattcctgaggctgcaagtaaaggttttaagcattagcaggctgggtggcgcgggtgctgttgcacagctggttgctgatattccactttcagttaagggggaagcaagcgatagtgggggcaaccaacagatttgggaaaagtggtcaacggatggcacagaaagacaggtagcgaagctgatggaagaagacatcggggcagcgatgcaatttctccaatccaaagcactctgcatgatgccaatctcgctcgccatggcaatctatgacacacaacaaacacaggatggacaaccagtgaagcacgaacccaacactccttcctagtatagtaatagcaactgtaagtctgtaacatgaatcgttacaacccctagtagacatcaacctatcaaagtgtaagataaaacagctcgttttgattcactaacaaggaggcaggaaaagacctaagagatcctctccacttgaagttgtaccaatggtatatgatgtcacctttcgttatc

SEQ ID NO: 16978 - DNA, 2985 bp, Oryza sativa
  ref <308>: DATABASE ACCESSION NUMBER: AK067447
  ref <309>: DATABASE ENTRY DATE: 2001-12-06
gattcccattcacaatccttccttattcaacaatttgtctgatacttgcatgcccacaggcagctcaaaaagctagctacttgtttctgacttgtatcatttctacatagatagctcaaagcctctcaaaatcctgcatttcttgctcaaatggatttttcaaggcatagattcttcaaattcagatcagcagctgtctccttcctctccatgtaactaatttcaagctctcaagatcagcaagttcagcaatcaccagactagctaggctcactccttccacatatagtcacagctgctctcatcaatcaatctatctttccagcttccaggtgacaatcgagacctgaatttctgaacttttttttccctctcgtcacttcgtcagtagaaatccaaggtttatattcctctgtactactacacaacagagtgagcgtagtacgtgtctcatcagcatcaaaaagtgacatactgcaagcacgccacaattgaggccgattgatagaatcgaattccactcaaatttgcacggtggaagagaatcccctgcgtgcttgatttgatcaggatttatattggaggcatccaattccatcactcaaccggagctgtctgtctgtagctatcgccctatttctgctagctcgtggcgtgctagtttaatttcttccaaaattctccggcctcacctcgcgtcgtgtcgtgtcgcgtcgcttgcgttaggaggtgcctaagtactggcttgtcggcgtcggatgagtgcagggccgtgctgctcagaggcgcccatggcgtggatcgactgctccctcctcgcctggctcctcttccgcgtcgtcttcttctcctgccacgccaagcagttcagcatcttctaacactcgatctcagctaggctgaaaccacatatactccagcatatatacacagcaactgattaagtaagctgttgctcgccgacggtggccgagcatgtccggtgcacggcggtgcggtgaccggaggtcggagagaagttcggtggtgggcgacaacaggaatggatacgtcgagactgacccaactggtcgctatggccggttgtcggaggtgctggggaagggtgcgatgaagacggtgtaccgagggttcgacgagctgcggggggtggaggtggcgtggaaccaggccaccatctccgacgtcctccgcaccccggacgccctccaccgcatgtacgcggaggtgagcctcctcgccgacctccgccacgacgccatcatcgccttccacgcctcctgggtccacccctcccgccgcaccttcaacttcatcaccgagctcttctcctccggcaccctccgctcctaccgcctccgctacccgcgcgtcagccgccgcgccgtcgccgcctgggcgcgcgccatcctccgcggcctcgcctacctccactcccgcggcgtcatccaccgcgacctcaagtgcgacaacatcttcgtcaacggccacctcggccaggtcaagatcggcgacctcggcctcgccgccgtcctccgcggctgcacctccgcccgcagcgtcatcggcacgccggagttcatggcccccgagatgtacgacgagtgctacggcgtcggcgtcgacgtctactccttcggcatgtgcatgctcgagatgctcaccaacgagtacccctacagcgagtgcgacaacccagcgcagatctacaagaaggtcaccgccggcaagctccccgacgccttctacctcctcaccgacgccgacgcccgccgcttcatcggccggtgccttgtcgacgccgcccaccgcccctctgccgaggagctcctgctcgaccccttcctctccccgcctcagaaccacgacgatcacaataccattgctcatgccactgcgccgccaccgccattgccattggcgtgcagtaattccagtgaggagcaagaggaggaggaggcgccggcagcaaagacgacgggcatggcgatcaccgggaagctgaacaaggagcacgacaccatcttcctcaaggtgcagatcggcggcggcggcaacgtgcggaacatctacttcccgttcgacgtggcgaacgacacggcgatggaggtggcgacggagatggtgaaggagctggacatcgccgaccgggagcccacggagatcgccgccatgatcgagcaggagatcgtgaggttggtaccagggtacaagcagcacgagtattcgtacgcggatgacgacgacgatgatgacgtcaacggacaacctaatcccttctactacctctcctcttcgccgacctcctctcagggatctctctgcggagtggggcccacatcgtcagaggggtttcctggcccacatggaaaagttgactggtcaagagattactgttactaccctccaagcagcgtcagcgtgagcgacgacgatgacagcagcacgagctcactctctgctgcagtcagcgcaatcagcctgcagcagcagcattgttcggcctcttccagcagattggggccagcatctgcatcagcatctgaagacggaggaggacacgccggacggccacggcagcgagagggggaggaggagcggcggcggaggaggatgagtcggaacaggtcgatggtggacatgcggagccagctgctgcacaggacgctggtggaggagctcaacaagcgcctcttcttcaacaccgtcggcgccgtccacgacatcggcttccgcgaccctactacttacggatcgtcgtcgtcgtcttcttcgtcacagcatcgccggagaagcagcagcaaggtcgaccacaagcaccactacatgttctgaataaactttttcagagcaaattagtactctaatttggtatgtacagaatgatcgatcagatgcagagtacgtaagtgtgcagctagctatctagcccgcggccacaaaattgtgtatatttggagagaagtgcatatatgagtgttgttc

SEQ ID NO: 16979 - DNA, 843 bp, Oryza sativa
  ref <308>: DATABASE ACCESSION NUMBER: AK067448
  ref <309>: DATABASE ENTRY DATE: 2001-12-06
gactgtactagcaaccaggcttgatatattttagtacttccccctttttttttccgagtgtgtggctctcagatggagttagttcatcgttatcctaatctgatttcaattcaaaattgttcaattgattgttggttatatgcgtctagtatatgcagaggctggtttccaagaaggaggagacgaagacgatcagggtgaagccgggttggaagaaggggatgaaggtgacgttcgaggggatgggcgacgagcggccgggctgcctcccaggcgacgccgtgttcaccatctcggagaggaagcacaaggtgttcaagaggaaaggcaacgacctggtgctcaaggccgaggtgccgctggtgagcgcgctcaccggctggtccttctccttccggctgatcggcggcgagaagatgagcttcacgttccgcgacgaggtcatctcccccgggtacgagaaggtggtcgccgacgagggcatgcccgtcgtcgccgccggcggcggcggcgagaaggccgccgccgcgcgcggcgacctccgggtgaagttcgacgtcgtcttccccaagaacctcaccggcgagcagcgcgccggcctcgccagcatcctcagagcctgtccgtgatcgaattaccacacgcatagtagtacacatttttacaagttttttttttttgtttctactcgtgtagaaaattttggtttcattttttggtgttgatatactagcgatggatcgatcgatcgatcaccctgcaggtgagtacataaagatcgagtatgagatctgagcgaccgttttgacgcatatacgtatataaatacgggatggttgttgc

SEQ ID NO: 16980 - DNA, 902 bp, Oryza sativa
  ref <308>: DATABASE ACCESSION NUMBER: AK067449
  ref <309>: DATABASE ENTRY DATE: 2001-12-06
gatccaccgctccatcgccatcccctaaccatcccgtgccgccgtcgccttcgatcctccccgccgccatcgccgtcctcctccaccgcgtcgccgacggctccattaccgtcccctaaccgtcccgtgccgccgccgccttcgctcctccccgccgtactccaccagctccctaccccactgctcgcctcgccgctgccaccgcctccgtcgaaccaccgctggcgcggggaggactcctcgtggccgactccgaaaccctagacactacccccaacgccggtcacgccgtccggtccgtcgccgcgtcctcctctccatcacccgccgccaagggattcaaggcccctgttcagccccttctgccaccccacatgccttctatacagcatcctttgactagcaagcaacctgggaagaccttgaagatttgaagacaaggtttcctggacttcctgcttggggacaagcaggctttcaaggggtagggattgtcaggaacacgccaagcaacgccaaggtagcggtacaaaaagatacagaagaggagatccgtcctgatgaatctgaagagcaagaggaagaagctgaagctccagtggagagcgatggcgcgaagcaaggaggaggagaacaagacttggtggccaagcgtcggtcgtcaaggcctatcaagcccaacccacgttatcaagtctctcaatgggttgcgtaaagcagttgtcgttgtaacagcctggctctgtccagctggcgatgtatcacgtgagagagaggaggagtagtatatgtactcaagtctaagaagaacagagacatgtcttgagactggcaactcggaggcgaaggcggcggcggactcaatcctgttggattggagtataattccactaaagttgcct

SEQ ID NO: 16981 - DNA, 1059 bp, Oryza sativa
  ref <308>: DATABASE ACCESSION NUMBER: AK067450
  ref <309>: DATABASE ENTRY DATE: 2001-12-06
ggactactcctccacctcttacctgacatgtaataagcgagctgaccaacaaacccaaccccgacccgcgccgccgcccgccagcgaggtcgtcgccggcgtctaagctctcattcatggcggcggaggcggcctccggtggcggtggtgggtaccggatgctgccgcaggcggggttgccgatcggtttccggttccgacccaccgacgaggagctcctgctccactacctccgccgcaaggtcatgtcgcgccccctccccgccgacgtcatccccgtcgccgacctcgcccgcctccatccatgggaccttccaggcgagggagacggcgagaggtacttcttccacctgccggcgacgagctgctggcggaggggcggcggcgggagcagggcgggcggcggcggcggcgcgtggagggcgtccgggaaggagaagctcgtcgtcgcgccgcgctgcggcaagcggcccgtcggcgccaagcggacgctcgtcttcttccgccgcggcggcgcccgcaccgactgggccatgcacgagtaccgcctcctccccgccgacgaccatccgccggaggccaacgacgtctgggtggtctgccgcgtattcaagaagaccaccacgctggctcaccgccgttcgccgccgtccatccgtggcgcgccacgccggcgagccgccgccgccgacgacgacgacatgccgtcctcgccgtcgtcctgcgtgacggacggcggcgacgcgggggaggagggagaagagagcagcagctgcagcgtcgtcgcttctaattgtccatgagatgatcagatgagagagggagaggttttaccgtgttagtgtttgactaggccgttaattaccatgctttcatgtcctaatcagcgcccttcttttgctctactaatgtcttttaattaattaactagttgtaattcctagcaagagagaatcagaatcgagctcaaacaaagaagagaaaaaaaaagaaaagaaaattctcatctttgtttgagctcactccgaactccgaagataatcaattatccttgtttcc

SEQ ID NO: 16982 - DNA, 2602 bp, Oryza sativa
  ref <308>: DATABASE ACCESSION NUMBER: AK067451
  ref <309>: DATABASE ENTRY DATE: 2001-12-06
gcttgtctccttgtccggtacgttggttggctctagcttagctggtgctcgatcgcgaacatcatgtggaggctgaaggtggcccagggcggcggcgctttgttgcggtcgacgaacggcttcgccgggcgagcggtgtgggagttcgaccccgaccacggcacgccggaggaccgagccaacgtcgagagggtgcgccgcgacttcaccgaccaccgcctccgccgcccggagtccgccgatctcctcatgcgcatgcagtttgcaagagaaaacaatcaccaacgccgtggtgatcgtattccaccggccgtcaataagcttggcgagaaggagcaggtgactgaagaaactgtgatggcttccttgaggcgagctctcgatgagttctcctctctgcaagcagatgatggccactggcctggcgacctcagtggtgctatattcatcatgcctgtcttgatattttctttgtatgccactggatcactggacactgtcatatcatcagaacaccggagggagatatgtcgctacatctataaccatcagaacgaggacgggggatggggcatgctaatcttgggatcaagcacgatgtttgccacatgcttaaactatgtcaccctgagacttatcggcgaggagccaagcaatgagcaattagctagaggacacgcctggatcatatcacatggtggcgccacccttgttccgcaatggggaaagatatgtctgtcgataattggagtgtatgagtggtcaggaaacaaccccatcttccccgagttatggcttgctccacaattccttccgtttcatccaggcaaattctggggcccgacccgcgtggtgtacgtgccgatggcctatctgtacggcaagaagttcgtggggcccatcacgccaaccatactggcgctgcgagaggagatatacacggacccctaccacaccattgactgggcccaagcctgcaacgcatgctccaaggaggatttggtctgcccgcgcacgctgctgcagaatgtggtgtggacttcgctctacaagtgggtggagccggtgctaggcagcaggccgatgaacaagctgagggagagagctttggatagactcatggagcatatccattacgaagatgaaaactcacagtacctctgcctatgtcctgtcaacaaggctcttaacatggtctgctgctgggtggaagatccaaattcagattcattcaagcggcatcttgcaaggatacctgatttcctgtggctttcagaagatggcatgaaggcacagatatatgatggttgccagagctgggaaacagcatttataattcaagcgttttgtgctactgatcttgtaaatgagtatggttcaactgttaggagagcccacgagttcatgaaaaattcacagattatgaggaatcatcctggtgaccaaagttactggcatcgccatagatcaaagggttcatggactctttcgtcagcagacaatggatgggctgtgtctgacactacagcagaagcgctgaaggctgtactgttactggaaaagatctctagcaacgtggtcggggatccaattgaaatagaaaggctgcatgatgctgttgattgcctcctatctttcgtggacaaagatggtaccctttctacatatgaatgtaaaagaacttatacttggatagaggttctcagtccttgtgagagttttccaaacatagtggttgattatccatttccagaatgcacctcctctgtgcttcaagctctggtgctgttcaaacaactacaccctagttaccgtattaaagagatagaaaaatgtgtcagaaacgcagcgatgtttattgagagcacacaaggcgaagatggttcatggctaggcacttggggtgtgtgtttcacctatggggcctttctttcagtaaaagggttaattgctgctggaagaacatatgagaatagttcttccatcaggaaagcatgcgactttatattatcaaagcagctcgatactggtgggtggggagaaagttatgtctctaatattactaaggtttacgtaaacattaaagatgatcaagctcatgcagtgaatactgcctgggcaatgttagctttaatttgtgcaggacagatggagcgggatccagcaccactgcatcgtgctgcaaaagaattaatcaatatgcagttggaaacaggagagttcccccaacaagaacatgttggagccttcaatgcatgcctcttctttaattaccccaactaccgcaacttattccctatctgggctcttggagagtactgtcgtcatcttcactccacgaggcgtgcatgagcatggcatatggtgataaatgaaggggtcgatgggcgatggcatggctggaatatcttatatagtgtgtgtatgcaatccaacctgatgttgtattgtcaagactggcaatcataattccttagggaaagtatatgaagagagtgtaacttaaacatgttattgttattgtatttgtgtccatgaagatgaactctcttaaataaatttatcggggaaaaaaaaggagatatgccttcagaaggtgggc

SEQ ID NO: 16983 - DNA, 2281 bp, Oryza sativa
  ref <308>: DATABASE ACCESSION NUMBER: AK067452
  ref <309>: DATABASE ENTRY DATE: 2001-12-06
ggtgcgcgcggcggcggtcgagacgctcgaggggcaggcggcgacgggggcgctgctcgagaagtcggtgaacacgatccggttcctcgccatcgacgccgtcgagaaggccaactcggggcaccccggcctgcccatggggtgcgcgcccatggggcacatcctctacgacgaggtcatgcggtacaaccccaagaacccctactggttcaaccacgaccgcttcatcctctccgccggccacggctgcatgctccagtacgccctgctccacctcgccggctacgacgccgtcttggaggaggacttgaagcaattcaggcaatggggaagcaagactccaggccatcccgagaacttcgagacgcccggagttgaagttaccactggacctcttggtcagggtattgcaaatgcagttgggctggcccttgctgagaagcacctggctgctcgtttcaacaagcccgacagcgagattgttgatcactacacctactgtattttgggagatgggtgccagatggagggtatctccaatgaagcttgctcgttggctggccattggggtcttggcaagctgattgcattctatgatgacaaccacatttccattgacggagacacagagattgcattcactgaggatgtgagtgctcgctttgaggctcttgggtggcatacaatctgggttaagaatggaaacgatggctatgatgagattcgtgccgccattaaggaagcaaaggcggtaactgacaagccaacactaatcaaggtgaccaccacaatcggttttggatcacccaacaaggccaactcatacagcgtccacggaagtgctttgggtaccaaagaggttgaagcaaccagagagaaccttggatggccctatgagccattctttgtgcctgaggatgtgaagagccactggagccgccatgtgcctcaaggtgctgcttttgaggctgactggaatgctaagttcgccgagtatgagaagaagtacccagaagatgcagcgaccttgaagagcattgtctcaggggagttgcctgctggctgggctgacgctcttcctaaatacactccagagagccctgcagatgccaccaggaatctgtcacagcagtgcttaaacgcacttgctaaagttgttcctggtcttcttggaggaagtgctgatcttgcatcctccaacatgacattgcttaagatgttcggtgacttccagaaggatacgcctgaggagcgcaatgtccgatttggagtcagggagcatggaatgggcgccatttgcaacggcattgctctgcacagcccaggactcattccatactgtgctactttctttgtgtttcactgattacatgagagctgccatgaggatctcagccttgtgtgaagccggagttatctatgttatgacccatgactctattggtcttggagaagatggtccaacccatcagcccattgagcacttggtgagcttccgtgcgatgcccaacattctgatgcttcgtcctgctgatggtaacgagactgctggggcatacaaaatcgcggtcctcaacaggaagaggccatccgtccttgctctctccaggcaaaagcttgctcagctgcctggtacctcgattgagggtgttgagaagggtgggtacatcgtctctgacaactcaactggcaacaagcctgacttcattgtgatgagcactggctctgaactagagattgtcgccaaggctgctgatgagttgaggaaggaggggaagactgtccgtgtcgtgtcatttgtttgctgggagcttttcgatgaacagtcggctgagtacaaggagagtgttctccctgaggctgttactgcaagagtcagccttgaagcagggtctactcttggatggcagaagtacgtcggaagcaaaggcaaggctattggcatcgacaaattcggtgcaagtgctcctgctggaaagatctaccaggagtatggcatcaccgcggagaacgtcatcgcaacagcaaagagcctgtaagattcaaaccgcgcgttttgagtttttgtcatcgttgatgccaaggaacagtatacatgaagccatgaaggtcttgtgcccaaagcttggaataatgaagggagagggatgcctgcattggagcgtgagtggtattttaggcctgtaataagcactgcttttccatttacgtttgttttgttggatcactccttagatgattcatcaagttgagcctgattcaattggggactggttttggt

SEQ ID NO: 16984 - DNA, 1365 bp, Oryza sativa
  ref <308>: DATABASE ACCESSION NUMBER: AK067453
  ref <309>: DATABASE ENTRY DATE: 2001-12-06
ggaggacaatgagcaagtgagcaactggctaggttacctggttagctagtaacaactcaaacattgtaagcgcatagaggagtctggtgctctactcaactctgaaacaatcaactgcaccagtgtactaattaaatatattactgtacttaagacatggctatcgcgtcgtcgtcgttttcacttgctgctatcctcctcatcatcatcatgtactgctgccccacgggtttggtggaggcagctcgcaaggggccggctgctgccggcggcggcgacgacagcgcgatgagggagaggtacgagaagtgggcggcggaccatgggcgcacgtacaaggactccctggagaaggcgcggcgattcgaggtattcaggaccaacgccctgttcatcgattcgtttaatgctgcaggaggcaagaagagcccccggctgacgaccaacaagttcgccgacctgacaaacgaagagttcgcggagtactacggtaggccgtttagcacgcctgtaattggaggtagtggcttcatgtacgggaacgtgaggacctcagacgtgccagccaacataaactggagggatagaggcgctgtcacccaagtcaagaaccaaaaggattgtgcgagctgttgggcgttctcagcggtggcagcggtggaaggcatccaccagatcaggagtcacaatctggttgccctctcgacgcagcaactgttggactgctccaccgggaggaacaaccatggctgcaaccgcggcgacatggacgaagcgttccgctacatcaccagcaacggcggcatcgccgccgagtcagactacccctacgaagaccgcgcgctgggcacctgccgcgcctcagggaaaccggtggcggcctccatcagaggcttccagtatgtccctccgaacaacgagaccgccctcctgctggccgtcgcccaccagcctgtgtccgtggcactcgacggcgtgggcaaggtgtcccagttcttcagcagcggagtgtttggcgcgatgcaaaatgagacgtgcaccactgacctcaaccatgccatgacggcggtggggtacggcaccgacgagcacggcaccaagtactggctaatgaagaactcgtggggaaccgactggggcgagggaggatatatgaagatcgcgcgggatgtcgcgtccaacaccggcctttgcggcctcgccatgcaaccctcttaccccgttgcctaataaactaaagagacataaattgagccgataaccgtgttagcgtctggtgaaaaagtagtacggcgtggtgtaatatgcgattcatgtgataaattattatcagtgtttgttatattttactatgccgttttcatg

SEQ ID NO: 16985 - DNA, 1355 bp, Oryza sativa
  ref <308>: DATABASE ACCESSION NUMBER: AK067454
  ref <309>: DATABASE ENTRY DATE: 2001-12-06
catggggggaagaaatcaagaacggagaggagggaccagacatggctgcaccgggcgaggaggagcaggagcaggggaggaaaggcatcccgtctctgctctcctccagggaggagaacatcgcctctaacatcactcagctgattggatggacaccgcttgttgagatgaagaacatcgcgaagaacgaaggcgtacaggctcgattggttgggaagatggaagcataccagccactctgctctgtcaaggacaggagtgccctcagaatgattgaagatgcagaggagaaagggttgatcacacctggtgttaccacgctgattgagccaacgagtggtaatctcggtatcggtttggtgctggttgctgttcagaaaggctacaggtttattgctgtcatgcctgctaaatattcgcttgacaagcagatgctactgaggtttttgggtgctgaattgatattgacagatcctgcaattgggtttaatggtatgatggacaaggtggaagagctcatgaagagcataccaaattctcattgtctcaatcaagtaacaaacccagcaaatccagaggcacactttatgtggactggacctgaaatatggaaagacacagccggcaaagtggatgtgtttgtggcctctgttggttcaggtggcacattgacaggtgtagggaggtatctgaagatgaaaaatccatctataaatattgtgtgcgtggaaccttcagaaagccctgtaatttcaggtggttcaccagggccacacaagattcaaggcactggggcaggtttcatacctgaaattttggacaaatctgtcatcgatgaagtagtgacagtaaacacagaggaatccatggcaatggcgaggaggctggcgaaggaggaaggattgcttgttggcatatcttctggtgcaaatgtagctgcttgcatcaagattgcagacagagaggagaacaaggggaaaatgattgtgacaatgttcccgagcggcggtgaaagatacatgaactctgatctctttgcacctgttagagaggaatgtgataatatgaccttctgatgatgtcttggagctgctctccttttcaggcactgtacacatgtgttttccacttttcctccatattgttacttaagatatgcttcatagttcagagcacactatacatttttcttgttgcttctttgttgaggaagagcaagaatttcagcataatgtgatgtgctcctttgtgcatgtgttgtaaatttattgtatatcctaatatgccggcaaagtggttgtctatgacctacacaagttgaaataaaaaaaaatgggaccaatctaggaaggact

SEQ ID NO: 16986 - DNA, 2443 bp, Oryza sativa
  ref <308>: DATABASE ACCESSION NUMBER: AK067455
  ref <309>: DATABASE ENTRY DATE: 2001-12-06
gcggggctccttcctagacccccccatcccattctcgccgccgccctcatctcgctccgttttttctgccgttggaatccggatcttcgtcgtggtcgcgtcgccggtggccgtcgcgagcatcgaagcacacctgcaaaaactctcatgtgatgacaccttcagtacaaagctgattctgaaggctgaaaacatcaaattctggcacttaaagttcttctggcgggcaacttgaagtggcgctgctccagatcatgcaacgccaccaccacgaatccctccgtcagcgcaagcaaactgagagagcaaagatggatgctgtgaggagtgcggcgcgggttgcagatcttctcgtggccacggttgacggcggagtgcaggagctctacatcaacgagaagcgcatagagcttgaagcccgcgcgcttcttgctacaatcgcgtggtacaggaagcagactgaccagtggcttgctgccaccaatgcaatcaactgtcttgaaggaaattggagattttgagaactggatgaagatcatggattttgactgtaaaagtataaatgcggctatccgtaacattcaccaatcctaactgtgccggtgactatggtgttaggaagattttatcctgttcctactcagtttagcactgtttttttttctgagttgtcaactctgttgtataggactggtttggtctacaaaattgaaaaattcccaagctttttactgggaagcctcctcgtaggcaacaatatattctgttgcaaatatttgatctacctcagaaaataaatattggttctaaggagaaatcttcatctactatatgccaaactgtatactctgactatattgtcaactttttcactttggtaatgaatatgatgatatattcatgatatgatatattactagcttttcctcattgctgatataggctcttgcatatctgcatatcaagcacatacagtaggaaaatatctaatgccaaataagcatgattgccgcattatttaattgttattttaatcatcttttgatcatagacctgaaccctagacaattaatatgaaatttgttgatttgcatgtactatgattatgagttgtactagtatttaaggagctatagtcaatgaactgaatgttggcattaagccaagtaatgatcaatgccagcatgataggtcattctgaacagcagttcttaaacattgttattacaagtttttcttttacagtctctttagaaggttgaaagcatttggagaacttcaaattgaagggaaaatttccatgccttgaggaattaacattcccgagaacagcaaaccataagcaagatgcgttccgtactatggtgggcaactaacaagaaactgtaggtgctacgtacgcattggcaccaatggagtttgtgattcttcctcctgcagccaccagcattatgacaggaggagcaagtacgatgcaattgttgtgacaggagatgcgaggttcactagtttcatgtcgcacagttaaaggatcaggaagcagcagcaggaagaagatggagactgcagatgatcatgagtactgctactattactatgaagaacaagcatcatctgttgctgttggggccttaacgatggcgaacactggtactaatagttgtatcggtacactattattgatgatgatgattgacggggctctgtgctgctcatgaggcgaggaaacaatcccggcccatgcgaaattgtgcgttcggttaagccctagcgtggattttagcccagcccaccacggggtttccctgttctgtaggcccaggaaaaaatcacctactcaagaggagcggaaaaattcctcgagaggagcggcggcgcaatgaacacacagacgcgacggcaggggtggcgtgcggcgcgacctggaggcgacggcaacggcgacggcatggttctctcctccggccgccaccttctctccgattgcacgtgcaccaattagagttggagaagaccaacctcctccttcctgggaccctgtaccctctccaagaggaaatgtaccgcactcatatttttttgacttccaccgaagaaatgttgcaagaatcctaaattgatcagaagattcagaactatcccgacttcgcaaaattcgtcgacggaatggtaaacaagggacagatttttgttatagatgattctggacaagatggtgtcatggatcagcatctttaagcaggaggggcagctgacttcagacatcgtagaattcagttctgctttggtagctgttcacgttttatgttatgactacaccatgattgtaacactagcgttcccagcttcgtttcatttttctttttcgtttgaacctgtatacagattgacattctgttgtaaattttcttgggattgaataaaaagtaatgctgattgttgc

SEQ ID NO: 16987 - DNA, 1735 bp, Oryza sativa
  ref <308>: DATABASE ACCESSION NUMBER: AK067456
  ref <309>: DATABASE ENTRY DATE: 2001-12-06
gactagccaaggcgccctcgcctcccgccgccgaccacgcgcgctatctgcatgccaagttgccgagctaggatgcacgcgcaccagcaccagcacgcgctgctcgcggcgctcctcgcgtgcgcgctcgcggcgtcgtcgtcgacggccggagcgcagccggcggggcagcaggggtatgcctacggcgacgtgtccgggcagcaggtgcacgtcagcacgacgatgatcgtgctgctggccgccgtcgtcggggttttcctgttcatcgcgatctccaccatctacctccgccactgcaccggttacgaccccgcgacggagggcggcggcgtcggcgggagccgttccatgatcctccctgccaacagcttcgtctcgaggcggcagcggcggccgcgcgggctcgactcgtcggtggtccggatgttccccaccatgaagtacgccgaggcgaaggcgctgcgggtggggaaggtcgccggcgccgcgctggagtgcgcggtgtgcctcagcgagttcgaggacgacgagatgctcaggttcctgcccaagtgcagccacgccttccacccggactgcatcggccagtggctcgccagccacgtgacctgccccgtctgccgccgcaatctcgaccctaacaaggacaccaccgaagaggtgatcatcccggccgccgccgccgccgatccgaacagcacctccagtgaaatagttgtgatacggcaagaagacggggcgcacccagcagccgtggtgatcgacgtggtcaccgaggaggacgacgaggagcggaggaaggaggagctagagcttcaggcgataggcacccagctccgcgcgatgcggtcacggtcggggctgcggccaaagacgtcggcggcgaagcttccccggtcgcactccactggccactccctcgccgtccggctcgacggcgacctagagcggtacacgctgcggctgccggagcacgtacacagggagatggtcgcggcgggggagcagagcgtgcgccgcgggaggagactcggggaaggggtcggcatgggcgctcggtgcagcccccggttttcgcggtcgggcagatggtcatcttttctctcaaattctttgtcaggaaagctgtctttcctctccccgtcgtcgaggagaacgccggatagcacccaggtggaagtgtcatcatcctcgtcgtcgtcggtgacgaaggtgaaagggaagcgcgtggccgccgtcgatgttgccgacgacggttctgctcatgggactgcacagtaccctggttgcactgtggccagctcggcggcggcggcggctgtggacgtggagaaggcagctaccaggcaagttcgaacatagaaaacgaacagaagttttgagtgagaaacttgaacagttgaacttgacgtcatgcattttcccacatgaaagaaagaaatggtctttttttgtcggtgggactgtattctgtactctgtactaggtatattatcaacgccgatatgcccaaatattatgggagcacctattgatcaatcaggtgactgcagaatagcaaaggcgaaataatatacatactaggttgaagaaacttagatgcttttttttttttggaactagaaacttaggctgtgtttgagggagaggggattgagaagattggaaagatacgtaaaacgaggtgagtcattagtgcatgattaattgagtattaactattttaaattcc

SEQ ID NO: 16988 - DNA, 2171 bp, Oryza sativa
  ref <308>: DATABASE ACCESSION NUMBER: AK067457
  ref <309>: DATABASE ENTRY DATE: 2001-12-06
gtcttcttccccttttccttccttccctcctgctccctctccttcccatttccgttctccgcttccccacctcgccttctccgctcctcctcctcctcctctcctgccgctctcctgtgtgtgctaccggaagcaagctaccccctcctcctgtatttgttcaatatccataatcagaggaagctgtgccttgagtttgagtatttagcctagtaggtttagaagcactacagaaaagtaatgtcttttatcaggcgagcagacccgtcaaccacttacgcagataatctttacatacataaatttggcactccaaattcaaatttcgctgcacgaagatatgcgtccgacacacagctgttccgttatgggcctgaaccatacaatcctgagaactccttttacaatcaacaggcctcaccaatgccgtacatggtaacagctgatggccattctccatcttctgcagacaattcctgctcagatgtggcaaaagactcaccattggtgtccaatgtatctcagcagaattctcagtctatatcagacaatcagagttctgaacttgaagtagagtttgatgaagatgatatcaggatgaagcttcaggagctggagcatgctttacttgatgatagtgatgacatcttgtatgagatttcccaggcaggtagcattaacgatgaatgggctgatccaatgaagaatgtcatactccctaactcaccaaaagaatcggaatcaagcatcagttgtgctggtagcaacaatggagaaccacggaccccaaagcagttgctctttgactgtgcaatggcattatctgattataatgtagatgaagcacaggcaatcataacggacctccggcagatggtctcaatccaaggggacccttctcagaggattgcagcctatctagtggaaggtcttgcagcaagaatagtagcttcagggaaaggcatatacaaggccttgtcgtgcaaagagcccccgactctttatcagctttcggcaatgcaaatcctctttgaaatctgcccgtgcttccgatttggtttcatggctgctaattatgctatacttgaagcctgcaaaggtgaagatagagtgcacattatagactttgacattaatcagggcagccagtacattacactgatacagtttctgaaaaataatgcaaataagccacgtcatttgagaataactggtgtggatgatcctgaaacggtacagaggaccgttggcggtttgaaggtcattggtcaacgtctagagaaacttgcagaggactgtgggatatcttttgagttcagggcagttggtgctaacattggggatgttacacctgcaatgctagattgttgtcctggggaagcactagttgtcaattttgcattccagctgcaccaccttcctgacgagagcgtttcaattatgaatgaaagggaccaactccttcgaatggtgaagggtctgcaaccaaagctcgtcacactggttgagcaggatgccaataccaatactgctccatttcagacaaggttccgtgaggtttatgattattatgctgcactttttgattcactggacgcgacacttccaagggaaagtccggatagaatgaatgtggagcggcaatgtcttgctcgtgaaattgtcaacatcttggcttgcgaaggtcctgatcgtgtggagagatatgaagttgctggaaaatggagggcaagaatgacaatggctggcttcacaccatgcccatttagtagcaatgtcatcagcgggataagatcgttactgaagtcgtactgtgacagatacaagttcgaggaggaccatgggggacttcacttcggctggggagagaaaactctaatcgtctcctccgcatggcaatagagcttacagaatgagttggcattagtcttgctgttatttaggagcatctgatgcagagactgtaaaaaatgtgaaccactgaacttgtcaactgatcttacctaatcgtagatgtctgcttgtcagaataatcgagttagttgaactatgttgtattagagaattggcacatgatcgtgttgtattctggggtagaattatcttgtcgactctgcttcatgtataaaattatgtgttgctagaatatgccatatttatcatcttgggag

SEQ ID NO: 16989 - DNA, 1792 bp, Oryza sativa
  ref <308>: DATABASE ACCESSION NUMBER: AK067458
  ref <309>: DATABASE ENTRY DATE: 2001-12-06
ttgaccatatttaggtggataaatctcatcagatcgagctaagcttggaggcaagcacaaatggagctcacatggcttctactcctcgctactctcctcctctccaccactctcctcgtcttcctcttccatggcggtagcagcgccaccggcggcgagaagcgccgccgcctgccgccggggccggccaccgtgccggtgctcggcaacctgctgtgggcgaccaactccgggatggacatcatgcgcgccgtgcgccgcctccacgcgcgccatggcccgatgctcggcctccgcatgggctcccggctcgaggtcatcgtggcggaccggcggctcgcccacgccgcgctcgtcgagagcggcgccgccatggccgaccgcccggagttcgcgtcgcgcgcgctcctcggcctcgacaccgccaccatctccaactccagctacggcccgctctggcgcctcttccgccgcaacttcgtcgccgaggtcgcgcacccggctcgcctccggcagttcgcgccggcgagggcggcggtgctcgaagagctcacggacaagctgcgtcgccggcaggaggacgccggcgcgggcaccatcctggagacgttccagtacgcgatgttcttcctcctcgtggccatgtgcttcggcgagctgctcgacgagcgcgccgtgcgcgacatcgccgccgcgcagcgcgacctgctgctccactcctccaagaagctcagggtcttcgccttcctcccggccatcacgacgcgcctcttcgccggccggatgaaggccatgatcgccatgcgccagcggctgaaggggatgttcatgccgctgatcgacgcgcgcagggcgcgcaagaacctggtcgacgaccatggcgacgccacggcgccaccaccgccggcggcgagcgccacgacgttgccgcactcgtacgtcgacacgctgctcaacctcaggatcaacgacaacggcggcgagcgcgcgctcaccgacgacgagatggtggcgctctgctccgagttcctcaacggcggcacggacaccacctcgacggcgctggagtggatcatggcggagctggtcaagaacccaaccatccaggacaagctccacggcgagatcaagggcgccatcacctccaactccggcaaggtgtcggaggaggacgtgcagaagatgccgtacctgaaggcggtggtcatggagggtctacggcgacacccgccggggcacttcgtgctcccgcacgcgccggcggaggacatggagctcggcgggtacacgatccccaagggcacactggtgaacttcacggtggccgacatgggcatggacggggcggcgtgggacaggccgagggagttcctgccggagaggttcatggccggcggcgacggcgagggggtggacatcaccgggacgagggagatcaggatgatgccgttcggcgccgggcggaggatctgcccggggctgggcgtggcgacgctgcacctggagtacttcgtggcgaacatggtggcggcgttcgagtggcgggcggcggagggggaggcggtggacgtcgacggcgagaagctcgagttcaccgtcgtcatggagaagcctctccgggcgcgcctcctgccaagagccgtcactgtttgactctgggtgagctttgacatttgggggggtttattagacatttgacactctctcgctaatgtagtttcatgctttgtaataatggtattattattagtttccttttgatgaataaaagaattccaatctattttgtcat

SEQ ID NO: 16990 - DNA, 891 bp, Oryza sativa
  ref <308>: DATABASE ACCESSION NUMBER: AK067459
  ref <309>: DATABASE ENTRY DATE: 2001-12-06
ggtgcgaatttgatctcgaagcttccgccaagcagcgagctctcccgatccgcgggggcgtcgaatcctatggcggccaacgccggcaacaagatccgcaacgccaaactggttcttcttggagatgtgggcgcaggaaaatctagcttggtgcttcgttttgtaaaaggacagtttgttgagtttcaggaatcgacaattggagcagcatttttctcacagaccttagcagttaatgacgaaaccgtgaagtttgaaatctgggatacagctgggcaggagagatatcacagcttggctcccatgtactataggggtgcggctgctgccatagttgtctatgacatcacgaatccggcctctttcacccgtgcaaagaaatgggttcaagaacttcaagctcaaggtaactcgagtacagtggtggctcttgctggcaacaaagccgatttgctagagactaggcaggtgcaaatagaggaagcaaagacatatgcacaggagaatgggcttttcttcatggaaacatctgcgaaaactgcaacaaatgtgaatgacatattttatgaaattgcaaaaagattgcttcaaggacagccagctcagaacccgcaggccggcatggtcctctcccagagaccaaatgagagactggtcagctctgcttcatgctgctcttgaagcatagtttcggccgagtattgtcattataaaatctaggagaggaaaattcaacaaatatcccagaagttcttgtgtggccaccttcatggctatatactccagccttcacgcttatttcttttcattccttgtgtcatgtaaatgtcaatacaagaatgccacatcagaggcttgaaattggtaccgaaatgttaattgtgctctatc

SEQ ID NO: 16991 - DNA, 906 bp, Oryza sativa
  ref <308>: DATABASE ACCESSION NUMBER: AK067460
  ref <309>: DATABASE ENTRY DATE: 2001-12-06
gaatcctcctcttctccggcgagccagaggggcgagagcggcggcggggtcgtaggcggcggtgtgtggcgatccggcgaagggaatctcgcacggcggcgcggctgctgagggggaacaccctaatccccttctctccccgacccctctcccggcgacgcgagtgagtggctggcggcaagcgccgagcggctccagcttcactggctggggggcgcacccgaagacggcgccaagccatcggcggtccggcaaagcaccgagccgacgggggagggggggaggtgccaaaagtggcagcccaagccgatgcttcccgtctccggtgaggcggcgacggtggggaagctccaagacggcgcgagcggtggtgaaccggcgcgaccccgaggacgccggagagcttcaagtctgcgtctagatctggacgctcttgcagatgacgtccacagtctggtgcgatccaactccaacctgagtgatcgccatcgccatcagtttggtgttgctaccacgtggacggtggatctccttgccgtcattgtccgcacctcctcctactcgtcgattcgatgaggtgcggcgagcgaagccctcttggcatggacgaaggccacagcgccacccatcaactagagaacgaggctcccacgtacgcggcacgcgcgactgattcctcttctcggtttacttttttttattctccctttttttttcctgtattgattatcgtagcaaccaatcagaggcgagcaactgcaccagatggacgtggtaccttacagcgtccttgtttgagacgctcttttttacttagcgtccatcctattcttgtaattctactctatgattttactggatatttaattcatttgttaataattattatacaaaaaaaattcggtg

SEQ ID NO: 16992 - DNA, 4056 bp, Oryza sativa
  ref <308>: DATABASE ACCESSION NUMBER: AK067461
  ref <309>: DATABASE ENTRY DATE: 2001-12-06
gccaaaaaacccccccaaaccctcgccgcaccgccgtcgatcgccgcggcggtcgctggggggcaatgtcgcgctggaaggagaacgcctcccctctccccctccaccccggcggctcctcctccctcctcccccgcaagcgccctcccccatccccgccccctccgcagcccccgtgcccgccgccgcgccgcccgctcgccgacgtcaccggcaacgccctgcggcagcggggatccggagggggaggatgcgggtacgggtacagcacccccgccccgaaggcgcccaggccctcctgcaggttccttctcgacgacgacgaaggcatggacgaggcgttcctgcgggaggtggacgccatttgcgaggagcacgagcggtcctcggccaggaaggataaggaggccggcgaagcgccgccatcgatcccctccgaaccggagagcggagtgtctggagatgcattccggaaggaggagaatgccattggtgaggagggtgatgctcagcctttagccacgagccaggaagaaatggaggatgcggatgaagaagaaatctgtgaactgtggtttggtgatgattcacttccaccggccatttcaattgccacagggggtggagagtttgaggatgcattctggaacatcagtgacattactgaggaggtgcaccatacaggctcttctgccaagtgccaggaggatatggacggaaaaaatagcgatggtccttcagttccctcagtaatttgccatgaagagcggaaggagagcttgtcgatgcattcttggaggatcttgatgctatccatcagggtgatgctaccaagggccaggaggagccacaggaaacggaactagaaattgaggaaaatgaagggtgtgttccaaagaagtactacgaatatttgcagtccctgaatgacaggcagagggaagctgcatgtagtgatgtgactattccactaatgatagttgctggtccaggaagtggaaagacatcaacaatggttggtcgggtgctcacactgctcaaagaggaatttccaccatcaaacattcttgctatgacattcacaactgctgctgcttctgaaatgcgggatcgaattgggacagtggtggggaaggcagttgccaaggagattgtaataagcacatttcactcattctgcttgcagctttgcaggacccatgctgaaaagctaggccgcacatctgaattcataatctatggaaatgggcagcagaggagggctgttattgaggcagagcgtctattggaaagtgacaaaaataatggtctaggagatgcaaataagaattgcgatggagatattaaaaattctttcaaggacaaagctaagaaatggcagaagtttgttacacaggcaaaagcttctggtaggactcccgaggagtatgaaaagaagggggatttgacaggagcttcaattcttcggcactacaatgaaatattaaggtcttgtaatgctcttgattaccatgattttattaattcatcgataacccttctcacaaagtttcctgaagtatacgacgagtgccgaaatacatggcaggcaatagtagttgatgagtttcaggatacaagtgctatgcaatattatcttttaaagacactagcatcccacaaccgcataactattgttggtgacgaagatcagtccatcttcagtttcaatggtgctgatgtctctggctttgattcatttcgtagagattttccaaaacacaaagaggtcagattgagcaagaactatcgctctacacgggcaattgttgaagcagcaacagctttaattcacaacaacactaaacggcaaagccacaaacttgctgagaccgacaatccctctgggaataagatcattgttaaggagtgccacagtgaagattcacaatgtgcatttgttattgacaagattattgaaaccacatctagttcagttgaaggatgtcattttggcaaaattgctgtcctatatcgcagacagatcactggcaaagcattccaggcgtcattccgcaacagaaaaattccttttaatattcatggtgtggctttctacaggaaaaaggttatcaaagcaattatggccatacttaaaactacattaccaggctgtgatgatgatgccccatggcatcaagccttcaaggccattcttcctggtgacaaggaagaaaaaaagaagattatacatcatattgaaaagatttcattggctagaaagtgtagcttcatatcggctgctactgacatcttcagtgcaaaggtctctggtaccttcaaaagggcccagattactcaaggaagaaaggttttatcagccttggatagcctatcaaaacttgttgaaagggaacaatcagtttcagtggtcatttcttctgctggagatatgctacctcagaaatacctacttgaaaagcgtgcgattgttgatgctgatgggggtaaattattaaatgaagataatgacatcagatcagtccttcagtttttaatggatgatgtgtctgacttcttatcaacacatttttctagttcagtggatacaagcaagactgaggagaaaggctgtgcttctacacttaaagcctttattgattatatctctttgagagaaactgaaaacttcagatcacgaaaggaggaaaataaaaactctatcacattaacaactatccaccagtcaaaaggtttagagtgggatgttgtgtttatcgtgcaggcaaatgattcagaaattcctttgttgcatgagtacaatggcactgtgaaagaagctggaagcacactggaggaggagagaaggctattctatgttgcaatgacacgagctcgaaagaaactgtacatcttacatgtcacggttgactctaatcgccagctgctgcaaccttcacgcttcctcagggagattcctgctcaccttcttgaggtacagggtgagggaactgtgagaagaactcctgaacagccggtgaacattccatttgatcaacctgaaggagatacatcagttgaaaggcctatggtggtacggaatgaaacttcacctttcccagaaatggatcagccatgtcttgctaatgatttcttgaagaggtttgaaattgaggatagagcaataatttcacatatatttcatcaatgggcgaagaaacaggcatttcaaaatccaaaaaggctgcttgataagattggttttgttattgatgaacgtttacgaggtaaaggatacaagcgcaaggatgtattgtgcaagctgaaatcattcttaagtggtgatgaagcgtttggttatgcacaatatgttatcaagtgggaacagattcctatcgacaagcggagccatttgatgagagagagacaggaacatttccaaaagcagaggatagagaactccatgggttcctcagaacctacacctaagcagatatcgtacctccggaacctggggtgcaccatcacacccacgtctcgcctgcacgcgtcgcatcttatcgagaagtacaaatctctatgacttttcactgcttgaacctgcaggggacacatgatttcaagctcagtctcagaattgggaccatatatacagcaacgctggtgaaagttcctcatattaactgtacatgctgtacatatcgatgtacttttcccgtggacatggtgtggttagagcaaacgtcttgttacattaccaggctgttcttgggccacaagggccaaccaagaaacgaaccgggccttctctttggggaatctggctcggcccacaaaataaccagctatgggagactcagtcacatccctcatgcaacgtacatcctccgtcttgtaaaaaaaatatcaacttctagctatgtactttatgggatggattgagtacgggttatgtgatcattgcctcttgtttttgcgatgatccttgtacgctagtgcctagtggtataaaatgagctttgtatataatttggtccattttttttaaaaaaataaacctgcaataaaacgttttct

SEQ ID NO: 16993 - DNA, 1011 bp, Oryza sativa
  ref <308>: DATABASE ACCESSION NUMBER: AK098999
  ref <309>: DATABASE ENTRY DATE: 2002-08-28
gccgcgcacgctccaatggcggccacggctgtgaccctgccgtcctcgccggcccccttccccgtcaccaccaccgcctcctcctcccgtaacgtccgcctcctcctccgctccccgcctcctcgccgagccctccgcgtcgccgcctccgccgcggccgacgcgccacccaagccggcgccgccgccgacctcgccttcgggcatcgtcctcgtcgaccccaccgaggcacagaaggtgcaccgcctcaaggctgtatacgaccagaaggtggtccccctcatcaccgaggagttcggctacaccaatgtccaccaggtgcccaaggttgagaagattgtagtgaattgcgggttgggggctgaagccggtaactccaaggggctcgaatccgccatgaaggacctcgccatgatcaccggccagtggcccgtcaagacgaaggccaagaagtccgtcgccagtttcaagatccgcgaggggaacaccattggtattgccgttacgctccgcggcagggtaatgttcaacttcctggataggctcatcaaccttgggcttcctaggaccatggacttccttggtgtcaaccccaacagctttgatggccatggcaacttcaccataggccttcgtgatcagggcgtgttcccggagatcccgtacgaggtcggtgggaagaagaatggaatggacgtctgcatcgtcaccaccgcgaagaccgacaacgaggctctcaggctgctcaccctccttggcatgccgttcgcggagcacatcaagtcctccgtggtgatccggaagaagaggttgaagcgccaccacttcatgagcaagggcaggggaagacggtgattgcaaaccgctgcctaggcacgttgagctttgcttctcactttgtcaattgtcattgtttttgcaaagtttcgtttagaagtttgatgattttgttatcttgtcacgtgctgtatttactgtcagaagacaaaatgaaaaggctttgctttggtc

SEQ ID NO: 16994 - DNA, 918 bp, Oryza sativa
  ref <308>: DATABASE ACCESSION NUMBER: AK067462
  ref <309>: DATABASE ENTRY DATE: 2001-12-06
gattccacttctcttctctctcgtggtcgcatgatctcatcaggagcgcagatgctacggcgtccttgagaattgcagagaggcaaaagaagaacaagcagagagcaagaacaagcagaagcagaagcaaagaggcgatggacggcgacacgctgtcggcggcggcggcggaggacgggaaggtgctgcacgcgttccagacgagcttcgtgcaggtgcagagcttgctggaccagaaccgggtgctgatcaacgagatcaaccagaaccacgagtccaaggtccccggcgacctctcccgcaacgtcggcctcatccgcgagctcaacaacaacatccgccgcgtcgtcgacctctacgccgacctctcctccctcttcgccgcctcctcccccggccccgccgcctccaagggcgcctccgtcggcaccgccgtccgccacgccggccacaagcgtgtcaggtccacccacctcgactgaacaagaaccattctcattttctcaattaaccacctccaattctccaattccaattccaatttcggctagcttagcttaaagatcgagctcttgcttgcttgtatatctagctataatctataaatctacatatgagcaattaacgccccctcacaactactcccgatgtttcatattataagactttctaacatttgcctacattcatatatatgttaatgaatccagacatatatgtgtgcctagattcattaacatctgtatgaatgtgggtaatgctagaaagtcttataacctaaaacgtaggtagtacaatcatcttcggttctttcttgtagctgttgtttcatcttgttgtagctgatatgatgagctattatatggattttgatgcaacaatgccaatacaagagagtgagcacttctctgaattccc

SEQ ID NO: 16995 - DNA, 1530 bp, Oryza sativa
  ref <308>: DATABASE ACCESSION NUMBER: AK067463
  ref <309>: DATABASE ENTRY DATE: 2001-12-06
gatcttatccagaacgccggagacgcgagcgctgcgagcaagcgcaatggaggcgaagctgtcggcggcgtcgaggcgggtggcgccgtcgcccatccagcagctctcccacctggcgcagcgcgccggcgccgtcaacctcgccgagggcttccccgacttcccggcccccgcccacgtcaaggccgccgccgccgccgccatcgccgccgacctcaaccagtacaggcatgtgcaggggatctgcgacgccctcgcggagacgatgaagcgggaccatggcctccgcgtcgaccctctcaccgacttcgccgtttgctgcggccagtctgaggcgtttgctgcagcgatatttgcaataattgaccaaggggatgaagttttgctctttgatccagcttttgaaacctatcaaacgtgcattgaactagcccgaggtgtccctgtgtatgtgccgttggatccaccttcttggactttgaatgaagataaatttttgaaatcatttacaaaccggacaaaggcagtggtcttgaatagcccgcacaatccaacaggaaaggtttttagcagagaggaattgcttatcattgctcaagcttgtcagaaaatggactgctttgcaataactgatgaggtttatgagtacattacttacgatgagaacaagcatatctcattggcttcgcttccaggaatgcaagaaaggaccatcattacttcctcactgtcaaaaacttacagcgtaactggttggagaattggatgggcttgtgctccagctaatatcgcctcagcaataagaaacatccatgtcaagctaactgattcagcccctgcaccattccaagaagctgcgttggttgcgttaacaagcccaccagacttctattcatccttgaaacaggactacacggcgagaagagacttcatccttcaggtgcttactgattttggcttccgcattagcttcaagcccacaaggctcgatctttgtatttgttgagcttccaaggtcatggcaactttcagatatggatttcgtgacgaacttgataaaaaatgctggtgtggcggccgtgcctggtcggggattcttccactcaagtaccgacgacccaagctaccatcaccggtatgtcaggtttgcgttttgcaagagcaatgacaccctaaacgctgctgccgagaagatgaggaagctagcagtcagtcatgatgcaaggttattgaggcctactgatgatggagaagcaggtcagactgcatcagccacctctccttgatcacagccatagtatctgcgttccaaatgttattttgctttaatttttggggaaccatcaagcattcaagttgcagggtagaagtttgttttaatcaaccgtagtataagtaaacatttaagtcagaagatgactgtcctggtaagtgtttaagcccaaatgggttgccttcattttttatgcaatccaaacagttcttaaaaatctgaaaaaaaaatatatatagcacataatcttgtcatcc

SEQ ID NO: 16996 - DNA, 1579 bp, Oryza sativa
  ref <308>: DATABASE ACCESSION NUMBER: AK067464
  ref <309>: DATABASE ENTRY DATE: 2001-12-06
ggttgttttggacgaacgcgagctgacagaggggagagagagagagagagagagagagagagagagtcagagagatgcggcgttgcagttgctggcagctattgtggctggtgcttgtgtgctcatggcggatcgctgcagctcaggctcaggcggcaccaagaaccgatccaaccgaagcggcagctctgaacacaatcctgggaagatggggcaagaaagcatcatcagagtggaacatcagtggcgagctttgtagtggcctggcttccgacaagaccaactgggatgactaccccaacatcaacccatttatcaagtgtgactgctcctacaataacaactctgtctgtcacattatcaaattgtatgtacgcccctcgtcttattttgatcagctgcacacctggtgcttgtttactactccatacttcctctgctttttaatgcatggcgatgttgaattttggacacacgtttgaccatttgtcatattcagaaagaatttgcaaatatgaaaaaatgtaagtcatccttaccttaataaatgttaattatgtaattttttaataagccaaatggtcaaagatatttccaaaagtcaatgataaaacaagtcacaacaaaataaatgttaattatgtaattttttaataagatatttcaaaaagtcaatagtcattagtttagaaaagtaacattgcttctggctgcataatttttgtagtagtgtaaaaaactaaaccaggcacgattaataggaaagaatcagattcagtggcttgtggttagatagtctggttgatcagtgttacccaaaaatatttgaatgcaccaacaatgttctaaactcacatccactgggttaggaataataatgatattggaaagatccaaactcacatccaaaaatatttgaacttgcaagagaacctcgtatcattatattaggaagaagaaagggtagaaaaccctaagtacacacaccctcgcacccttaactcttagagtacatgtgcgcctataacaacagattacaaacgaccacgacctgaacataaccactgggttctagggcagtaaagaacgaaaacccttgagccccagccaaacaccaaagtcggccctcttcctttgcaagcagtacggggcctgccaagttttggataacaccataaagaacaaagcgatttcgatgcttccaaagcatccaagcaccaataaatgatgagagggttgaggccctgacgtaccaggccgctaattgcctcactggcctgttccaccattcctcaaagcactgatctgcaagcataggggccaaggtgttcagatcatacctctatagaaggatgaacaaaaattgtcttgcaaagatacagctcgtgagcaagtgaccagttgtctcgtcatcgatatgttcacaggactataaatatttacaaacaataagatataatctaggtgtgacgattaacaatagaaattttctttcttcgaacatgcaggagatctgcatatcatttcattaagcaaggaaaaaataaccgaaaaaaggacttacaagacacccacacgg

SEQ ID NO: 16997 - DNA, 1199 bp, Oryza sativa
  ref <308>: DATABASE ACCESSION NUMBER: AK067465
  ref <309>: DATABASE ENTRY DATE: 2001-12-06
gaacctctcaatctctctctactctatctcttcctcaatccccatccccctctcactctctctcctccctcgcttgctgcagcgagcggctgcacccagcgggcaaggcacgacggcagcgtgccctctctctcctccctccacttactgcagtgagcggcggcggccggtcggcatggcgtgagagcggcgcgccctctctctcctccctccccatcctgcagtgagcagcggtggctgcccagcaaggtgcgcacagtggcacagcctctctccttcctcccctagctgcagcgagcagtggaggcggaggtcggagattggtggcgagcggcgtcgagcacagctgggtggctccggccggtggcgagcgtggcaatggggagggcgaaccagaggaaaccggcgaggagcctcaacgccgccattgcctcggcctccgcctccgcttcggccgcagctgtggcaaccgacatcccgcctccactttctacaccaccgcacgtcgctcggctccgcgtgtcgaccgccgtcgccgctcgacctgtgccggcccccgcgcgtcatcatgcacgccgaccgccggcgccgctcgacctggacccgcgcttgccccacgtgagagagagagagagagagagagagggaagagggggataggagaaagaggaggctcgtagccgctggcgcgccactcgtcctcgacggcgccacccttgcctccacggtcgccgatctttgcagtcagcctctgccggctcagggtgataattcgtacttttccaactagatacgatccatcggattaaaggaaaaaaaagggtactaatacctcttttgaaatggacattcacagtgatataatatatgtatatatataaaacattcctcataaataagttacgtacttgatgtattggtatatcctgtaggtgatctcataatcaactgcgacaaagggaataggcaaagtgaggagggtgtcccccagtagtgtgtcggtgttgtacttgttaaacagatagatagttcggataggaacatatctgttgataagataagatagagtttagtttgtttcttgtttttctgttgtgaagatgtaatctgtaaactcctatgtacacgccacgccaggggctgtttctggctatataacacggaccgtggaaccgagagaggcaatccacgttaaaccc

SEQ ID NO: 16998 - DNA, 1503 bp, Oryza sativa
  ref <308>: DATABASE ACCESSION NUMBER: AK067466
  ref <309>: DATABASE ENTRY DATE: 2001-12-06
gggtgtgacctggtggaggccgtgctctccgccttttggctgcttgatgcgtcgcagccatccgatggcacaattgctcgccgccgccaccaccaccaccacgccaccctgcggcggcctccgcctccggagccgacgctgccgctgcggcggttgctcccccgtcgctgctcgtcttctcaggaggaaccgcttttaatggtgttgtagaagagctgaagaaagtgacgactcgagttgcacatgttcttcctgtttccgatgatggtggaagcacagctgagattgtgcgagtgcttggtggacctgctgtgggtgacattagatcaagatgcttgagattgtctgatgaaagcacttcagaagccctttctgttcggacattgtttgggcaccgtttgcctcttgatccttcagaagcaaagcttgagtggtaccagattgtagaaggagagcacgctttgtgggatggtgtctcacagccatacagagaaacaatacgtgcctttttagtctacttccataatgagatacttcgacggtcagctgaaatgttttgcttcaccaatggcagcattgggaatttcttttttgctggggcacgcatattcttccagtctctggatgctgcgattttcttgttctcacgtgtgtcacagatccctgctgaaagtcttgttcttccagtgatatccacaaatgacaggcttacactgggatgcgaactatgggatggaactatcatccgaggtcaaaatgaaatatcacatccaagcaatggacgtaaagaagttgttaacaaggattgtaattcatgtagtgcacttccttcaaggattaagcgtgtcttttacatgtcaagtgaaggcagcaacctgttgcatgaggtatttcctgaagctaaccgtacagttttggagcagttaagtaaggtggactgcattgtatatgctatgggatcactctttacatcagtctgtccatcattggtattgcgtggcattggtgaaactatagcatcaagatccattccgaaggtacttcttttgaatgggtcgcatgacagagaaacaactgggttgcctgcttctggctttgtgactgccattactgattctctaaaccgtacatatggatatcctgacaaaagtctaaagaatcttcccaaagactatgtgaatgctttattggtaccaaaaggaggccaaattcctttggatataaaaaacttgtcttctaaaggaatctttcatgtggtaagtgtttgtgtttgctaaaacagtgatcattaagtgtaaaatgtgtggaaaaatgttatagttatccatcgagtccttaactgtgtaatattttcgagaatggatagaaaatccagcctctatatccatgaatggatatatacagccaaaggttacatgaatacttagattctaggtcttttactgagaaacaatcacgaaaaagaaaatgaatggtcgagatgctccgaaattttaacgcttc

SEQ ID NO: 16999 - DNA, 2967 bp, Oryza sativa
  ref <308>: DATABASE ACCESSION NUMBER: AK067467
  ref <309>: DATABASE ENTRY DATE: 2001-12-06
gaggatagtctgaccaccaacagaaaggaaaagaacatgaatctcctctgtgcaatagcaatactcccggtgattcttgtggccttactagatactataccgctggcaagtgcatcgtctctgatgaatcacagccagccatccatggcaacgctcgcgagctgccccaagagttgtgggcagatgagcatccactaccccttcggaatcggagcaggctgcttccgtcagcctgacttcaacctcatctgcgacaactccactcagcccccaaagctcctcttgcatgacggcgtaaccgagatcatcggggatacagattccagttttgacatggacgtgggctcaacggagtcaatcgatgtcaacatttcctccaccatccctatgctatctagcatctctcattacaactattcttggaatctcagttctttttctatcgaatatgttattctgaacattactgggtgcaacttcgacacatatatcattaaccccgacaccgatattcgcacaaggatctgcaggaacagttgccccaaggaagaaatcacagaagcagtggctcgacaaagctgtaatggtactggatgctgcacatatgatatttacggtgttgctaacttgcagctcagtttcgtccgtggggatgaaggtttacttggagggaactctagtcgaaactccttatggaacataatcaacataagaagctggtacgcctatgtcacgtggagcataatcgatcaaccgacatgtgctagtgcaaaggataaccgaacggattacgcatgtgtgagcgccaacagtacatgcatagacagcttcaattctatggaatatcttggctacctttgttattgcagcagtggtttcataggcaatccttacgtacttcatggatgcacacgtgacgaaggatattatccagttcaacaaaaggcaaactgctcccgacggtgtgggaatatcagtgttccatttccttttgggctagaggaaggctgcgctgcaagaaaactatttcaactcaattgcacaaatgtgacatcttctacactccaatttgaccgcggtcatgttgtgacagacatagattttgcagaaggggttgttggcatcaaacttgcctcatatttcgaagagcaggagttcagtatgtatagatcaggagaacctgacctatatgcaagttttggagaagcagtgatctctgtgcattgggctgctgctaatctaacatgtcaagaggcccagaagaaccactctcgatatgcatgtgtcagtgcaaacagcacatgtttaggtgtcgactctacttatggttatgttggataccggtgcaaatgcatggatggttttcatggaaatccatacgtcgttaatggttgtgaagatattgacgagtgcaagaaaacacctggcatctgcaaaggcatatgccacaatgacattgggagttatcattgcatggagtgcccagacaaaacagagtatgatgtgacagctatgcagtgtgtctcaagaaaaaaacaaaatcttctgataggtattgtaattggacttagtgttggattcaccgttctactctttgtattgggtgggatgcttcttcttcgtagatgggaaagggacattcaaagacaactacgaagaaattactttcgaaaaaatcaaggtcttctattagaacaactgatatcatctgacgaaaatgcgagcgacaagacaaaaattttctccttggaagagcttgaaaaggcgacaaataattttgaccccacacgtatcctcggacgtggagggatggcatggtatacaaaggaatcttatctgatcaacgtgtggtagccataaaaaagtcaaagataattaagcaagatgaaattgataattttatcaatgaggttgccatcctctctcaaataaatcatcgtaatattgtaaggctttttggatgttgtcttgaaactgaggtcccactacttgtttatgactttattccaaatggttcattatttggaattctccatgctgatgcacgtagtagttttcggttatcttgggatgactgcttaagaattgccactgaggcagcaggagcactctgttatcttcattcagcagcttcagtatcagtctttcatcgtgatgtgaagtcagctaacatacttttagatgcaaactgcacagccaaagtttcagattttggtgcttcgagattggttcccattaatgaaacccatgttgttacaaatgtacaaggcacctttggctacttagatccagaatactaccacaccgggcaattgaatgagaaaagcgacgtctacagctttggagttgtacttattgagctactacttaggaaggaacctatttttacaagtgaaacaggtatgaagcaaaacttgtcgaactattttctttgggaaaaaaaggtgaagctaattagggatatagtggctgatcaagttcttgaggaagcaaccgaggaagaaattaacaatgttgcctctcttgcggaagattgcttgagtctacgacgggatgaaagacctactatgaagcaagttgagttggcactacagtttttgctaaacaaaaggttgaattcataccgcactgttgaagcaaacaaggaagagatggatccctttattatgacaaaagttcaacatagcactgagaattcaaatgttgaatttctgagcaataaagcaactatatcgtcctatcagcctggcttggagcacgagtttatgtcatctgccactataccacgctagaatttattcagtttccagttctgtgctaggccatgatgcctgttgtttctcttgacaatgtgagataatgtaccttcaatatactgcacgttttaatttgaagtacacttgtaataaggcaaaatactgtgtaaaaaattatttaattttataaagttattccggtggaatggac

SEQ ID NO: 17000 - DNA, 3566 bp, Oryza sativa
  ref <308>: DATABASE ACCESSION NUMBER: AK067468
  ref <309>: DATABASE ENTRY DATE: 2001-12-06
ttgatgtgaagaaatccctcagttcatcaacaaaagtagatgctccaagttcaataacaaacagctcctcgagtgttggagaagatgcaagtatccgatacgactcaaagccaccacttcattctcaaaggttaccatcaccagtcccaggaacgctaaggaaatacgttggcatgttatctcatcagaatatttatttacctgtcacatccttgcaagaaacatctgctacccagatagaaggcgaggttgaatctggtaaagaaattgtcagtaatggttttcatgttgggtcaaaggtggaagagcctgcagtttctactgcaaatgtggattgctcacaagatcaccagagacaagaaagaattcaagatataatgccaacaaattctacgcacgacaaacgtgaagaatcacctgttatggtagaagatggggaacaacatagcaccattgatatcattagcaaagagaaaactactaacgaagatcaagcggatgatgcccttgatactcacagcatattaattttgatgtccagtcaatgcataacaaagcaggttatttgtgagcagagccatctttctcgtataaaatattatgggaatttcgatgtgtccttagggcgatatttgcaagacattttgcagaatccggttttgcagaatcagaaactgagctgctcttcatgtggagagtttccagagtctcatctgtactcttacactcatcggaatgggaatttgaccgttcgagtcaagcatttggcgcctcaacatcatttgcctggtgaatctgaagggaaaatatggatgtggaccagatgcttgagatgtgagaatgaacatgggatgtccaaatcgactccaagagtgctcatatcatctgaagcacgaagtctctcttttggaaaattcctagaactcagtttttcaagccattctgcggcaagaaggctttcaatatgcggacatttggtgaacagggactgcttgcgcttttttgggttgggctcgaaagttgcaatgttccggtactcatcagttgaaatttatacaacctgcaaaccacaaaccactctccagtttgataatccctgcaggcaggattggtttaaagaagagaggagatatgttcttgctagaggtataaagcttttttctgaggttgcaagcatgctacaacccttaaaggatcagcttcttgatgtgacaacaaccaattgcaccggctctctccctgttaaagacttctctgaacttgaagagttgttgatcaaagaaaaggccttttttgaggattctctagaaaagacaattaatcagaatgagaatctatctgcatctgtgcatgaacttgttgatatcaattggtcctaccaggatcttctacttgaactttatttgtgggaccgtcgactggatcaacttactaagtgtgtttcagctggacaagagcgtgttgttagttgcaaagatccttttgatactgttgtcaagaatattagggtaaatcaggagattgaaaataaagctgacgaattgacatgtgatagaactacatcagttttgagcgcagttggtttgactgagtgtccaagtaatagaaattacattgaccaccaatcagttgacattgaagcacccgtgcttactgaaaatcagggggctgggtgtgctcaattttcttccactggaggtagaaatgatgaagactcttacactgctccttgtcaactagaggtagatagcatggcacaaaccaaagaagttccttcatttgaaatttcagaggttcggggtgatgggatagttgttcatccaatttctttggaccaggagccttcaaacgctcccaatcatttcagaaaaattccagactgggatacaggggaagggtggatttggaattctttccatgaatgtcaattggcttacagaaaggacatacaaaatgaaattttggataaatttgaaattgtcaaccgttattctccgtctcatatgtctcccttgtttgagcaacatgaagaagtgagctctccacagttcactgttggtccaggtggtaatattttatctgtactggaggatgagatatctagtataatagcccgtgctcttgctgtatctggggaacaccgccatttagtggagaatgaaacagagggtgccaggttggagcatgctaaaacaatggaaaaatcatatagctttatgtctggaagttctcttgactcatcaccatggtcatctatcggatctttagattccgaagcaagttttttgtctcttggttcatcagtttcatcagatgacctatctggttatgatagcttgcctttgttctcttcaatacatccagaagtcgctgtaaatggaaaagtagctctcagaggcaaatattctgttactagcatatatgctaaacaattccaagatcttcgaaagaagtgctgcccatctgagcttgcatatattacttccctaagtcgctgcaagaagtgggatgctcagggtggaaaaagtaaagctttctttgcaaagacagtggatgacaggttcatcataaagcaaataaagaagacagagtttgagtccttcataaaatttgcccctgattacttcaagcatgtttaccattctctagacactggaagccaaacttgccttgccaaaatattgggaatttatcaggttaagcaaacaaggcatggaaaagagataaagatcgatctgttggtgatggaaaaccttctcttcgggcacaatatttcacggatttatgatcttaaaggtgctatcttttcacgacacgttgcacactccaatgaccgtaatactgtttacttggatcaaaactacgtcgaggacatgcgtgtttctccgatttatattggtggaagaacaaagcatcttttgcaacgtgcaatctggaacgacacatcattcctcacttcggtcaacgttatggactattctctgcttgtgggagtggacaaagaaaagcatgagcttgtatttggcatcattgattatctgaggcagtacacttgggacaagcagctggaaacatgggtgaaaagttccctagtagtgccaaagaatgtttcaccaactgtagtttcacccaaggagtacaagaaaaggttccggaagttcatggcgaagcacttcctcacagttccagatacatggagttcagagaattcttccggaccaagcaaatcgtttgggcatagcaataacatgttggtagaagtccatagtgatgacaatctgcttcagcatccaattgaggctgagacagttgtataaatgacttctctgacagttgttgaatcctatcctgttgctacttggctttttttttttcattttgtaaaatggtgtacataggagggcctcactcactaattgattttggcaaccccagagaagtttgcagattttaggcaagtcgatggggggcaagtgaggcctacagtacatgtatgtatacaaatgttcattgttaatttcacagttattacagtgaaattgcaaaattgatgattattctgaacc

SEQ ID NO: 17001 - DNA, 1778 bp, Oryza sativa
  ref <308>: DATABASE ACCESSION NUMBER: AK099000
  ref <309>: DATABASE ENTRY DATE: 2002-08-28
gagcggttacgtcacgtcacgtcacagccaggccacgggcgtacgcgcgcgcgcgcgaggcctgagaagcaaggtattgggctgggagcgagggggtggtggcatcgcggtggtggggggtggagatgatctcgcagttcttcgtgctgtcgcagcgcggcgaccacatcgtcttccgcgactatcgcggggaggtgcccaagggcagcgccgagatcttcttccggaaggtgaagttctggaacgacgacgaggccgaggaggcgccgccggtcttcaatgttgatggcgttaattatatccatgtgaaagtcgcaggactattttttgtggtaactacaatggttaatgtctctccgtccctcctcttggaactcttgcaaaggattgcacgtgttacaaaagattaccttggcgttctaaatgaagattcattgcggaagaatttcattttagtgtatgaattgctcgatgaagtcattgactttggatatccacaaaccacctctaccgaggttctgaagtcatacatattcaatgagccaataatggttgatgctggtcggctgcctccacttggtcctgctgctatgttcatgcaaggcactaagcgtatgcctggtacagctgttacaaaatctgttgttgctaccgaacctggtgggaagaagagggaggaaatttttgttgatatcattgagagaataagtgtgacatttagttcaagtggttacatacttacatctgagattgatggaaccatccaaatgaaaagttaccttactggaaatccagaaattcgtctagctctaaatgaggatttgagcataggaagaactggctcttcttcgtatgattacagaagttcttctggaggaggagctgtcattcttgatgattgcaatttccacgagtcagtacatctggatagttttgacattgacagaactctacatttaataccaccggatggggaattcgctgtaatgaactaccggattactcaagaatttaagccacctttccgtgtgaccgcactaattgaagaagccgggccatctagggctgaagttctattaaaaatacgggcagacttctctgcaaatgtcactgcaaacacaatagtagtacagatgccagtgccatcttacacaatgagggcaagttttgaattggaagctggagcagttggacagacaactgattttaaagaaggatccaggagaattgagtggaatctaaagaagatcgttggtggttctgagcacacccttcgggcaaagctcacattttcccaggagtcacatggaaatctcacaaaggaagctggaccagtaaacatgaatttcactataccgatgtacaatacttcaaagttgcaggttagatatcttcagatagcaaagaaatccaagacatacaacccctataggtgggtgagatacgtaacgcaggctaactcatatgtggctcgtctatgagatagcgatgctttgtatacatctccctctggtcatttccccttttccttgcgctattatcttcgagggacttcaagcaagcttggacagagtgtcatgcattgcattgtaattttatagagcaatcccaaacttaaactcttctcctgcagttaatatctacctagggcaatttatttttccttgtgtaatatgcaggagatacatgatcatatttttgtatgctgtgaaaatgaatgaagttattgttcatcacatatatatcatgctatatctatgcctagtcagttttccgtc

SEQ ID NO: 17002 - DNA, 1570 bp, Oryza sativa
  ref <308>: DATABASE ACCESSION NUMBER: AK099001
  ref <309>: DATABASE ENTRY DATE: 2002-08-28
ggtgcgcctcgcgtcgccgtatcgtatccatcagatattcagattcacaaccccacgccgcctcgccctcgcccaccgcggcgacacctacaaagcccgcgacgagggccaatgccattggcgtgacaaggcggggagcgcgacgcgacgcgagggcggagagagcgagggaggggagaggaggaggaggaggttgatggcgtcgccggcggtggtggcgttcgcggtggcggtggcggtggcggcgctggcggcgttctgcgggacggacccgctgcggacggggagcatggtggacttcccgggcttcgtcccccacgtcgtcgagctccccgacgcgtcggagatgccgccccacgcggacacccgcgagcgcctccgcggcgcggagatccggttccgcggcgaggtgcagggccccgagagcgtcgcgttcgacccgctcggccggggaccctacaccggcgtcgccgacggccgcgtcgtgcgctgggacggcgcccgctgggtctacttcgcgcactcctccccgaactggaccgccgagctctgcggccacaaggcgtcgccgctcgactacctcaaggacgagcacatctgcggccgcgcgctcggcctccgattcgaccggaggacgggggacctctacatcgccgacgcctacttcggcctcctcaaggtcggccccgacggcggcctcgccaccccgctcgccaccgaggccgagggcgttcgcttcaacttcaccaacgacctcgacctcgacgacgacggcaacgtctacttcactgacagcagcatccactaccagagacggcatttcatgcaattggttttctctggagatccctcagggaggcttctgaaatacgacccgaacacaaagaaagcaacagttctccaccgcaacattcagtttccgaatggggtgtccatgagcaaggatggcttgttcttcgtcttctgcgaaggatcccgtggcagattgagccgatactggctgaaaggggagaaggctggaaccgtggatcttttcgccatcctgcctgggtttccagacaatgtgaggaccaacgacaagggtgaattctgggtagcaatccattgcaggcgcagcatatacgcccgaatggtcagtcgcaatgtcaggctgaggaagttcttgctcagcctcccaatccctgccaagtaccactacctgatgcagatcggcggcaagctccacgctctgatcatcaagtacaaccccgaaggcgaggtgcttgacatcttggaggataccacagggcaggtggtaagagccgttagtgaagttgaggagaaggatgggaagctctggataggatccgttctgatgcccttcattgccgtcttcgattacgccaatgcatcttagcaaactttatgcctggatacaagggttaaaatgtggaatcccagaatgacgtttgcacaccatttaccactatcccgggtgacatttcataaatgccgctttcaagtaacaacctaagttgtttcatgtttcagttttttcgaagcagatgtagcttgcttacatttttagtcc

SEQ ID NO: 17003 - DNA, 3667 bp, Oryza sativa
  ref <308>: DATABASE ACCESSION NUMBER: AK067469
  ref <309>: DATABASE ENTRY DATE: 2001-12-06
gcgtctcatgtgttgggacgaggctcatgtgttgggcagtcgcggagtacgggtaaagtgtacatccactgcagtgtgagtaaaccaaatctattcgaatacccgtgctcgcggttattgagcaccgggacatgtattacacttggctagactctaaattcttaaaatgatgggtgagatgatgcatgatgattttgtactggtggatcaacttctcgagaggtgagaaggggtagaccccagaaaaccatgacgaccagtggcgggaagctatccttgggaatacaatggatggtggatagaactgtcgttgtttaatgaacaatggagttaaaacctgatcagtttatgctaggtcttaggtttgtgaaatgatatttgaaaactcagctttacgcaaagtaaccatagccactccttgtattatcctgtacattactgcattttgtgtggtggcttgctgagtacttttgtactcattgttgctctatatatatcttttagcagagtgttgaagagaagcccttgttttagtacgcttgcgtacttaacaagatgatcggagtgcggtttcgatctaggtctcgttccccagtcgactgcttgtggcatgtcaaccgggcccttgtattattttgttttccgctgttgtttctctgatagttgttggcctgcctggccctaatgcaagtatttaactctcttagcctgaattcatacgtgatgtgttgtgattcggctatgtatgtgtgtaccaactactgatccagggattggtactgataaacacagaagatttccgatttccaaaatcgggggtcgacacctccactcaaatcccccactctccccgagaaaatcggcgccgagccgccccagtcgcccacattgccggagtcccacgccgccgcccgttgccgccccgtccgggcacgttctcccctccgcgagcttataaaaaatgctcctcaggactccctctctcttttccccatctttccagagcccgccgcactctctctcgctctccccacaccgagcccgtgcaccgccgctcgccggtgagctccggccacgcgccaccactgccctagccactgccaagccgcgcctccgcctccactacattcgccgcaccgcgtagcaccccggccgctgctccattttccccatccagcccaaaaatccgctcccgccgtgccgacctcttccgccgctcaccggcgctattcagccgcctgccaccgctgctcccgcagactgcccgagctgagccaagctaagcgagctcgagccaagcccgagctgagctcacgagcccaagctttttttccacccctacccgcagtccccgtgccgcgccgctcgcaccactagcatcgccacacctcaccgcgcacccggccttcgcttggtttccccaaatagccaccgcaactaccacccaaccgtgaacccgaggtcaccgccgcgtgactgacacctccggccgctgtttccgacctcctcacggtgcgccgtcacctccttcggctccgcaagggcaaggagatcctcggccaccacctcactgctgccgggagccgttgtaaccatctcccctcgctccccggtgagtcccgctgcaaacgccatgctcggccggcgttcctcgccatgccgcgacgcctctccctcctctaacccctcctctttgctccccaggtcccgctggccctcggccgcacctccaccactctcaggagtcgccggagcgccgtccccgaccccaacccgagaagcgccgccgctaatccttgtcgtcggccgccttcccatcttcgcctcgccatcacgtcctctcggtgagccccctctccttcccccgccacctcccatgtgcgacgccgccgctcgccgctgacgaccatcgggcccggcggcgccgcctcctgatcggtcagccggctgctgccgccctgctagcccatgaccgcccgatccccctctgggtgatctaggctgtgcacgtggccctccccgtgccacccggcatcggtgcccccgtggcgccatgtcggcgccacgtcgccctctccgtccgccatggccaccacgtggtgcgcccgcttgccggtgccgcgtggacccggtccactgtgcacccgcctcccttgagccaccgacaggtggggcccgcttgtcggcgccaccaatcccctcggtgacgtcataaatcatgataattgcgcaataaattcggttaataattatagaaattcatttaaatggctcaaaacttctaaaattcatatctaattcatacgaacaccaaattgagccgttcaactttgcaaaattcatctaaaattgagctctacgtgtttgtttactttttatatactgtttacttagtttttattagagtttttcctcattttacgtgacagcacggtgacatgccggtggattgtatcttgtggttacagttgtgcacctctggccaaagtaaaactattcgaatagccgtgcccgtggttatgggcgattgaccagattcactgtgatcagtgtcacccctaataaatcgactcaatgcactggttagctcaggtgggatggatggcctgttcaacgtggtgtagcgttgatctggggagatttaatattactttaattaatcaacttttttaccgtttgctcaataaaatgctttgcaaccgcctttatgcaaagagccacaagccatccttttacccccttgcatgtctgcatcattggtgtggcttggtgagtatggtggttgtactcagccttggtattattcctcttttcaaaagtgaaaagtgtagtgcttctgatctgaagacgatgttaaaggacaaaggctcagaccccagttgagtgttgcctatggagtggagctgaagccccgctaggatcgcctttttccgctgctgctgttttcgtttcgatgcgaggactaagtgcctcttctctaagtatttatgctttatttacgttgggaactgtatattacttgttattttgtgtacccttgcagatttctggatagggatttaatacacaaaatggtctggaaatttgggctaaatttctggttcaaggatttcttaacacaaactgagttccaactggaacatgaatcagagaagattatgtgtacaattaagcaattgaactgatcctaatggctgccagtggtggtgtcgctgccggactattgtcctgttgtcttcttcgaccagggctgggaatgcacgaactgaccatcagcaacactgagttaggtgtggatggtttagttcctatttgtcaatactgatttctcacaagatacaatttctgatttttctctatgcgctggggatgatggccatgtagcttccagaagcttttattctttcctggttgatgtggttgtcacccttgtctattgcagaccacctgttcgatggaatgcaacagaaagaggacactttcagccagattgcattagcaccaacactgcttggtggacgtgagtactacactatccacatgcatttgcttggtgctatcaagagatgcaattttattcaacacaccgtcacaaccattcgtctgaatcttgttctgcatgatggtgcatttgccaatctgaatttatgaatagttatgaaggacc

SEQ ID NO: 17004 - DNA, 862 bp, Oryza sativa
  ref <308>: DATABASE ACCESSION NUMBER: AK067470
  ref <309>: DATABASE ENTRY DATE: 2001-12-06
gccctagccccccaagcagccgcaccctcactccctcctctctcctctcctcccccccacggcggcggcggcggcggcggcggcaggatggcggattcgacggcgaggacggtgaaggacgtgaaccctcatgagttcgtcaaggcctactccgcccacctcaagcgctccggcaagatggagctccctgagtgggttgacatcgtgaagactgcgaggttcaaggagctccctccttatgatccggactggtactacacgagggctgcctcgattgcaaggaagatctacctgaggcagggtattggtgtaggtggcttccagaagatctatggtggccgccagaggaatggctcacgtcccccgcacttctgcaagagcagcggcgctatctcacgcaacatccttcagcagctgcagaagatgggcatcatcgatgtcgaccccaagggcggaagactcatcacctcccagggaaggcgtgatctggaccaagtggccggaagagttgatgttaccatcgcctgaacagatccatggatcttcaacccttactgcctctcatatgtttggtggttgagtcggctacagtttgtttgcagttttgaattagaacatgccctatctttggttgagtcggctatagtttgtttgcagttttgaattagaacatgccctatctttgctggctcagagaattggaagttggatgcatctaggtatgatactgcagtatgtgttttgtcttttcctgaatgaactcctaatgcactgtcactagttccggacaaaagaaaattaaattaagcccatggaatgtctctgctgatgccagtattactctagcggcaccgagttgtcc

SEQ ID NO: 17005 - DNA, 1236 bp, Oryza sativa
  ref <308>: DATABASE ACCESSION NUMBER: AK067471
  ref <309>: DATABASE ENTRY DATE: 2001-12-06
ccaacccacaacctcctccccctcctccgcctccgcctccgcgtgatctcttctcgcttcacgcttctctcctcctctccgcggcggcgagagcaagggcgaggcgggcggcgaggtgagaaggtgggggtttgggttggtatggcgacgggaggaggaggaggagggggagggatggggggaggaggtgtcggaggaggagcgggggcggcgggggtgggggtgggagggaggatgccgacgtggagggagcgggagaacaacaagcggagggagcggcggcgtcgcgcgatcgccgccaagatcttcgccggcctccgcgcccacggcggctacaagctccccaagcactgcgacaacaacgaggtcctcaaggccctctgcaacgaggccggctgggtcgtcgagcccgacggcaccacctaccgcaagggatacaagcctcctgaacgcatggaagtgattgggtgctccgtatcaccaagcccgtgttcctcgtatcaaccaagcccgcgggcatcatacaatgcgagtcctacttcctcctcattccctagcggcgcatcctcccccttccttcctcaccctaacaacatggccaatggtgttgatggtaatcctatcctcccatggcttaaaacactgtccaattctccatcatcaaagaaacatccacagcttcccccactattgattcacggtggttccattagtgcccctgtaactcctccattgagttcaccaactgctcgcactcctcgcatgaagacagattgggatgaatcaaatgtccagcctacgtggactggttcgaacagtccctgcgtggtgaactccacgccgcccagccccggacgcacaatgcttccggacccagcatggttagctggtatccaaatatcatcaacaagtccatcatcaccgacatttagtcttgtgtcatcaaatccatttagtgtctttaaagacgcgattctggtgggcaacaattcatcgaggatgtgcacgccagggcaaagcggcacatgctcccctgcgattcctggcatggcaccacacccagatattcatatgatggatgcggtttctgatgagtttgcatttggaagcagcacaaacggtggccatcaggcggctggtctggtgagggcgtgggaaggcgagaggatccacgaggactcgggatcggacgacctagagctgactcttggaagctctaggacaagagctgctgct

SEQ ID NO: 17006 - DNA, 3124 bp, Oryza sativa
  ref <308>: DATABASE ACCESSION NUMBER: AK067472
  ref <309>: DATABASE ENTRY DATE: 2001-12-06
gaggggccatcttcctgttacttcaaccacaacaagatatgtcttccaccaacaaaatagacacccacaaccgaaacggatcgagcaaagagaagaaatccaacccatcttcaagttcagagtaccagctgaagaatcaccttctgctgctggccactctggtcgcaacggtaacatatgccgcggggctcaacctgccaggggggttctggcaggacacacaagaagaccatctcgcgggcgacccaatcctaccaggcaaccacaaagaacaatacatcatgttctactactgcaacgccactgcgttcgccgcgtcactcgtggtctgcctcctcctcctcgtcctggacaaggagaactcaggctgcgcagctgccctgcgagtagtcatgctgtttgacttgcttggtctaatgggggcctatgctgccggaagctgcagagatgaattcactaccatctactcctcggtgatcatgtcgatggtatttgcctatattgtgccttctttgtttacctatgcagtgtccaagttgaagaagaaagacaaaaatcatgggaagcaaaacaaggattcgggtgaaccaaaggatactgagaagcaaacctggtatcctgatgaacacaagcgcgaagaactgcatgaggtcttgatgctgctagcaacatttgcagttaccatcacctacgtggccgggctgaacccaccaggtggcttctggggcagcacccaggacggccaccgggtgagcaacccagttctgcaggacatcaactccagacgctataaagcgttcttcgtctgcaacaccacagcgtttgtcgcatccctgctcatcatcatgttgcttctggacaagagggtcaacacggagcaaatgtcattgcagtttggtgaactgtatgggtctattgttgtggttctcttcggcctcgttggagcctatgctgctgggagctgcagggacaccgatgacactgtatacgtcatctgtttgattgctgcaattcttgcatacatcttcctccaggtggctgttacacaattcttaaaaaagaggatcaagaatgatgggcatactgaacgaagtatatcatctgtaaagtcactgatccgtaatgaagatggtagcaggaacacaaaacgcaatattgcaatggaaaaggctcgctcccttgtcatgttacttgctactcttgctgcaagcatcacataccaagcagggctagatccaccgggtggtctctggccagatgaccgggatgggcataagggcggcgacccaatactcctcacgacaaacccggcacggtacaaggtgttcttctacagcaattcggtggcttttgtgacatccttagtggccataataatggtccaaagtaaacatgtactgaagaaccacactctagaggcagctatgctgctggatctgttcgccctcataactgcatatgctgcagggagttgccgggacgtgagcacatccatctatgttgttgctctggcaggtggtgtcctcgtctatgtggtgattcacataatcttcttcacactagacaacatggacaatgaatatcatgatcctgatgaggaggataagaagcgtgaagttttgctgctccttgcaatcttggttgccacgctcacttatcaagctgggctgacacccccaggtggcttctggtcagaggatgataatcttgggcaccaccaccgagcaggctatccaatcctgctcgaaaactatccaccgcagtacgaggcattcttctactgcaacgcgacgagcttcatggcatctatagctctcattatgctccttgtgaacccaaacctatacaggccaggcataaagtgctatgcgctttatgtgtgcatggtggctggaatgttcggcctcatgggtgcctacgctgctggaagctctcggcgtctgcgcacctccatctatgtattgacattggttggtgcagtgtttgccttggtagccttgcaggtagccatgttctggaacaagaggacctctaaaacaggaggcaacatgacgaactcctctgcgcaagaaggtggcagcacagacactgaagcctcacaaccagcacctctgataaaagggatgggatccacttcacaagcaactcagatcacagatattacagatgctgcactgagaaacactgacaaaggagaggggtcatctgaacaaggaggcagcagaataaattctgtcacttctgaaccaggagcccatggcacaggaaatggagcctctctacaagaagccaacagtgaagaagataaatctggatcaaccgagaaggacatgcgggagtacttgatgctgctaggggtcctggctgcaagtgttacatatcaagctggcctaaaaccaccaggtggcttgtggcaggaaaatggcaatgggcaccttgctggccactacatcctccacgacatcaacaagcgccggtactatgcattcttctatagcaattcgatttccttcatggcttctattgtcgtcatcgccttgctgcttccaaggatgctgaacaacctagaaataccggtctggccaatgcatacggccattttgctggatatgctcggtctcctgtgtgcttacgctgcaggcagcaccatgaggtgggagacatctagaaatatcattgctttggttatccctgtgctggtgtacatggcagcctgtacagcgctatcatttttccataaggaagatcaaaaacaaatatctgcatcgacctgccaggcatccaccaactcatagagaagcatcaacatggcgtcatcctttatcaatttgttctaggagaaagagactacctacagggaactagttactatctttctcattttgaaatagaaagccatcaagtatgagtagaaaaggacctgaagatgggtgttgaaggcatacatacacccacacctccttcctagctactgaaccatgccacagttcctctactagattttcaatttaattcaactgaagccattgtgtatgaattaggacgcttaagttgtttgttcgtgtgtattttccaggaggtattatacaaacatcaacctatatgaattattgttggtttttgc

SEQ ID NO: 17007 - DNA, 1472 bp, Oryza sativa
  ref <308>: DATABASE ACCESSION NUMBER: AK067473
  ref <309>: DATABASE ENTRY DATE: 2001-12-06
gacttcctcctcctcccactgttcttcgccctcagctctcgccgcgccgcgcccgcgcgtgagcggactacagtgtcagcttgctagctcacaggcgtcgctggccgccgcccgccgcgcgcgcgatcggtggcgaggcggagatgctgcgggcggcgaagtacctgctgggttcccctggcgccaacggcttcggctccaagtccaccgccgaggacgtctgccccgacctcggctgcatcaccgccatcatcacaggcgcgacgtccgggataggggcggagacggcgcgggtgctggcgaagcgcggggcgcgggtggtgatcccggcgaggaacgtgaaggcagcggaggacatgcgggcgcgcatccgcggcgagtgcccgggcgccgacgtcctcgttctgccgctcgacctcagctcgctcgcctccgtccgcgccttcgccgaccgcttcctctccctcggcctcccgctccacctcctcatcaacaatgccggcaagttctcgcatgggcagctcgctctgtcggaggacggcgtcgagatgacgttcgccaccaactacctaggccatttcctgctgacgaagctgctgctggggaggatggcggagacggcggcggcgaccggcgtgcagggccgcatcgtcaacgtgtcgtccagcgtgcacagctggttcgccggcgactgggcggagtacctcgacctcgtcacccgccggaagatagcttacgacgcgacgcaagcgtacgcggtgtccaagctcgccaacgtgctgcacaccaaggaactcgccgtgcgcctcaaggagatgggcgccaatgtgacggtgaactgcgtgcacccgggcatcgtcaggacgcggctcaaccgtgaccgcgacggcctcgtcacagatctggtgttcctgctgctgtccaagctgctgaaaaccatccctcaggctgcggcgaccacgtgctacgtggcggcccacccgaggctggccggcgtgtccggccgctacttcgccgactgcaacgaggccctgccgtcgccggccgccaccaaccgccacgaggccgagcggctgtggcaaatctccgagtccatgctgctctgcacgaacagacacagcaaagatgcctccgctccctgacacagctgactggctaatctttaccgtattttactactacccatcctaaaatataataacttttatctataaatttgaacaattaaaaatacttatattttaggatggaggaagtagtgcatcactgtcttttctcttgttccacattacatatatacagcttcatgcaatatgtaacctgcaaatattatagtagtatgagcaccagtgtataaatatatagtagtatatctgtagcattatagcagtagcagccaattatattagtgattgtatttccgagatatataatactagtatacagtacgctgtaatttgtcctcgagtacc

SEQ ID NO: 17008 - DNA, 2090 bp, Oryza sativa
  ref <308>: DATABASE ACCESSION NUMBER: AK067474
  ref <309>: DATABASE ENTRY DATE: 2001-12-06
gacgaatcatttcctatccatctcctccgccctcctttcttctccggccgcgcgccgcacggcccacctgcagccacccagcaaagccgccgcgcgcgtccttctcgctctagggttttcccacacgacaaccccccaagcatgtcggcgccgccgttgctgaaggctccggccgccgccgccgcctccctcgtcgcggcggccgcggcccaccgcgctacggccgccgccgccgccccgtccggtgcgtcccgcgtcccgccgcgacgcttgcgctgctctgcatcaggcgccgccgccgtcgaggtgcgtgctccgatggattgggcgacgaggtcgctggaggagatgcagcgggcagaggacttcgactctttctgcctgatggggctttcgccgctggatgggcggtacgagcgctttaccagggacctgaaacccttcttcagtgagttcggcctcatcagataccgggtcatcgttgaggtaaagtggctactgaaactctcccaaatccctgagatcaatgaggtgcctccattcagcaaggaggcccagttattcctggatgcgattatccaggatttcagtgttgctgatgcaaaagaagtgaaaaagattgagaaaacaaccaaccatgatgtgaaggctgttgagtactttctcaagcaaaaatgcagctcaaatccagagattgcaaaggtgttggagttcttccattttggatgtacttctgaagatatcaacaacttgtcacatgcattagctctaaaagagggggtaaatacagttatgttccctgttatgatggacatatgcaaagcaatgtgctccttggcaacacaaaattcaaccatccctatgctgtcgcgaactcatggacagccagcatcgccaacaactctgggaaaagagatggcgaattttgcggccagattgtcaagcataggaaatagtttttctgaggtcaagatactagggaaattcgctggagctgtcggaaattacaacgctgatgttgttgcatatccagaagttgactggcctaaggttgcagaagattttgtcaaatcgttgggcttggagttcaatccttatgttacccagattgagccacatgactatatctcgaagctcttcaatctatttgttcagtttaacaatgtcttgactgatttcgatagagacatgtggacctatatatcactaggctacttcaagcagatagtaaaggctggtgaagttggatcttccacaatgcctcacaaagtcaatcccattgatttcgaaaatagtgacggcaatttgactatagccaatggtacattgtcttctttaagcatgaagctaccaatttctcggatgcagcgtgatctcacagactcgactgttttgagaaatttgggtgttggattagggcattcactcttggcttacaaagctacattgcgaggaatcaataaggttcaggtgaatgaatcccggttatctgaagacttggatcaaacatgggaggtccttgcagagccaatacagacagtgatgcgaaggtatggaatccctgaaccttatgagaagctgaaggaaatgaccagagggcaggctgtcaccaaggacagcatacggcaattcattgaagatctagacttgccagaggcggcacgatcgtcgcttctgaagctaacaccacattcttatatcggagaggcagaatttttggctagaaatatcgaagaggtggttgatctaaaatctggatttaagatcgagtgagcacccgttccggaactcggtaatccccccaaattttttaccaggacaggaagaataacgggcgaaaatcttcaaagctgagggtgaacaccgaattgtgtcctgacctttaacaacttccggttacgctaattcagctgtgctgattgaaaggcttttggatgcacgcaaaatgcatccgtggaatttgtgccatgcgtgtttcggaataaaatcagaagcaggataaatcttgctcgcctgtctttttcaatcgcaagtggccttgctacagtcttcattaatgcagcattcgcctttgcatcgagcaggctacg

SEQ ID NO: 17009 - DNA, 3031 bp, Oryza sativa
  ref <308>: DATABASE ACCESSION NUMBER: AK067475
  ref <309>: DATABASE ENTRY DATE: 2001-12-06
gcggggcccctgtttctcctgccaagcggctggcggttgcacccacctccgaagataagaagctcgattttactgtactcaaatacaaaaaccaaaagctctcagagcaactagaagcccacaagtttgagtatcgtgctcttgaaaataaattcgctgggctaaaagagaagcagaggactcataatgagacactttccttggtcaacagttcttgggaacaacttgtggcagacctgaagtcaagatctttttgcaaaagtggatctcctaattccagccctggttcagggcacaacaatgtacaaaaggatggtacttgtgcacccatagagagggacactcttagaagtcttgtggaatctggtgcaactgaaagttcaggttgtttgcctggttgccacttgggaagtgatgcccctccattacatctatccacagctaatgctcttggggatatcttttttccatcaagtgatcttttgcaagcaaatgaggagtgtgctttggctgctctcactaaattaccagaaaatgaccgcagtaagcaactacagagtactagtagcaacctgttgtccagcctcaataatgtcgtacaagcattaagtaatcttcagttgaagcacaagcagttagcagaggattatcaaaatcaaagagattccagtgcccgaaaaagagctgaacatagacgtctaaaagaggagttggccagtgctgcttctgagttggaagaaactaactacaaactggcagcacttaaagctcaaagagataatacacaaggagctcgaatcccatatcctacattaggaaacaaaaatatgcctgaagataaggtcagagataaacaaagagagatgcaggatcttgaagctactcacaaggaattatcggaattgatttcaaagcggttggtggaaattaagagattacatgaagagagaattgaaattttgaacaaaatagcaacttttcagaatatcttgatggatttcaagagcattcgttcttcaaaagcttttcagcttgttaatgatcgacttcagaagtcacaagcagaattggatcactaccagacattattagagaaattacaggttgataaggataagtttgtgtggcaagaaaggcaatttaatttgaaagttgatctggctgagattcctgagagggtttctacatattgtgagtctagcattgctgatctcaagaaggatattcagaaactatgtgatgaaaaaaacatgcttattctcaaacttgaagaggcttcaagagaacctggtcggaatcaagttattacaaaatttaaagctttagtgtcatcgataccaagggaaatgggcgcgatgcagagtgaaatgaccaaacacaaggaggcttccttggagttgaattctttgcgagcagaagtccattcactttctcgcattctgtccagaaaggctgtttattttgttttataggaacgtgataatgaagaagcatcatgcagatctgcccgtgcgggatctgatataacacaacttcaatcagtgatttctgatctgaagcaaactaataaggagcttaagttgttcgcggatatgtataagcgtgaatccactgattccagggaaataatggaatccagagatagggaattccttgaatgggctcatgttcatgccctgaaatcatctcttgatgaaagtaagctagagcagcgtgttaaggctgccaatgaagctgaagcaatcacacagcagaggctagcaactgcagaagctgagattgctgaatcagggcagaagcttgggacttctagaaaggatctagtcagtttatcccatatgctgaagtctaaacaggaagaatgtgaagcttacagagtggaggtcgagtgtgtcgggcaagcatatgaggacatacaggcacaaaaccaacaattgctacagcagattattgaaagagatgatgataataccaagatttttatggagggtgttaaagcaaaacagacacaagatgctttgcatttggaaacatattctttgcgcagaaacttgcagcaggaaagctctttgatggatctgtacaaccagaaaattgtttccttagaagatcagcttaaaatgtggtctgatcgggttgggaaacttcaagaggatggatggcaacaatctgtttcattgagtaattaccaaagaaagctggttgatgtgcacagagatgctcaaaagcttatgcaatcattggatggaatacaagcgaatgttggaagcagtcgtttggaagtcgctgatctgcttatagaacttgagaaagagaggtttagtaagaagagaatagaggatgatttggaggttatgtcaaggaaagctagctctcttagagccaaggcacgtgaatcagcagtcctggaaaagcttcgtcatgaggtcaaggagtatagggggatattgaagtgtggtatctgccatgataggcagaaggaggttgtgattaccaagtgctaccatctcttctgcaatcagtgcatacagaagtcccttgggaaccgacagaggagatgtccttcatgtagcttgagttttggggctaatgacgtgaaacctatctacatatgaggttgttaatttcaagatggtatcgcaggcatctaggtcaagctactttgatggtcattacttggtcatatggttagatgaccatgcgagttgaagatatgacaagtactagcttgtacaaccaaacatataagcagaatgtagtagcctaatttggttggctacatggaattgcaggtgtctggcattcgtgatgctaatgtttattcctgctcccttgtatagttcgggattctcctggagtagttaagtcgctagattagtctgacttttgctatatccattctgttcttttggggaaaaaacatccaacaaaaggggtggtgcttcccgccatactgaaacattgtaccatatatagcttgtagttccattgttgtagcagacaataagagtgtaggtcttacgggttttcc

SEQ ID NO: 17010 - DNA, 2054 bp, Oryza sativa
  ref <308>: DATABASE ACCESSION NUMBER: AK067476
  ref <309>: DATABASE ENTRY DATE: 2001-12-06
gagaggcatagcgcgtctttcgaccgttcgccaccgccgccgccgccgcccgcgccgccgacgagatagagatcgttcgccggggagagatgatgtctggcggccccagcgacgcgacccaccggaagcggcggcggaggcgggggccgaagggctcgggggtcgacgggccctcgatccccagggcggtcacgaccaacggagcaggtcccgaagaggaggaggtggtggaagggaaggctatggagttggatgcggggatgagcgctgccgaggtgggaggcgtggttggctcgcatctcagcgagacacgatttgatcaatgtcctgtttctccgttgtcattgaaagcaatcaaagatgctggatatgaaaagatgacccaggtgcaggaggcaactctgccaataatccttcaaggtgaagatgttcttgcaaaagcaaagacagggacaggaaaaactgttgcctttttgcttccagccattgaacttctctctacattacctcgttctccatctataaatttgcttgtgatatgccccacaagggagctagcaaaccaagtggctgctgaggccaggaagcttctcaagtatcatcgctcactgggtgtgcaggttgtaattggcggcacaaaattacctcaagaacaacgaagcatgcaatctaatccttgtcagattcttgttgctacaccgggaaggcttaaggatcatcttgagaatacacctggtttttccaaccgaattaaaggggtgaaagttcttgttcttgatgaagctgaccgcctattggatatgggatttagaagagacattgagaaaattattgctttcattcctaaagaacgacagacacttcttttttctgctactgttccagaagaggttcgtcaaatttggcacattgcaatgaagaggggttacaagttcattaatactgttaaagagggtgatgaggagacacattcacaggtaagtcagatgtacatggttgcaccacttgacctgcacttctctatattgtacaatgtactgaagaagcatatcgcagaagatgcagactacaaagtgattgtattctgtactactgcaatggtcaccaaacttgttgctgaagttctttcccagctgaaactgaatataagagagatccattcgagaaagtcgcaatcagcaagaactaaggtctcagatgaatttaggaaatcaaagggtctgatattagtgagttctgatgtatctgctcgtggtgttgattatcctgatgtcacccttgtcatacaggttgggctgccagctgatagagaacagtatatacatagacttggtagaactggacggaaaggcaaagatgggctaggtctcttactgttggctccctgggaaacatactttctgaatagcgttcaggatttgtctgtatcacaagctgtggtacctacaattgattcgagcattcagacaggagtcaaagatgcactcggaagagtggagacaaagagcaaggaatcagcctaccaggcatggctagggtactacaactcaaacaaggctattagtcgagacaaatccagacttgttaggctcgcagaagagttcagccagagcatgggtcttgcaattccgcctgccatacccaaactcattcttcgaaaaatgggccttaacaatgttcctgggctgcgatctgtgtaacccttgtgctgaaggttgacaatttttttactgccccccaagtttgacaacctcagttctaagatgactgctgcatcctttttttgaagccagctcttgaccaatctattatcaccaccgggcaggttcaaagctgaaatgaacccagtgatccttcatataggagtaactattttttttcacagttgtactgacctacatcatgtgggagcatatttttttccttcaccataactacactgggccccaagtcctcccgagtatggaaaatgaaatgtacctgttcttgcggcgccacaagacgccacaccacataagcagtggcgtaatataatgcagtcatattgttacatt

SEQ ID NO: 17011 - DNA, 4140 bp, Oryza sativa
  ref <308>: DATABASE ACCESSION NUMBER: AK067477
  ref <309>: DATABASE ENTRY DATE: 2001-12-06
gtctcaaaacccaagtatacacatcttagctagtacaaatatgaactgtttctaatcttcctggttactctagtgcagcaagctatacatttgcgaacttaagaagaagttagctacatcagtcaaaatgagcatgatagttaccaagtttggtccatggggaggaccaggcggagattatagagacgttcaggtggctccttatcggctcgttcgcctaacaatccgcagctgagacaccgtcgacgggatctccttcacctacatcggcaacgatggtctcgtgtaccacatgggtcattggggttccgatggtggtgttccgcatgagattcatctcggcctcatggactttgtgatggaaatctctggcacaacgggcatgtgggtcagtggaatgagtaacgtcctacgatcactcaagatcaccaccttgaaaaggacttatgggccatacggcaaccctaaagctgggatcccttttagcttctcagttgatggcagtgatcggatcactggctttttcgtacgcgctggctttataaccgatgcaattggagtctatgttcgtcactgctagagttttaggctagaaaaaatacccatgctttacaacgggtgaaggttattttattgttatatgatttagttaaggtgaaattcactgtgggaattcacttggatatatatttttctaaaaaatcatgagctgcaattaagagtccgatcatcttaagttagtatgtgagttttttttaagaaatatattatacgactccttccgtatttccaaaagcgaacgggcttaaaacccgactcaaatacggatctatattttcaaaataaaatgaacttaaaaaccaactctatatatagatgacataccaaagcaaaaatatcttcaaattttatattactatagataatgaaatgaatctcgatctttgccgcactgaaaagctacagccgctgctagctacatagttatccacattttcaaagataagttttttactcgattaatttctcagtgcctctagccgggtgggtgccggaagtagtttctacccatgtagtgatgtagacataccagcatgcaaggacaatattggttctccaacaattatagttcaatagatttaagtgaaatgtaataaacagtgcgacaatatattaagtgaagtattggattagacatattagtcgtcaacctgtgagttgcacatgtggaaatatttaaatcaaattgaatcatacatgtggttaaatgcattgttattttttccctaaaaatgattttatcatgatcgcagctcaaaaaacgggtgttcccaacattacaatgattagaaaaaaagataatatacaagcactatgagtatttggattagtgggatccatacacacataagtaatactcactctcattgtctatgaccacagttgacaccttcccatataataacaatgatgccgagtagtgagtaggagagatactcaataggatagcttaccagtccctccccaagatacgccggtcaaactacacaaggtggtgtatacataccacagataagtcgatctataagggctatcccataactatctcaagtgttcaaaacgcatacttgtgctcgactaattccgatcccagcaaaagaactagcctcccacttttagcttaattaaccaagttatcgaaatatggtgcaagaaggataatttaagaaaaactagagacatatagccaacttatatgcatatggtagactggcgtaatagtaaaagttcagtggactaggggtaggcccctaggtcaactagacttatactaaacatgcagactgactaggggtaggcccctagttcaaaccatcctgaagaagttaacaactagtgatatttgcaatcatatgacaatattgcattgcacaaaaggagatacaatcattttgtcttcatcgctcatgttagtttgatcgttgtgtctggtaggagaactaatgcatactatggtatcttgtgtaagatgcgcatttatggaagtacacttgcaccatcaaaaaacttacttacttgaaatgattttccttgtctgatcacatgtgactgatctagttatgatgcctacttggtcatatatgaccacgatcactctgatactcctgatgatgctctaaccattatatttggcatctcaatggaactcttcgtttgcttatttttgaaaagtcgtgaggcctcaataggcaaaatacaagaagaatcagatcaaaattaaggaaattgcaaaaaaaaaaaggtagtgcgatcaactgatgtagagtcctttccgtcttgaatgtcatacaaatgatctgaatattcggaaccatcttcacagctgacacatagagttcagttgggccacctgaccagtggctcaattgataccattaccatttgttaaaagcgaaatttaacaagattcacatggatttggagttggatatcgatgcggaatcaaaggagattgaatcttaccaaattcgaaatgcgcatcggctggaaacatagttggaaacggattgagccgatatggcaggtagccaatacagcttgacttgggctcggtttgggtttagattggaataactgatattgccgtttagagattgagctcgcctaaggcaattgtatctattaattaggatatttatgtcggtttaaattagagatatgataagagtttgccatgtggacttgttcgtattttatctttaggaaagcttgagtcgtgtccgtaatggacaagttttgtactcagggtatcaatataagccccatacaattgtaatagacggatcgaatcaatacaactttcagcgcatcgccacctttctcttttttacttttcgacgagttcttgtttcaagtcggagcatcggttgcgatctcgcgatctctcaacaagaggtaacttgtcttgatggcttgcgctatcgaggctattatgtcgctttagatgtattagtcctattatcatagtcattattatcatatatcttaaataatcctgacttagtatctcgatttagtcatatcgactgtttctcactttagggtttacgctggcatcgactaaatcatcttactaaattatattaactaagttatctaccatcctgaaaagcggttaatgacttgattgtctagactttatgcttctttgcatactttgtgatgcatcatacctaaccgtgcttagaatcatagaaactaactaggaattaatcataactaaggatagtatcggggtttcatccgatcttacctaatatacttgatagcgcatatttcctgatctgtttatgtatattttccatttatatagatagagattgatctcacttaaacttcatatttcgtgatcaattgctatttggtatatttatatatattgatttgtttacataaatttgtattgaagtattagccagcacattatctatctttgctttaaatactgatctattggttacttccataatattgtcttaaaataattgatataaaccaaggaaacagtattacagttgatagggcatatttagggttttaatctgattaactattataaagtcgcaaccaattaggtatacccatatcggctaggtcctgacgatacgtcatcgggcctattagcagatccgctactattcatctaattatattttctgtttctcttgctggtttcaggatcaaaccagctggcacgctcttgacactcgaggcaagcgttggacctgcactggagtgaaggaaaactcctagggtgccgtgttttccatcaacaccattataccatcggcacgagtcattgatcaacttgttaactacgggcaactacatcaagcttttactgttgcatatggaatgtaggagatacattagggatgctggcatcaggaaaccttttttttggaaggcagagaaaacataaacattttgctagttgctgtcacgtagattaccaaaatgctcttggtgtggtgcaacacatccattatgaattttgggatgtcatgggcataatagacattccgaacaagatttcacttgatgacttcgtgcatgaatttttgaaagtgtcgtatgagc

SEQ ID NO: 17012 - DNA, 1853 bp, Oryza sativa
  ref <308>: DATABASE ACCESSION NUMBER: AK067478
  ref <309>: DATABASE ENTRY DATE: 2001-12-06
gatttctctaacacacgctattcattcggctgttttttttactcattttcaccatattttgctctttcaatttatttttttcggttggtgatttattcccgattactctgtgccgtgtgtcaattaaccctctctttctaaaaatcgaactcaaaaaagaacggattctaatcttttttttttttttgttaaaattttgtttataattattcttgtttagttttaaattttatttgtttaagtatctctaaagataatcaaaatgcgtgaatgtatttcaatccatgttggtcaagccggtgttcaaatgggtaattcttgttgggaattatactgtttggaacacaatattacaccggatggtacaatgccaagtgatactacattaggtagtagtgatgattcatttaacacttttttctcagaaactggagctggaaggcatgtgccacgagcagtctacgttgatttagaaccaactgttgttgatgaagtacgtactggagtctatagacaactattccatcctgagcaattaattactggtaaagaagatgcagccaataattatgcaagaggtcattatacaattggcaaagaaattgtagacttagttttagatcgtattcgcaggctttcagatcagtgtactggattgcaaggtttcttgatttttcattcgtttggtggtggtacaggttctggtttcaccagtttattaatggagcgtttaagtgttgattatggtaaaaaatctaaattagaattcgctatttacccagctccacaagtttcaacagcagtagtcgaaccatacaatagtattttaacaacacacacaactctagaacatagtgattgtgcgtttatggtagataatgaagcaatctatgatatttgtcgtcgtaatttggatatcgagagaccaacctacacaaatttaaatcgtttaattggtcaaattgtatcatctataactgcttctttaagattcgatggtgctttaaacgttgatttaactgaatttcaaactaatttggtaccttatccacgtattcatttccctcttgtcacatatgcacctgtcatttcagctgaaaaagcttatcatgaacaactaactgtttccgaaataacaaactcttgtttcgaaccttccaatcaaatggttaaatgtgacccaagacatggtaaatatatggcttgttgtctattatatagaggtgatgtagtgccaaaagatgttaatgctgcgattgctgctattaaaacaaaaagatctatacaatttgtagattggtgtcctaccggtttcaaggttggtatcaattatcaaccaccaactgtagtaccaggaggtgacttagctaaagttcaaagagctgtttgcatgttaagtaacacaacagctattgctgaagcatgggctcgtcttgatcataaatttgatttgatgtatgcaaagagagcatttgttcattggtatgtaggtgaaggtatggaggaaggtgaattttctgaagctagagaagatttagctgcattagaaaaggattatgaagaggttggtctagatagtgccgatgctggtgaagacgaagaagaaggtcaaggtgaatactaaaaagttcgaaggatgatttaaagaaaactataggaattacaaaattttaaataagaactgattaattaaattttagatacataaagcatcaatatactaatttttaaaaagagttaggtaaaaatgattcagttagatcattttaagaattgtattgttttttttaaattttattaagtgaaattttaaataagatcaatttattattaaaatctaattttattttttt

SEQ ID NO: 17013 - DNA, 3250 bp, Oryza sativa
  ref <308>: DATABASE ACCESSION NUMBER: AK067479
  ref <309>: DATABASE ENTRY DATE: 2001-12-06
gacagcagatgcaccaccacccgcatccgcgggaaagagacacagccgctttcgctcccgctgctccgctagcgagcctcgtcgctgccgctgagtgcgtgccatttatttccgtcccgccgcgccactccaaccagcaactcctcttcttcttcttcttcttcttcttcttcttcttcttcttttcttttgcctctcccaccgagcaactctgttcttccttcctcctgctgctcctcgtcatcgtccgcactagcgccggtgataatagaacgacaccgaacggggcggcggcggcagtaatggcggcagccacggtgggtgtgctgctgcggctgctgctcctccccgtggtggtggtggtaagcctcctcgtcggcgcgtcgcgggcggcgaacgtgacgtacgaccaccgcgcggtggtcatcgacggcgtgcgacgcgtgctcgtctccgggtccatccactacccgcggagcacccccgacatgtggccggggctgatccagaagtccaaggacggcggcctggacgtcatcgagacgtacgtcttctgggacattcacgaggccgtccggggacagtacgacttcgagggcaggaaggacctcgtcaggttcgtgaaggccgtcgccgacgccggcctctacgtgcacctcaggatcgggccgtacgtctgcgccgagtggaactacggagggtttccggtatggctgcacttcgtgccggggatcaagttccggacggacaacgaggcgttcaaggcggagatgcagcggttcacggagaaggtggtggacacgatgaagggcgcggggctgtacgcgtcgcagggcgggccgatcatcctgtcgcagatcgagaacgagtacggcaacatcgactcggcgtacggcgccgccgggaaggcctacatgcggtgggccgccgggatggccgtctccctcgacaccggcgtgccgtgggtcatgtgccagcagtccgacgcccccgaccccctcatcaacacgtgcaacgggttctactgcgaccagttcacgccgaactccaagagcaagcccaagatgtggacggagaactggagcgggtggttcctctccttcggcggcgccgtgccgtaccggccggccgaggacctcgccttcgccgtcgcgcgattctaccagcgcggcggcacgttccagaactattacatgtaccacggggggaccaacttcggacgaagcacgggagggccattcatcgccacgagctacgactacgatgctcctattgatgagtatgggatggtcaggcagccaaagtggggccacttaagggatgtgcacaaggcaataaagctgtgcgaaccagcactcatagcagctgagccatcatatagttctttgggtcaaaatactgaggcaaccgtatatcagactgctgacaattcaatatgcgcagcattccttgccaacgtggatgctcagtctgataaaactgtcaaattcaacggaaacacgtataagctccctgcctggtctgtaagcatccttcctgactgcaaaaatgtggtattgaacacagcccagatcaattctcaggtaacaacttcagaaatgagaagcctgggatcaagtatccaagatactgatgattcattaatcacaccggaacttgctacagctggctggagttatgccatagagcctgttggtattacaaaggagaacgccttgacgaaacctggactgatggagcagataaacaccacagccgatgccagtgatttcctgtggtactcaacaagcatcgttgtcaaaggtgatgaaccatatctaaacggcagccagtccaatctgcttgtcaactcacttggacatgttcttcagatctacatcaatggcaaactagcaggaagtgctaagggcagtgctagcagctcgctcatctcattgcagacaccagttacacttgtacctgggaagaacaaaatagatcttctgagcacaacagttgggctatcgaattatggtgcattctttgacctggttggcgctggagtcactggtccagtaaagttgagtggaccaaatggtgcccttaatctatcttctacagattggacataccagattggactcagaggagaagacttgcatctgtataatccttcagaagcctcaccagaatgggtttcagacaacgcatacccgaccaaccaaccattgatatggtacaagaccaagtttacggctcctgcaggtgatgaccctgttgccatagacttcacaggaatggggaaaggggaggcatgggtgaatggccagagcattggtcgctactggccaacaaatttggctccacaaagtggctgtgtaaactcatgcaactacagaggagcttatagttcgaacaagtgcctaaagaaatgtgggcagccatcacaaactctgtaccacgtgcccaggtcatttctccaacctggtagcaatgatctagtcctctttgagcagtttggtggtgatccaagcatgatatccttcacaacaaggcagacaagtagtatatgtgcacatgtttcagagatgcatccagcccaaatcgatagctggatctctccccaacagacgtctcagacgcagggaccagcacttcgcctggagtgccctagagaaggtcaggtcatcagcaacatcaagtttgcaagctttgggacaccgagtggcacctgtgggaactacaaccatggtgaatgcagcagctctcaggctcttgcagttgttcaagaggcctgtgttggaatgaccaattgcagtgttccagtgtcatcgaataactttggagatccatgcagtggggtcacaaaaagtctagtggtggaagctgcatgctcctgacaggtttgatagtgctcgttagtaggaaacaaaagtagtttgagggggtgaagcaagaaaaccttctgtgtagaaagcaggcaacaaccaacaaggaataaatgttcccaaatgcaggtggaaaaggaataaataataccaaattgctttggagccttgcaagctgttagatcgtacgtttagattgagttgtacttgttaacatggtgaatctctacaattgtacaaggcaatgaatcttttgtaattcttttgagatatactttgtatttcaatcaaatataaagcacaccttcatctgttgaattgtaagtttgctatctagaaatgcacctgaaactctgatgcacttgtgtgaagaaaagcatctg

SEQ ID NO: 17014 - DNA, 3066 bp, Oryza sativa
  ref <308>: DATABASE ACCESSION NUMBER: AK067480
  ref <309>: DATABASE ENTRY DATE: 2001-12-06
gcgtggcggatcaaaccctcatttggtgggattttttgctgcgtttaatcaaatcctctctctctcttcgaccgcggggagatccggggttcgattgtttcgtctcctcctccccctctcgtgcgggcgtcggaatcgatccacgccccgcccgctcgctcgctcgctcgctctgtgagcccaaggtagattcctcctgatccgtggccttcttctgcttcggctgtcgattcggcgtgctttcttggtttgcgacgttcatgggagggggtgttctactgttcttgggggttgggggaatggggagatatggttcttcatgtgtaccctactttgccttccattccattgggttccatggcgttgggatttcgatccttaaattgtggtagttgggagaagtagtactgtcattatgctttgtcttagtgaattatcgtatcggtgatagtttgtggaacaagaattactagcagagataatagagcagttctgggcattcctcgtgctcttaagagaggcagaattcgttatctgtcctttctttttttcggtgaattatcaatagggatgatttgccttcctagtctttattctgataggatcatcctatgctagaatgtctgcgagtttgttcacttgaatatatgatatcttgtcctatgcatttggtgtccattatcgcttatgatctattgttatgcctaactcagacttcaaccatgccttcctagattttagttttcttgcagtgctttcgtagttttagttgctctttttctgatagaccatgacatgcttttatcattgtttagaggacattttgctcagtgctgtgctagctttgttggctcaagttcacaatgggaggttgtgtgggcaaggtgagtcttccaaaaccataattgatatttagcggttcatcatggctgttcaatttaccacatatattgatttgtgatgtttcttttatttatgttcatttgttcagggacgacgacatattgaggaagacaagcttgatttcagaggtggaaatgttcatgtcataacaagcaaagaggactgggataggaagattgaagaagcaaacaaggatgggaaaattgcaagcaagctagcaatttgctcaatggattacaaatacatcttttggttcttatgttgtgcattggttggtgatctatcagtttgcttcacactatacaactttacgaagttgatatctatgcactacttatcacatggtcctttcctttcctttctttttttttttaaaaaaaaagaagtgtaattatctaatgggattgagaacagactgaaatctgcatgagagtgaaaaaaaaatcagatattccagttataaagtcagaaataattcatgaaaactgcattcagatattctagctagtaccctgtgcaaaaagttgccatttcttagtattccctgatttatatagctttctgcctttagtcaatgcaagatccttgtgtggaataaatcatttctagttatgctgacgtgtagaactgctttttccattgttctagtttgtttctaaaagattcaaacctcatttgtaaattacttaggtctgttttatgttggttttatttctcatccaaaacaagttaaacaacattatgccatactcccagttattctgaatagcacttgcatgctcatccacttggtatttcctttttttttcctcaggatttgttttgcttatttttaggatgcctgcttgttttttggcaatacacacacaacatttacgactcatccactttagatggccattctgttgttggctgaaatctcgtaacaagataaagttatgaaaattcttgatgcaaactagtacctttgacgtactcactgttttgttttgtaggttgtggcaaatttcagtgcttcctggtgtggaccatgtcgtgttattgcacctatttatgctgagatgtcaaagacttatcctcaactcatgttcttgacaatagatgttgatgacctaatggtaattctaaccgtttgtttggtcaaatttgctattgaaaaatgattaatttcagttttgtatgaaccaagaaaccccttatacatctgatggcggtcattttatcaatagtatcatttatctgtaatcctgtataactgattgtgcatcctcactaaatgccatcgattaaggtttataatcaagaatagattgtgtactgagttccagatgtgttgaattatttgctgagggatatcatacccaaagcatgacctatcatcctacttatggagtaattgctgtcgacataccatgagaactttgaaaaaaaataagtttgtttggtgtctctgtatttttttggtaaagcttcttatatattggaaattatcatataaaggctaaacacatgttgcgcctgcactgttagcattatagcattataaagagcttctcaacacttctagaattaagtaaacagatgtagtgattgcatgcaaattgtcctaaagttaactgaagtcctgacattagagtagcttctcacttagcatatctataggtcagggtgcatgttgtaatgttcttccgatttaacaactctcttgtattctctgcaggatttcagctcatcatgggatatccgcgcaacgccgacctttttcttcataaaaaacgagaagcaggtcgacaagcttgtgggcgccaacaaacctgagctcgaaaagaaggttcaggcacttgctgatggcagctgaaccttattatagcgcaacggctagaactgaaacgaatttggcatgtctgtccggccaagtttgtgtccgtgtgctcccttgcagcttctagtgtatagttttggtgtctctgttcaaaccatgtttctttttctttctgaattttgcccatgtgtctggccacacacatatgcaatctgtgaactaagaagttgtgatgtgttcagagctgtaacataagagtaatgtactagagtagttttaaaagacagtgatatggttgtattttgagctatgaagttgtgccaataaatgagtgggttttg

SEQ ID NO: 17015 - DNA, 796 bp, Oryza sativa
  ref <308>: DATABASE ACCESSION NUMBER: AK067481
  ref <309>: DATABASE ENTRY DATE: 2001-12-06
ccacgccgcagccgcacaagacttgatcctcttcttcttcttcttcttcctccaggctccagtggcgatggcgaccatgctctgctccttcacgcccgccaccagggctccgctccttcgcacttcctcctcctcttcctctctcggcttcgccacctcgcaactcgccggcctcagcctcggcctctccgccgcagccaccaccgcgccctccgccgccggtcccaagctccaccccatcctcgcgcgccggatatgccccttcacggacaagaagaccaacagggcgaacaaggtgtccttctcaaaccacaagacgaagaagcagcagtttgtgaacctgcagtacaagaagctgtggtgggaggaaggcaagcgcttcgtcaagctgcgtctctccaccaaagccctcaagaccatcgagaagcatggcctcgacgccgtcgccaaaaaggccggcatcgacctcaacaagaaataaatcaaatcatcatcatcatgatgcatacatacatgtattctctcatcaattgccgctgtgctgaatagaccagagctgtatgtagtccattattaaatccattcatctcgatgatgcaatttattgtagagtactacagtatgcattcatcggtggtggtggccggcttcgtttccttaaatttccttttatcccgtgttgctgctgcaagtccggctcgaattgtttgctactagtgtttcatttcggtcgagttcctaattaatactgtatgttggttacgaattataagatggatggatgtaactgagcagc

SEQ ID NO: 17016 - DNA, 1160 bp, Oryza sativa
  ref <308>: DATABASE ACCESSION NUMBER: AK067482
  ref <309>: DATABASE ENTRY DATE: 2001-12-06
ggagtggaagcaagcggaagaaggggaggcagatctccctcggccaaccccaagcagatcccgacgatgctgcccacgacggcgtccaaagggcgcggcgccgcccgctctgcgccgccgctcttcggcccctacctccgccgcatcgtcaagtggcaacaaatggatatcgagtacacattttggcaaatggtccatctctgtacttcaccaaaagtagtctatcagcacaccaaatatcacaagcaaacaaagaatcagtgggctcgggatgatcctgcttttgttgtcattctaattcttttccttgtgtttgcaacatcagcttactgtgcagcgtatggagagagtccttcacatgctgctttaacaatcacttcagttgtgcttgtccatttcttgtttgctgggatagttctggccacactttgctggtttcttacaaattcttacttgagggaggaacctaacagtcatgtggttgagcaacgtgtggagtggctctatgcatttgatgttcattgcaactcattcttcccagcctttgtcatcctatatgtgcttcaatattttctatcgcctctgttggtcgcacatggcttctttcctgctctattatcaaacctcttgtttgtggtggcaatttcttattatcactacctgaattttctaggatatgatgttcttccatttttggacagaacaacatttttcttgtacccgattgggcttgtcatcattctctctccactgatgatactcatagggttcaatccaacaagatactttttgagcttgtacttccgttaaggtcgataactagaacagtaagagaagactggtgacaaaactaatggcagattgggtacacactttttactctagcttcttaaatctttgtgtgaatttgaggagagtgaggctcaggaaaaggtcgatttgttcttgagatatattactgccagcgtgggccacgggcacaggccttttggttggagcccattttggtgtcaacttgttcataatatgtattgtttccattgattaaagagtcaaggaccagtgtacaattttagtgggaaccggaacttaagccgattgtatcgaaggggcaccaacattgtaatccacctgcctaagaatcatgagtttttagtggc

SEQ ID NO: 17017 - DNA, 2652 bp, Oryza sativa
  ref <308>: DATABASE ACCESSION NUMBER: AK067483
  ref <309>: DATABASE ENTRY DATE: 2001-12-06
ggcggggtggacgcgtccaagcagaatcccaaatcccaagccctctctctctctcgctcgctcacgcaggagcgagagatcccactctctccccaccatttcccccccccccctctgtgtcccctcctcctcctctacacctggttgggcatggcgctgcggcgcgggtggagacgagcggcggcggcggttgttcttcctgccgcctccgtggagtgaaccaccgacgacgacgacgaacaagatgacattttgagcaccgcgtgctaacttcacagagggtgagagaacccccctctgtgttgattctttttcttgggctagaagtatttcggttagatatgccaagttccgaatcagacagggatgatatcttctttgatgcatttgatgatgttacttcaacaagggagccttcattgtcagatgattgcagcacaagtgacgaaggattagcatcaaggagatttgagtatgatatttggggaaacgagccaatgagtgttgaagaaaggcggcaaaggttcctgaagggaatggggtttgatgaatttcttgctaccagagtggatttttctcaaccacagggagaaatcacaactgttggtcctttcgctgacttggggttggaggagagtactaccagtgacatttcttccgtgaattcatctgttcctgagaatgaatcagtttctgatgcctcctgttgcataggagatattgacagtggcgagagatacacagttcagaatgatggatacggcgaattgactagcatgcttaaggatgtggcatcacataaggtggtgtctcttctggagtttgatggcgtaccaggcctttctcaatctgttcaaaagttgttgcgcaaggtgtatagcagttctatggaagagaaaaagaatgtgtttaataagaaaaagggtgtcaagagcttgtggaagagcttcatgaaaaacaggagttttggtggaatttgcaagcacgacgtcaatgtaaaaaactgcacaataggcataccatccagaacaaaagttcaacatcgaaagaaaaaaactatggaattttctgctgtccatctgggtcaagaaatccaagctcacaagggtttaattaaagtcatgaaattcagcccgtcaggctggtatttggcaactggtggtgaggactgcattgtacggatatggcagattatggaagtggaagcatcttcgaagttgcatgggggagacaaccctcagaactatgatgataaaattacaatcatcaaaacggaactaggaagagggaagaatcatgcccttgcagtagtgccaaagaagggtttccgcatttcagagactccattacatgaattccaaggccatacagatgatatcctggatatggcatggtcagagtcagattatctcttgacctcatcaaaagataagatggtgcgtttgtggaaagttggctgtgatggttgtcttggactgtttaaacacaaagactacgtgacatgtgttcaattcaatcctatcgatgaaagatacttcatcagtggttcaatagatggaaaagttcgtgtttgggatgctttggataagagagtagttgactggactgatacacggaagatcataactgctcttagttaccaaccggatggaaagggctttattgttggcactacttctggagaatgccgcttttacgatcaatcaggtgaaaacatccaactagacaaagaattgtttatgcaagggaagaagtctgctgtccatcgggtcaacagtctgcagtcacgttcaagtgattcctctaggattacaataacatcaacgggttccaaaattcgagttgccgatggtgttgatatcattcaaaagtttgaagggccttggaatttgaaggctctttcttcaccatctttaacatcagatggaagatatctcatatctgccggattggattccaatgtctacatctggaactttgacattccaagtgtcgccgatcataaaggcgaagctaaatcggttcgctcctgtgagaaattcttctccaaggacgtgacaaccgcggtaccatggcccgggctgcatcaagaaagacagcaggtgaagaattcttccagcctgactgaagaatccgtcagttcacccattttgcaccgccacggggaacgccgttcccccgcagcgcggtgtttcgctgacggcatgaagggtactccgacatggccggaggagaagcttccacctgcaaaagccgctgatgccccacgactgtctgactgtctctccacgatctcgcctgcttggaacacggtgatcgtgactgcaagtcgagacggtgtgatcaggtctttccacaactacggcttgcctgtgagattgtgatgatctgcaaatgcaaggcaatcagctttggtatagtctgactctgatttgcgtgcgtgcgtgagtgtgttcgctgaagaagaagctacagaaaactgtagctttggtgatagcctttactaacacagtaaagtttttttgttggtagtagatggtaggaaggtgaggagaggatcttattttttttgtactgcgaattcagaatctgaacttgtggtgcttgtcgaaatgaggtggtcaatccagaagcgttttttccctcttgtcc

SEQ ID NO: 17018 - DNA, 909 bp, Oryza sativa
  ref <308>: DATABASE ACCESSION NUMBER: AK067484
  ref <309>: DATABASE ENTRY DATE: 2001-12-06
gagctggtggtgggtgaggtgagggagcctcgcgccggctttggatttttcgttctgcctcgcgaccgacgataaaaatcgtgcgtccgatgaggcccttctcccctcatctccggcaagccgcggcggcggcggctgctgcggccactggcgctcctcccctcgccgcagctctcctcaagaattcttctgctccccttatccatggccggctcagcttcagccacacgtcgctgcagtcaccgaacaaccgcgggaaacgaacaggctgggcggtgcgtgtgctgccgctgacggaggagaacgtggagatggtgctggaccaggtgcggccgagcctgatggcggacggcggcaacgtggcgctgcacgagatcgacggcctcgtcgtcgtgctcaagctgcagggcgcctgcggctcgtgccccagctccaccatgacgctcaagatgggcatcgagacgcgcctccgcgacaagatccccgagatcctcgccgtcgagcagatcgtcgacaccgagaccggcctcgagctcaaccacgacaacgtcgacaaggtgctggatgagatcagaccatacctttccggcaccggaggtggaagccttgatcttgttcagattgatgaatccgtcgtcaaagttcggttaactggacctgcagcgggtgtaatgacagtacgtgtagctgtaacacaaaaactgagggaaaagataccatccatcctggctgttcagttgacagagtagaaacatgagttcagttatgcagcaactcaagagaaaacaaaactttgattttcagtgattttgtggtattcagtctcagtcttgtggttttgaatcaaaactgaagtactgaacgtctgaacctatcataccatctttaaatgcaagtgttctgactagg

SEQ ID NO: 17019 - DNA, 2089 bp, Oryza sativa
  ref <308>: DATABASE ACCESSION NUMBER: AK067485
  ref <309>: DATABASE ENTRY DATE: 2001-12-06
gaccttcccctagttacaccagcatcctgcaagagacccaccacaaatgctgaactcctgtttttccctccctttcttccaacacaatgatctaatccacagaagtgcttcggaagcttccatcgatcggggcgcgtgctacctacgctcggcctggtgatcttcctgattctccagttcctctgaagaattcaaggtgaagaccattagaaaaccagagtaaataaaggaaggaattgaaagcctgcaagtataatgttcaaggtgacacacatatattgctctgattgatgagtagtagttcgttaagggtgctagatgcatgttggctaatcatttcagatatgataaggttcatgcagggtgttcattgggtggagtaattgttttcctttattaaaaggttagcatacatcatcatgagcactgtttgtgtagtgaatacaaatagtgtgaccatcttatacattgttttcattgtgcaatcaaatttaagtcatgcctttcaaacttgtacagtattaaatttcgatatggcaagcaagcttaattccataaagaagtcatattatggaatgacatagatatagttcattttatattgaacaaatagagatttcaaaagccaatccagcttatactcagcaagatgaaacaaaaagcatgaacataatttgaaacatatatgctctttaaattagactgaagtgggatagaaagatttcagtataaaacttaaggtgttcttgaacaagaccgcacctcagataacacgattaggcatcgacaatacttttctgctatattaatcttttattatcaataagaatttccagagatccatggaaggttagttaaaaggccattaaaaaacttgtagttgacacatctcaagctaacattctgactaaatttggtgaaacagaaaaaaggagaagaggaacaagaaaaagagcagtacatctcatgtttgcacgctataaaagttacctgttgtggattggatctggtccatttggcaccctcctcttcatgctgctgaaagcatcaccagcattgaaatcttccaagctcctgtgactgtgaactagtcctccattgatcatcatccttctacccccaacaccaagaacactactccccggagacggcggtttcgcgcttgtctccaccaacaatgacaccaaaatgaggcctccaaataggatggccaatgttgtcgctgatacccgcctcgctgacctggcaaacctgctcataataccctaatttctatatcttggggtattgtcaccaccaccaccacccctctatgagcatctcatagagtggtgcaagtgaggaaagccccccctcaaatgtgaggcttcttctctcttgtctcagcacattatattgttgtggaggcagtggtatgtgtttcttgcttctggttttcttctcagcttctttcttccttgagctgctggctctgatgtgcttttgaagggcctagctaatgaagaggcatggtagaaatcaaaggaggtgaggccatgcttgcttttgtcctttgctttttgagttatgttgttttccttcttttgtttcatttttctttctcttagatcttgattggtaaaaagagccaattggagttttaagatggcaaaccgaaaatgctgtctgatggaccatcagggattacttagttacccttggagcaaaaccaagttagaggataatttagtttacacaaaagtgtttaaggtaaagtttgagtaaatctaggaggaggcatgacacatgagagattgctctggtaaagcaaggtccaaaagcagatccttcaaggtgtgaagcaccctgaagaaatacacacatctaccactttcaggtgatatgtcactgtccttattattagattgtgactacatggatcacactgttctcataagccctacatggattacatgatcgttgcaaggacattttcagtctactgttgaaaatgtacactaattcgacgatttttcgcatgcagtagaacaaaacttttgttaggatctaaacttgttctctgtggattagaaacatgttttgaggtagc

SEQ ID NO: 17020 - DNA, 3621 bp, Oryza sativa
  ref <308>: DATABASE ACCESSION NUMBER: AK067486
  ref <309>: DATABASE ENTRY DATE: 2001-12-06
ttgatcgatctacatgtagctttaatagctcttctttttttctaattaattcatccctcattaattacgtgataataagtttctgttgtcggccggactgtatatagcgagttatgggtaaggtatgaatgccggttttcattgaaatctcagtttacgtacacacggcccagaacggtaattggcatgttactgaatttttgtcagcagagctacagtttattcacctcttgtcttgtagtacctatatatatgccactttaaaattaaatgcttcttttaaggctatcttcaaatggttttcaactgttcatactggtagtatgtaaataaccatgcatatttaagaaggttaattggatttatgtcattataaaaaataccctattaaaatttatcattacaaaggatgaaattgggtgatataatgattattttgcaaagtttaaaccatatcattatgtagtacgcagtacatctaggatgtctttgttcaagtatttttcatatagactaaaatgcccctgccattcttttcatatgaaccgtattttcgtatatatggcactgatcgatttttttttcatcaattaattataagtctctgttcacatcaacatcatcattaagaaaagacccgtgcatacagtagctccgcatcacttcgttatgaatcgacgtacgttgcacgtttatattactactcttatcagatataattaagagcactgttttattcaggtgaatcaaatcgtattattcacccgacatgcatcctacatatttacttccgctgtcctaaaataacatcgtgtttaccctcctccagtttattccaaattaaatttacttttagcaatcattgtattagagtttgtaaaagtgaatagtaaatacattgaaactagataaaataagaaacaattatattgtgatttaataaaatagaactattttagttttttttgtcctattgatacgtgtgagattgataaaaaataaatttatttagggaggtagtatgcatgatcagctgcagtgttgataaaattagttttaccaacaataagacactggtcaattaatctaccgaccgattaagacaccggtcaaattaatattcgtaccgatcaaataaatctgcataaccgattaagacatcggtcaattaatctaccgattaactaccagttgtcgatcactctttactacacatctttctcaaccataaattcgtaaggatttctcattcacgcccatgcttgtgcacaaacagaataaaatttattatctacaatagtatatactactacgtgattaataaatacatgtacatgtatatttacatcttacgaaatgagcgtagctcaactagttaggggctgctgatggatggcttgccacgcgcctagcacggtcacctcacctccttacatcccctgtacgtttgtacatacttttgcagtggtagagctaactcaagggcaggtcgggcggtcgcttaggctctgtcgctggcgtctcggctgtagatagcatttgatgtcccaaaaaattagttgattactgaaaaacgctaatacttgtctgggcttcatggcatctttgctccaccactgtacttttgtatacacacgtataaactgtgtacatgtatatataccaagtttatacatgtatatatactaaatttatatgtatgtatacaaagtataaacttcacatatacatctacaaattttctatatttagaaaaattgtgtgtatactttttagatgtataaaaaatacacatacgcatataaactttatacttctatgtacaaattatgcgtgtatgtataaaaatagaaaaaaaaggcatgatcggaaactgaccagacacgcagtcgatcgctaattagtaattttgtaactgcgtgggttccttgtggtggaaactgtctttcgggttcaattcctagacttagctcacgtgctcgcatttataattaatattcttttcattatagggatagagagacgctcgcgatgactttatcaatcttaagaatgtcgctcagtctttttaaaaatgctcacagggatagagtgtgcgcgtttttgtgtacgtctgagtttgttccgtgttttagaaaaatatttacacgctcaaataattaatataaagattacattttttttaatcgggctaaagatttactattgatcccgatacttttactgtgggttaaaacggacgcattcatggtgttgaggtgttgtgcgatggtactgaacacattgtgtactccctccaccccatataaaatcaaaccctcgcatccctatataaagttagtgcagagtaaaaatgaacaaaatactttttattattgaaaaaatagtaatggtgatagataggtaaagagtatcgaaggaataaaacttttcattttacatgctgagaatagataagattgtacaagttttttttgataaaatttaagctctagaagttgattttttttttttagggagagagtagaaaggaagatgcaagatagattaatcaagtgagaatgggcaaacattaatgaatgcaggaggtgtacgtggcgtcggagtgggcgcggcggcgatggcgtcccctccatccccggcgatacgcgaagcccctcatcttccacgacggccgcgtcgcgttccggccgacgacgtcggcgacgctggccatgttcgtgtggctgccgctggccgtgcccctcgccctcctccgcgtcgccctcatcgtcgtcgtcctccccttctccctcgccgccccgatcgccgccgccctcggcatccactgccgctgcatcgccgcctccacgctgcgggccgccgcggtcttggacctcttcgtctgcaaccaccgctccctcctcgacccgctctatgtctccgccgtcgccggccgcgccgacctcgccgccgccacctacagcatcagccgcctctccgagatcctcgccccgatccgcaccttccgcctcacccgcgaccgcgccgccgaccgcgccgccatgcaggcccacctctcccgctcccggcgcggcggcggcggcggcggcctggtggtgtgcccggaggggaccacctgccgcgagccgttcctgctgcgcttcagcccgctcttcacggagctcggcgccgacgtgcagcccgtggcgctgcactcggaggtggccatgttccatggcaccacggccggggggtggaagatgctcgaccccttcttcctcctcatgaacccctcgccggcctacgtcgtgcacttcctcgaccccgtcgccggcggcggcggcggcccggaggtggccaacgaggtgcagcgccggatcgcggagacgctggggtacacctgcacggcgctcacgcggagggacaagtacctcgtgctcgccggcaacgatggcgtcgtcgccaacaacaacaagagcaattaatttactaatcaactactctactgtctactactgttgtgtactccactacgtggcttgtaattagcatccttaatcccgcagttaattaaggggaagtgtaagacacactggttgtactcatccaaatgctcatatcaagttataatgaactgcg

SEQ ID NO: 17021 - DNA, 1255 bp, Oryza sativa
  ref <308>: DATABASE ACCESSION NUMBER: AK067487
  ref <309>: DATABASE ENTRY DATE: 2001-12-06
gaataagcctcattggttgcgaagaacacagagagaaagagagagaggagtagctggtccaggagatcgcagctgagatcaccggaattttctaaaaacaagagaagagacaaatattttttcgatcgagatgagcagcagcgagcaggcggcaatggagtcgggtggttgccagcatcatcaggagaggcaggcggccaccgcgggcgagagcgccaagaagctgtgtcgcgtggtgcgcgccgtgtacctcgtcctcgtcaaggggctcggcaagcaccagcccaagctcgccgcgctcggcgtccacctgcaccagatgatgtcctcgaggcggcatggcggcggtggccacgaccacggcctcgacgatttgcgggagcaccgggcgttgctgacgtacctgtcgtcgacgatgtcgtgcaggtccatggacccggccgcggcggtgcacccgtacccgcggggccgcggcgcgcacggcgctggccgccgtcgcagcggcggcggcatcagcagcgcgtcgggaggcgtttccgggctctcctcgatgtcgtgccggtccatggatccctccgccgccgtgtcgcagtaccagtaccggccccgtgaggtcgagttcagctgcagcagcacgccgctgcacaggcgccgccgcgcgcagcgccgcagccagctgcgcctgcagcagcacgggcagtggcacgaccgttcgtccgccgcggatccgtacggctcggccgccacggtgtcgaggctgttcgagctgatggacgtgaaggaggaggccgccgccgaggcgatgacgacggatatcgacgacgaagacggcgacgtggtcgcgtggcccgcggtggtggtgccggcgccgcggcaggtgcggatcacggactcgccgttcccggcgtgggaggcggacggcgacgacgacgaagaggggaggctcggcgtggtggaccgccgcgccgacgagttcatcatgtggttccacgagcagctgcgcatgcagcagcagcagcgcgccgccgccgccgccgccaaggagcggagcacctactacttcgttagatagtcagtacggatcagtacggcaccatgtgaatagttcatgaacgcatggattattgcagagtacatacatagagacgaaaattgtgcgcatgcttcaagtttttctctttcctgttaattcttgatacgatcgagtgtgatcgagttggtatatttgattttgagatgcatatattttgagagc

SEQ ID NO: 17022 - DNA, 2264 bp, Oryza sativa
  ref <308>: DATABASE ACCESSION NUMBER: AK067488
  ref <309>: DATABASE ENTRY DATE: 2001-12-06
gatttttccttctctctctctctctcatctctctcagtgaggagtggtggtgtagctaagctagggtttcgctcggaatcagggttcgttttcctccaccggaattggcggcgatctggagctcggcacggcggcgcgcggcgtgatccggacgctcgggtaggtgagggagggagggaggagatgaagtcgtcgctgcggaagctgcggggcttcgcgctgcagcgccacgagcagcgggtggaccgccgcgggggccactccccggccgccgccgccgccgcgaacgagctcctcgccgcctcgcaggatatggcagatatgaggagctgttatgacaatctgctttctgttgcagcagcgattgcaaatagtgcatatgagttctcagaagcactgcaggaaatggggacttgtttacttaaaagagtcacaccaaacaaggacgggattaatgataaagttttgctgttgcttggaaaggcccagtttgaactgcggaagcttgtagatagttatcgtgtgcatgttcttaataccatcaccactccatcacagtcccttctcaatgaacttcaaactgtagaggaaatgaagcaccagtgtgatgaaaaaagagagttgttcgaatttctgctgaatgcacagaaagaaaagggaagatctaagaatgccaaaagtgacattggtgcgtcagagcaattgaaacaagctcaggacgattatcaagaagaagcaactctttttctattccggttaaagtcattgaagcaaggacagttcagaagtcttttcacacaagctgctcggcaccatgctgctcagctaaatttattcagaaaggggctcaaatctcttgaggctgtagagccacatgttaggcttgctgctgagcagcaacacattgaccatcagttcagtgcacttgacgaggaggattactctgtggatgaagaaaatgaggatgattacaatgacagtcatgaagatttatcctttgattatggagaaaataaggaaggcacagaagctggtcatgcttccaggagccctacagaggaacttcttgacagaagcaaagcagagtattcctcttttcctggtgaaaggcagagatctggaagtcagtcagccccactttttcctgaaaaaaaacttgaggcagcagagagaataaaagagttgcggcgttctgctacgaggaagctatatacttatgttttgcctactccaaatgatgttagagacacctctcagacagttacagcaaatcctactagcggatctcctcttggaaacaaaggtgcattctattcatctccactccagccaagtacaaatgtgggagatttgagagacaataagctaccaagtcctaccagattatctaatgcacattcagttttgaaagagagcaataccaatactacagacaccaggacaatgcttgtgctccctttgggtgatctctctttacctggttatcatgactcgaaggcttctgacaacaaaaaggtgaagagaggatccttttctggtcctattgttcccaggtcaaggtcaacagagaatattgatgttgtttctgtaccacctaggcacagctcttcacatcagccgtcaatacatgtcagagtttctcccaatacctcgccaccactgttgtcctcacctaaaatcaaggagcttcatgagcttcctcggccacctgctaatgcatcaaaacatacaacatttcccagtttagtcgcccactctgcaccgttggtgccaaattctgctcctttggcacccagaggccaggatcattttaggccgaggcaaacaccaccaagtgctccccaaactgcatcacctttaccgacaccacctgggcctatatcccgcagtttttcgataccttctaggggcatgagaacatcaggtatttcagatggtaaagagacagaagatcttcaggataaagggcctgccagaatgagcctttctagtcttccttcagcacaaacatcgttggaggatcatcggccattgtcaggagctaccgagtcagttagcaaaacataggaatatttggtgttgaggtgaaagtttatttatcaaggggctcagctatctcgccatggaagaatattgtacatattagtatgtgaactcggccaatattgcaaattagttggtgtttcgtttgtatcccccatggttaagatgtaattgtgcaaataacgagttgtggaataaaatctccatttttctctccgatt

SEQ ID NO: 17023 - DNA, 4513 bp, Oryza sativa
  ref <308>: DATABASE ACCESSION NUMBER: AK067489
  ref <309>: DATABASE ENTRY DATE: 2001-12-06
gccacacggcttcaccggcgacgcgagctcggctccggcgactcgagcttgactctggcggcagtggcgggcggcgtggccttgcgatttggcggcgggtgcaggctggtttgatcgtcggcgtcagcgcgggctcgatttcaactgtgcaagctcgagatcgccggtgtagtgggctccacatcggccgcgcgcgggcgcgagcttggacttcggcggcactgctaacgggttaggcaagatactttgaaatatgagtggaatggaagctgctgtagcatctgggctgttgaaggtcgcaggacacaagttagtttcactgataggcagcgagtttgctgccatagcgcgcgtggccgaagacctatctgagctccatggtatacatggtgaaattactagctggctgtccacagttcgtgatggatcaatagagtgtgatccacagttccgttgggtgattaaattgaaggatgttgcttatgatattgatgatctactccatgaagtccaactagaatatgagaaacacaagatacacagcaatggtgacaagcatgctatatttgacacgttacgtgaaaaaccaaagtgatttatgttccgtcgcaagatggcccgtaagatcaaggatatcaaggtgaaatataatgagattgtgcgacaaagaagggatgccaatactatacgcagtagtttacaagtggatcaacctattcctagcagtaacatgataatcggggagttgtccttgttgagtaatgttgaagaatcaaaaatacctatcagggaccaggagatggatacaattgtatctatgcttgtagactctaatgagggagagaattgttggatagtttccgttgttgggctaggcgggtccggcaaaactactctggccaaacacatttgccatgtcaacaagataaaggagctatttaaagagagaattttctgggtccatgtgtctagagagtttgatgtgcaaaagctcatcggcaagctatatgaaactatcgttggcagaaagtcagattgtcaaccccaacagcagatggtccgtgaaatttccaagcagttatgttgtaataagttccttcttgttcttgatgatgcttggcatacggatgggtatgagtggggacaattcatggtgcatctacaggataggtcaattggaagtaggattttgctaactactcgtgatcgaaaggttgcagaagtagtcaaatccaaacaaatacatgagttggtgttcttaacagagtctgagagttggagcttgttcctaaagtgttctgggtgggtggaggatgatttgggatcagaatttatacagcttggaaaagagattctgaagaaatgtggtggggtacctctagcaatcagaactattgcaggtgtcctctgtgaaaagagggagataagtacttggagagccataagagggagtgacttatggaacgttgggagtgtaaacgacagggtgtttgcatccttaaagttgagctacattcacctggcagataaactaaagcagtgctttacattctgctccatatttccaaaaggctatgtgatcaataaagacagattggttgcacaatggatagcccatggattcatcacgccgatgaaggaagagcagccaaaagatattgcaagtgaatattttgattctcttgtgaaagctggcttctttcttcaagatacgattgaagagtttggttacttgcacaagatgcatgacctgattcacgatcttgctcaatattgtgaaaagaatgaagtggtgacatctcgaccgaacagtatgtctacatatcagacacacaaatgcagatatttatctttgacatcaggaaatgagaaggtcaagaggggcttacttgacaaggttcatgctttatatatgtctgatggcaacctatcattcgataaaccagttaagaagagttgctatatccgcagtgtaattttggacaatgaaaactgtaccacttttccaccagtcttgttgaagtttgaatttcttggatatcttgaaatccatggagttgattgcaagaaacttcctgaagcaatctccggctgttggaacttgcagtcacttcattttattcggtgcagcggatttgtgatgttacctgagtctgttggcaaacttaagaagctaagaactttagagctaaattatgttattgatcttgagagtttgccgcagtccattggtgattgtcaaggtcttcaatccttgcaactacatagctgtaacaaacttcaaggcatgccgacttcgataggcagaattgagaacctaagggtgcttcatattacgtcgtgtccatgtatgcaaaaactaccgtcagagccctgtggggagtccaacaacctggagataatcaacttatctaattgccacaacttccatggcctgccaagcacatttgcctgcaaagcattgcgtactcttaatctttacaataccaagattaccatgttacctcaatgggtaacttcaatcgatactctagaatgtctagaccttggatattgccacgagctcatggaatttcctaaaggtatagcaaacttgagaaggcttgcagttttgaacttagagggttgcagtaaactacgttgcatgccatcaggtttcagacaactgactcgtttaacaaagatgggtttgtttgttgttggatgtgatggtgataatgcaaggatctcagagcttgaaacccttgatatgataagtggtaagatgaaaattatcaaccttaaatatacgctggatccaactgatgcagataaggccagcttgaagaggaagaacaacataaagtatctggagttggactggtctcgaggtgaaactgaaaaggagttagtaacagatatggtcatggagcaagacctggctgtgctgaacgctcttgaaccaccatcccgaattgaggaaatattaatatattattatggaggtccctgtttgccatggtggatgaagaagcaaactgattcttcttgctgggaaagcacaatgttaaagcaaaccaatccatgtcagcttatttatctaactagaatgacactacatgaaattccaaacttgaagcatatgcaaggacttgttgagttgcctttgctgaattaccttgaactatttggattgcctaatttggaggacatgtggaccacgacaggaggtgcagaaatcaggggtgatgaattgcaggcaaaatactgtttccctgccctgtccaccttatggataaggggctgtccgagattgaatgtggtgccctacttcccatcatctttggagagactttttttaagagaaagcaatgatcagctgctatcttcaggcagcttctcccatctccttcctccacttgcccatgaatcttctccttgcagcaatgcgcactcagcggtgccccgactgaaggaactaactataattaaaatgacaggatcatcgtgtggttgggatttcctgcagtaccttgatgcactagagtacttcaatatttttggcagcaatgacctaacacaattacctgagagcatgcgaagcctcacctccctccacaagctaatcatccacgactgtcccacctttggcatgctgccagaatggcttggagaactgtgttctttacagtccctgtttatcaaggggaccccaatgatggacagtctccctcaatcgattggctgccttacgtccctcacgcacttgactattgcatgcgataatttgaaacagctgcctgagacgtttcaccacctcacctcccttcgagaactcgacttggcaggatgtggtgccctgactgcactgccagaaaacatcgggaaactctctgcacttgaagcactatatgtcggaccgtgctctgccattcaatgcctgcccgagtccataaaacaccttactaatctccggcgattgaacatttctggttgccctaatttggtcaagcgttgcgagcaagaagtgggggaagactggcagcttgtctctcatattcctaatttaataagtgactaaggctctgagggcagcatccgacccttggttttcagattggagaaagtgataagaaggattggactgtcgaagactgtctgctgagtacatttcttcttctgctggaccattcagaaaatgcttccgtgcttcttttgtactgtatgctgatcatcttagatctataccgtttaaagagtgtggagactacaactttactctggatctcgtcttttgtacttctgtatattggtcatcttactctgctagagtctggtctcactacacgcgtttggttagcatgtgacatgtttttgctacttactcttgtggtttctgtgaggagtcacatttgatcgatcaattactcttgagcttcctggaagcggtggtgatcaagcttcttttcctgactaagcgatatcctaaactgtacaagggaaggatatatatatttgtagtctgctttactgc

SEQ ID NO: 17024 - DNA, 1206 bp, Oryza sativa
  ref <308>: DATABASE ACCESSION NUMBER: AK067490
  ref <309>: DATABASE ENTRY DATE: 2001-12-06
gacccgacccgacccaactctggtcttaactccgacgcccgaactcctaaacccaccccgtgcccccgccgtcgtcgccgccgccgccgcagcagcagccttcctccaaatccgcgcgcctcctccggccatggccacagccagcgacggcagcggcagcggcggcgagcagcggcgcctcctctccatccccaaggagggcgagcgcatcatcgcgccgacgcgccgccccgacggcacgctccgcaaggccatccgcatccgcgccggctacgtcccccaggaggaggtcgccatctaccagtccaagggcgcccagatgaggaagtcggggcccgacgtgccgccgggctacgacccggcgctcgatgctaagcccaagacgaaggcggccaagcggaacgagcggcgtaaggagaaacggcggcagcaggccagtacaacaaatgataaaggaaagggcttgcatatagaggatgatgcaggagaaactgacaatccgaaggatgcagtggacagtgtaacaaagcagataagtggcattgctatttctgaatctctggttgtcgcaacctcctccactgatgctaccgacaactcaaaatcggagtcatctgctccagacatagataagaaaattcgagcactgaagaagaagatacgcttagcagaagcgcaagtgcaaggagatccagaaaatttgaagcctgaacaactcgagaaaatgaagaagatagaaggttggaaagaggagctgaagcttttggagaataagagctctcctgctgcttcctagacaatgtcgacctcagcactgatgttgagtagagccatcatatatcgaatgcctgcctgctgtgatgttttgctgatccaaagtccaatcagtcattgtcttgcttgtcttattcccctcggcctctggaaaaagcaatccaattgatgtggggtttcacacagagtggtagctttttgccacaaattgttgtctcgtgtacgtcctccagttcgaagattcgtattgcaaaatctgtttgtcgtagacatcgtgcaatgagacaaccgattggagttggggtatgtgacggtgccattgtagctttgtatattatgccaacattggcaattcctcttgacactggatttacttctctgctgatccagtaataaccgtacaaatttaaaggccacaggcctcattgcatc

SEQ ID NO: 17025 - DNA, 3484 bp, Oryza sativa
  ref <308>: DATABASE ACCESSION NUMBER: AK067491
  ref <309>: DATABASE ENTRY DATE: 2001-12-06
cagtcagggaagaagggaggacgcgacgcgacacgagcgcgagaggaaagcggaggagatcgaggagaaactccatttccccccccctcgccttctccgatttccctcgcgtggaatccccttggactcctccccctcccgccgccgcgcgagccgggcacggcgagcggcgccgccctgcccccgccgatctgctctgccttctcctcaggggcttgcaccgaggaggaggaggaggagagagctgagcagaacaagctagattctcaaggaagggcgccatgaagaaagtattcgatcaaacagtccgggacctaaaaagagaggtgaacaagaaggtcctcaaggtgcctggtatagaacaaaagattcttgatgccacaagcaacgagccatggggcccacatggatcactcttggcagaaatcgcccaagcaacacaaaattaccatgagtaccagatggtcatgaatgttgtgtggaagaggatcaatgacactggtaaaaattggcggcatgtttataagggattgattgtcctggattacttggttgctcatggtacagagcgagttattgatgacataagggaacattcttatcagatatcgacactagctgatttccagtatatcgattcgagtgggagagatcaaggtagcaatgtacggcggaaatcccagagccttgttagtttagttaatgacaaagagaggatacaggaagttaggcagaaagcacttgctaccagggacaaataccggagtgcattcgccaccagtggaacacacaggagcccaggtggctatgacaatgaccgctatgaaggaagctatggcagtaggtatgataacagaaatggctacgggggagaaagagagtatggatatagggatgatgacagatatggtgttgctggaactactcccaatcgggaaggagatcgttattctagggattctaatgagcagcgctacagcagagatagagaagatgagtacaaaggaagtcatagcaaccatgaatatgcagaaggatcaggtcgcaggagctatggacgagatagggattcatatggggatgatgaagcttattcatcccgtggccggcaaagcaatgctgacggacctactcaggatgagaggcccatggagcggaagccttctaaccagcagattgcttcaccaccgccaaactatgaagatgtcacaagagatacacaggataataatcatgatggacgaaatggagggactgtgcctgtgccagttgctgcagcaaaggtgtcttcacctccaagaacaagtgtacccccaggtcaggtgaatggtgtacatgataatactgtggaagacgtacctgcaccaccacctactcatcctgaagttaatgggtttgacgagtttgatcctcgtggatcagtaccagatacctcacctccagtgaacccctcacaagccgtgaatagcttggaaatggatttattcggaccagatcctattaattcgttggctttggtatctgtgcctcagccaactgccagcccaaatgttgagccatcagcaaatccaggatttgagagtaacagttttatgggcatgccaccggcttctactggattcaatgaggcctttgatgcaactaatccttttggggatcctacgcctttcaaggctgttcatgaagaaactcctgcagtttctcagacaaatgctgcacctgctggttctttccatgctactgaacctgctgcagatgcaaatcctttccagcctgcttcagcagcaagctttggttttggagacactcttggcgacctctcttttggatcgaatgctgcacccgggcagcaagatatttttgtgcccacctcatcacattcagaggtaccacctgcaaacccatctgtgcaccctgaacaggcagtcccatcttatgtctcctcccaggcacctcagcctgcagctgctggtccacaaactcatgctgctcccgcttcatttgcttctcaagcacctcccacttcatttgcttctcaagcacctcaagcaggggcaccctatcctcaggctgcctccacatttcctcattcacaagcatctcatcctgcagccactaatccatctacaatccctcagaatgttgccacaccatttgctcctttacaaatgcctcaacctgtaccatcaggccaatcaaactattttatgcaaccagttccagggactggcattaatggcatgtctggggctccttcacagaatggagcaccatcctacatcccttcacaggcttctcaatttgcagctccaacaaatctacagccctctcagccaaccttccccccacaaactgccatggcagcttcacaggcaacatcaatttctcgaggggcatctcagcctcttgcagtgccgaattcaatgccttctggtgtgaactttccattacaatcaagttcatcagctccccctgaaacaatcctttcagccttgcaagttagtcagtctgagccagtgaagaaatttgagtccaaatctacagtttgggctgatacattgagccgaggtttagtcaatctggacatctctggaccaaaggctaatccgcacgctgatattggagttgacttcgattcaatcaatcgcaaggagaaaaggcaagaaaagaaagtctctcaagctcctgtggtatctacgatcactatgggcaaagccatgggaactggctccggcatcggtcgggcaggtgcgagtgccatggcacctccagccaacccaatgggtgcaagcaggggcattggcatgggtatgggcgctgctggttccggttacggtggtggaatgggaatgaaccggccaatgggcatgggaatgggaatgaaccaacaaatgggtatgggaatggggatgaaccaacaggccatgggaatggggatgaaccaacaggccatgggaatggggatgaaccaacaaccaatgggaatgaacatgggcatggggatgaaccagggtatgggaatgaacatgcggcctcctatgggaatgggtccaggtagtggatataatccaatgggtaccggatacggagggcagcaaccatatggtgggtacaggtgagattatactgtacaatgcgatactcagtgaggggttgagaaacagtttaggaggcgtttggattttggtcacctggattttctttatgtatggtttcttttgttttgggtgggggggggggggttataatttttcatcactattcttttcctatccatgttggatattgtatctactaaatatatgacatgtgaacgggggcaatgctacaactactgtgttgtgttggatgcaaagccttaatactataatcatcaatgtagctgtataattctctataggatgtttttttttcagtaaacattgtgattgtttcagcgttcttgctggcttgacaataaaaaggctgtaccattttgttcaac

SEQ ID NO: 17026 - DNA, 1030 bp, Oryza sativa
  ref <308>: DATABASE ACCESSION NUMBER: AK067492
  ref <309>: DATABASE ENTRY DATE: 2001-12-06
tggggttttatcaccaaacgccggtccggataacgtcctcctcctcccctcgcctcgccacctcgctcactacctacctctccaccaattttgaccaccaccaccaccaccatctcctcctccctcataacccctccggccgcggccctccaccaccgcagcagctcctgccggtgcccctcccgcctcaccgtcggggccgcgcggtggtgggcgaggcgccggcagccggcggtggtggtgcgggtggtcgcctcctcgtcggtgctcgaggcgcccgaggaggtggcggcgcggaagctctacgtcgggaacatccccaggaccgtcaccaacgacgagctcgccgccatgttcgccgaccacggcaccgtcgagcgcgccgaggttatgtttgacaaatacactggccggagtaggcgcttcgggtttgtcacgatgagcacaccggaggaggctaatgctgcaattgagagcctgaatgaaactgaggtcggtggtagaaaaattaaggttaatgtgacggagagcttcttgcctaacattgatcggtctgcaccagaaccagagcctgtatttgtggacagtcagtacaaggtttacgttggtaatcttgcaaagagcgtgaccacagagatgcttaaaaacttcttctctgaaaagggagaggttctcagtgccaccgtgtcccggattccaggaactgcaaagtccaagggatatggttttgtcaccttttcttcagaggaagaagttcaggctgcagtttctactttcaacaatgcggaattggaaggacaacccatccgtgtgaataaagcataggcatctagcagatatttccagactggttgatggcaaagtgggtacctctgaggctgaagtaactttgtgaacacctgtagactgagggaaactttaaggctagatatttgcaacaaagtggaaagaccttccaatgcaatttcactttgcaactaaacaaattttgtacgataacagcatatgtgaagaaattttattggtgttc

SEQ ID NO: 17027 - DNA, 1760 bp, Oryza sativa
  ref <308>: DATABASE ACCESSION NUMBER: AK067493
  ref <309>: DATABASE ENTRY DATE: 2001-12-06
ggtccaaacactgagctggtagtggacacagagagttctgcactctctttcactgaggagagcagaacagaacaagaggaggagaacaaaaaaaaaaaagagaaaaatcctatggcctcttgtgcatcaccaaggctcaaatccctgtgccaccatccactcttcatcatcttgcttgctctctcattgctgcagacaatcacagcagaggatgagcaggaggctgatagggttgccttcctccctgggcagccaaggagcccacagatgtctcagttctcaggctacatcactgtgaacagccagaatggcagggcactcttctactggttctttgaggctcaggcactgccttccaagaagcctctcctgctctggcttaatggaggtcctggttgctcatctgtgggctatggagcagcttctgaattgggtcctctcatggtcaatggaaatggaacaggtttggaattcaacaagtttgcatggaataacgaggccaatttgttgttcttggaatctcctgttggagtcggcttctcctacacaaatacctcgtctgacctagagagcatcgatgaccgttttgtcgctgaggacacctacaatttcttggtgaattggttcaagaggtttcctcagtacaaaaaccatgacttctacatctctggagagagctatgcagggcactatgttcctcagcttgctgatgtagtgtatgagcgcaacaagcatgttgaaacaaaccagcatatcaatttgaaaggatttattgttggcaatgcagagactgatgattactatgactacaagggactagttgagttcgcttggagtcactcagtgatctcagatcaactctataagcatgtcaacaatgtttgcgacttcaggttatcaccccgtagcaatgagtgtaaccatgtaatgggatacatatatgatcagtacgatatgatcgatattttcaatgtgtatgcacctaagtgcaacactgatgactcatccctcttttccacctcctacagtacagctgatatgaatgctaagaagaggcttaaaggcacgaggatgtactcagggtatgatccgtgctattcgtcacatatcgaagattacatgaacaagatggatgtgcagaaatcacttcatgcgaatacgagtggattgatcaaggacagaaaatggagtatctgcagttattcaatattcgacaattacgacatcacggtcttctctgttcttcctatttactctaagcttatcaaggctggcctacgaatatgggtctacagtggagacgtggatggcagggttccagttattggatcccggtactgcgtagaagcccttggccttcctgttaagtcacagtggcaaccatggtacctaaacaatcaggttgctgggagatttgttgagtatcaaggattgacaatggccacagtaagaggagctggacatgcagtgccacaagacaagccagaacaggcactggtggtaatcaattcctttctttcaggcaggcgactaccaacaaaaaacaaccgatgatacaacccagataaaacttacacataaaaataaagaaggaataagtcatcgatattatcatacatagatgaaacaatacatgtattgtaggctcttcatgtatgcaattgtctgtgtcaactagatgccaccctatacattaatctgtatattttccttatgtttgagttttatgttgagaatgataatttcaaccctatattttc

SEQ ID NO: 17028 - DNA, 850 bp, Oryza sativa
  ref <308>: DATABASE ACCESSION NUMBER: AK067494
  ref <309>: DATABASE ENTRY DATE: 2001-12-06
gaccgttcccctcctagagaaattctccctccgtcgacgcgaaatgagaggcgatgccattgacgattctgaggcgatttgttcttcggttccctactcgatcttagtggtaatctatggcgaggttcttattttggaagcttggaatctctgtgcccgttttgttttatgcgatttgacaggaatttgagttctattatctgaaatcctcgtcgttaaatggatttgtgagccactaatttgactggatttgaggttcttcttcgattccgagacgttgagctccctcgttatctaggcgaaaggcttgcgaggaatgtggtgaccatggcggtttgggaggcgtcgaccaagccgctggctgccaataatggagacgaccgagttcatcaacgccttgaaacaggagtgggacagaattgaggacaagtacacggtgatgacactcgcagccactgcgtcgctcaggatgtggagccggcggagttgcatcggcaattggcatgcctcatgttattcctggtctaatgaaggctgttggcattgtgtacagtgaaggtgactgaacagaagcttgccgtagtgtttctaattgtggacaagtaacttatacttgttcatctctgaaatctgaaattactctctgtcctggagactgtactggaagaagctatactgctactaaagttcagattggacatataagttcagaaaaaaaatcagaattatatcttgaattcatataagttcaaaaaattcagaattatgtcttgaattcatacatctgagtacagaaattgataccatttaagtttctcagatctgttcaaatatgcaatacaaaattgtc

SEQ ID NO: 17029 - DNA, 1086 bp, Oryza sativa
  ref <308>: DATABASE ACCESSION NUMBER: AK067495
  ref <309>: DATABASE ENTRY DATE: 2001-12-06
gattgagttctttggacgtttccccatccagaaaaaaaaatcttctcagttacaggatccatccttaggtgttagaggcaaacccctcttctaattctctcagagtcctccatagttctttctgctccttttttctcatgaccacaatgcttgcagctagctctgtagtgaacagcaaccttccttgctcatcaaggatatcctcctgctcagacttcacatctggctactcctggcgtcctatagaggctgcaaaactctgccggacacgagctgtgcgctcgctgcagataacctgtactgccacaaagcctgcaaagtcaccagctgaagaagaatggaagatcaagaggcaagtgctagtagaaaagcgggtccgtagtgttgatgtgaaggaagcactgcgtcttcagaaggaaaacaattttgcaattcttgatgtcaggccagtagcggactttaaagaggctcatccacctggtgccgttaatgtgcaaatatatagattgataaaggaatggacagcatgggatattgcaagacgggcagcatttgcattctttggcatattttctggaacagaagagaatcctgagttcatacaaagtgttgatgagaaacttggtaaagatgcaaagattattgtggcatgttcgacaggaggaacattgaaaccaacacagaactttcctgatgggaagcaatcgaggtccctgatagcagcttacttgttggtcctgaatggttacaagaatgtgttccatctggatggaggactctacacatggttcaaggaaggcctaccggctgttgaaggagaagaataagcaattaggacatattacttgtaattagtgcatcagtattcatgaacatggaggtgtgatgagttgtaacgaggcatcttctcggataaatagtgcactagtttgatcctttcttcttcctttcccaaaaggatatgcctccttggacctcctgcctatatgaagatgtgttagatttctcatgacctgctgctgtcgacttgtcggtgtatgatacttgagcatgcccatttgacaaaatagataagtatgttagagc

SEQ ID NO: 17030 - DNA, 1584 bp, Oryza sativa
  ref <308>: DATABASE ACCESSION NUMBER: AK067496
  ref <309>: DATABASE ENTRY DATE: 2001-12-06
ccaggatgacctgttctttccttcctcctcttctcgtgggccttcttctctctccccctccccgtggcgctgacgcgacgcgctctcctccggcgaggtctctgactctccagcgctgcgcggcgccgtatcgccggccgcgaactcgaggctgggctgggcgggcgtatcgttcctgctcccggagaagactgttatgatgatttgaactactgcttggtattacaatggagaaccttgaatgcacagttgggaaagatggcttaaattttcagtgcaacctgtgtgattcagatgtagtgcattccatggcagaaatcctgcttcgtggattggcaactgcctcagttgacagcactactggtgatatcttcaagagcccatcttctgtagctgttggaatgaagagcgagctagcagaatatttgattcaggggtccatgacgcttgttcgtgaggctgtcgacggaggcgaggatcactcagaacaattaataaaagcatccaccatgccgacggagttcctctcagacttgatcgatggttttgtagcatcaaaacggaacttgttgagccatgtgtctgggtttttgtctagcgaaacccgcttgaacaaaattaaagacttcatacagaagctggagatggagaacttctgggcaccagatgttagagaggctactgcagggactattcttaagagtatagacatgaaatgcattatccattgccctgagagatttgacacacaagataagctggctgaacacaggaatctgtgtagatttaggatagtaaactgcaaaaatgatggatgtttagcttccttttctgctaatcacattgagaagcatgactctgtctgcccattcaaagtcctaccatgtgagcagttgtgcgagcagcatgttatgcggtgtgagatggacaggcattgtgcatcagtttgccctatgaagcttattaactgccctttttaccaggttggctgtgaatcagcctttccgcagtgtgttcttgataagcattgttcagagcgccttcaaatccatctgatgtatattcttgagctaactacaagacatgatgcttttgttaatgatatgaatcaacgattacacctccttgagaaggcccagtcactgaatgaactctctggggctttagataacagaaccctcactctaacagcaaaggagcaagaagcaaagatcaagaaactcgaacaggatctcaaagtgcaagagacaaagctggagaaacttgaaagcgagtttaagtcagggaaagtgtgaatacatccttcggccatcccggctaaaaagaagtgtgaatgcgtgatgttgtgattatagtgttactgtaaaaaaccagggcgtcatactttagtagctgtaaataataattagcacctccttacagtttaccatacttctgtgtgttgttcatgtacgataagaaaataaggtttagaaaagtcagcttctcttgaattcttttgttagtttgaagtaacagtgtttgatcttttctgtatcatgcagtaagtacatatatattgtggagatgaagttcatttggatc

SEQ ID NO: 17031 - DNA, 940 bp, Oryza sativa
  ref <308>: DATABASE ACCESSION NUMBER: AK099002
  ref <309>: DATABASE ENTRY DATE: 2002-08-28
gagtccaaggagcagagcagccttcctcttcctctcttctccgatcggaagcaggcgcggcggcggtagcggaagcggcagtcgccgtaggagcggatcgcgatgggagcggagtgcaagtacgaggtggcgcaggtggcgtacgtcaagctcgcgctgcacgccctcaagcaccccgccgccgccgtcaacggcctcctcgtcggccgcctcctcgacggggccgcctcccccgccgccgtcgtctccatcgccgacgccgtgccgctctcccaccacccgcaccacctcccgctgctccccaccctcgagctcgcgctcacgctcgtcgaggaccacttcgccgcgcagggcctcgcggtcgtcggctactaccacgccaacgcgcgccgcgacgacgccgacctcccgcccgtcgccaagcgcgtcggggaccacgtcttccgcaacttcccccgcgccgccgtactcctgcttgataacaagaagctggaggaggcagtcaaggggaagagtcgcgagccagtcgttcagctatacactagggattcatcaaaaagctggcgtcaggctggatcagatggaagtagtcagctgactttaaaagaaccatcaaccaatatggtcttagccgatcatgttacaacgaagaaatggcagcaagttgttgatttcgatgaccacctcgatgatattagcaaagattggttgaacccagggctacttgcttgaaataattatgtgctttgatatttttatacttgttggtaccaatatgttgaggctcgtctcaccagattattgcggttctctctatagctagacgagttatttgacagggtttgtacttaaatatggacaagtaatttttgtaacaaactgtagcatgtgaaaatgcttagatctgcattaagattactggcgttcatgccatttcttc

SEQ ID NO: 17032 - DNA, 738 bp, Oryza sativa
  ref <308>: DATABASE ACCESSION NUMBER: AK067497
  ref <309>: DATABASE ENTRY DATE: 2001-12-06
gaggcacgcagcacaacactgagcgcttgatctgatcgagctagctatagcagcagcctcggtagctctcgtacgctagtatagctagctagctcgctagctccggtagaaatggcaaagtcgtcgtcgtcgtcgatcaggagccttctcctcgccgccgccctcctcgtcgccgtcggcatctcgccgcacgccgcggaggctagtagtggcggcgccgtcatgggcctcgtcaccggcgtagtcccgtgcagcgccgggagctccatcaacgcggcgtccgttccgggattccccaacgccgccgtgcagctggagtgcgggggcagggcggtggccggcgcgacggcggacggcagcggcgcgttcgccatcaacctggggaagctcaccgcggcgacgctcacgccgctgctcaacgacaggtgccgcgtggtcgtcaccaccccgctggccgcgtgcgacgcatcgctcgccggcgtcgccgggacgctggcggcgccggtgcagctcctcggcgacggcggcgccggtggcggcggcgccctcggcggcctgggcggcctcatcggcggcatcaccggcatcatcgggcagatcatcagtggcgtcctcggcaacatcattagcatcgtcccatcggccttctccgtcgtctagatcaacatctgtggcagtttaagcacaaattaacggatttgctagtccccaaattaatcgatacgtggcagtataatt

SEQ ID NO: 17033 - DNA, 2159 bp, Oryza sativa
  ref <308>: DATABASE ACCESSION NUMBER: AK067498
  ref <309>: DATABASE ENTRY DATE: 2001-12-06
gtatggccaccgcttctcattcaccttcctcctctcctcccccttaatctcatctttttcttctcggtgcttctctgctcaaacctgtactttgcttctgccactccatgtctcaatcttcccctttcttctccgttgcccgagcacatgctggagcaggagggcgagctgcggctgccgctctcctgctccgtcaccctgttgctcagctgccacctcggattcatggcctgaggtactacccttcagccattgtgtcacctgccaagacactgaactcacacctgagccttccccatgccacaatatcctcctttgccaatgctgataatggctccagcgggcaagcagatgccacagagtctgaggaggagcagaacggggaatctgaactgtcggagatggccaaggcattccatatatcgccccggatggcaatgtcaatctcagtggtgattgcatttgcagcgctcactgtgccactggcgatgcagtcagtggtcttccatgggacgaacaaaatgaaggcactggcatatctgacactgctttcagggttctacatggcatggaacattggggcaaatgatgtggccaatgccatggggacgtcagtagggtctggtgctttgacactccggcaagcagtgcttactgcggcggtgctagagttctctggtgcattccttatgggcacccatgtcaccagcaccatgcagaagggcatcctagtcgcatctgtcttccaaggaaaggactctctgctcttcgctggattgttgtcatccctcgctgctgctggaacatggttgcaggttgcttcctcctacggctggcctgtttcaactacacattgtattgtcggggccatggttggttttgggatagtatttggaggcgtaaatgcagtgttctggagctccttggcaagagtatcttcatcatgggtcatttcaccattgatgggtgctgcagtctcatttattgtttacaagggtatacgaaggttcgtatatagtgcaccaaatccaggtcaggctgcagctgctgctgcaccaattgcagtttttactggtgttactgcaatatcatttgccgcttttcctctcagcaagactttttcaatcgctatcctgcaagcattagcatgtggcgcaataggagccgtaatcgttaacagagtgatccaaaaacagcttggtgacctactgtcctcagaagcagaaaagatagcatctgctgataaggcaaatgctcagcaagttggatttctttcggacatagctggaccaacaggagctcaattgcagattgtatatggtgtatttggatacatgcaggtcttgtcagcatgcttcatgtcatttgctcatggaggcaatgatgtctccaatgccataggccccctggcggcagctttgtccattcttcaaggtgtagcaagcagtgctgagatagtcatacctactgaagtccttgcttggggaggttttggaattgttgcagggcttacaatgtggggttacagggtcatagcaacaattggcaagaaaatcaccgaactaacaccaactagaggttttgcagcagagtttgcagcagcttctgtagtattgtttgcatcaaaacttggattgccaatatctgctacacatacacttgttggtgcagtgatgggagtgggatttgcaagagggctcaatagggtcagagcagagacagtgcgtgaaattgtggcctcctggttagtcacaattccagttggtgctgtgttatctatcttctacacattgctcttcacaaagattctggcatactttatgtgagtgattgtgaaatgtaattagtgttttgagaggtgtacagcccatttgcacttcataaaaatttccgcaatggcaaagagataggctgactccaaaaagtttcgaccataaaatttttcaggattggccagagtaaataatcatttctttggcaacaaaacacatgattaggtaaaaagcttttacagccagttacaatgttacatactccagcttgttcgtccgtttatctctaatgtactgccttgtatcttttgttttatatcacaaggtggaccataataatttcttgtagagatacaattatacataatagacaacaatggttcttct

SEQ ID NO: 17034 - DNA, 2350 bp, Oryza sativa
  ref <308>: DATABASE ACCESSION NUMBER: AK067499
  ref <309>: DATABASE ENTRY DATE: 2001-12-06
gtggggcaggagctgattcatgtcgaagattatgagcaaagtgagaaaacagagctgaagattaatggtcaggagaatggagaaaatcgtgccgggaaggagcaatttgattgtaatgtacctgtcaagcaagaaattcgaaccgaccagccggaagcaaatggagtaggaaaacatcaatatcatatggacgataaggaaaacaagggtttagataaggaaggaaagaatggcaaaccagggaagcacagtgcaggaaagaaaattaggcgtgctgacgccaagaagcaaaagcattccgctatggagccagtgcatcatgctgaggaaaatcgtcatgagcgttacacggagaccagtgtccatgtcaaggaagcaatgaaggatctgaagctggtctttgggcaggacattagatgtgctcaaatgccagctaactgcaatctgtcacaattgagagacatagttcaaaacaagtttccatcgttgaaagcgttgcttattaaatataaggacaaggaaggtgacttggtgacgatcacttcatcggatgagcttagatgggcctacagcttggcagatctggaagggccaattcgactgtacattgtagcggttgatcctgcacaagagctaggtgtggatgtggtcaggagacgctcttcatttgcctcattagagaaagcttattatagcatgtcggagaatgggagcagtaggcatgatgatgatcacaactgctctattgatgactggatgatacaatttgctcggctattcaagaaccatcttggttttgattccgactcgtatttggatctccacgaccttggcatgagattgtactatgaagctatggaagacactgttgcaagtgaagaagcacaggaaatatttcaagttgcagagctaaaattccaggaaatggcagcattggctctgttcaactggggcaatgttcacatggcttctgcgagaaaaaggcctcccttgtcagacgatgcttcaatggaatgtatacttgagcaggttaaggttgcttatgaatgggcttgtgcggaatatgccaaagcgggcgcgaagtatggagaagctgtgaaaacaaaaccagatttttttgaaggtcttattgcacttgggcagcagcagtttgagcaggccaagctctgttggtattatgctcttgcatgtaagatagacatgggaactgaggttttgggattatttaaccatgcagaggataatatggaaaagggaatggggatgtgggaggaaatggaaaatacacgcttgagggggctctcaaaaccaagtaaggagaagatcatatttgagaagatgggcatagatgggtacatgaaggatatgtcttccgatgaagcatttgaacaggcttctagtatccgatcgcatgtaaatattttgtggggcaccattctttatgaacgttctgtagtggaatttatcttgggacttcctagttgggaggagtctctaacggttgctatagaaaaatttaagactggaggtgcttctcccgcagacatcaatgtgatggtaaaaaaccattctgctaatgaaactactcaagaaggactgagttttaaggttgaagaaatagttcaagcatggaatgaaatgtatgatgcaaagaagtggagaaatggagtgccatctttccgacttgagccaatattccgacgtagagctccaaagttgcatcatatgctggagcatatacactatgcttgaccctctaatatatataagaggctctggtttgtcatcatggagaagttatttcatgattttatcaggtttgtttattctgggagctgtactgcacttactcgtcccgccaaaagaaaaaaatataagaaaaagaggaaaagaaaaggaaatattctcttcaacttcaagctacagattggttgagagtagtgtgtaggggtttcctcaactgaaaagacaaaaagaaagtgctaacaatgtggcttgcgtttgctgttatatttggtgcttcacgcaaccttctgcttgatgctatatttcctttcaagagatactgtggatattttgatgttgcacttcctcatatttcagtcatggaagtgcttcaagttgttaggtcatcataggaaatttctgaggatacactaattgtatttcacttgtgtagaagatcaccccagctgtgttttacacttttactccaggtcacacatgaagaaagctgaatacagttcgtgtaacatgtagctgaagtagcaggcacagaatgcttgtagtctaattgtgtgaaacagatgcttttattgaagaagttatcagatactagtgattgttggcc

SEQ ID NO: 17035 - DNA, 3286 bp, Oryza sativa
  ref <308>: DATABASE ACCESSION NUMBER: AK067500
  ref <309>: DATABASE ENTRY DATE: 2001-12-06
gatccttcctctctttcctcctcctcctcgcgcagccgcgctcagatccaaagccgcgcgcgggggagggagggaggaatcgcggtgccaagaaacgaagccctagccccccctagatgcgcgccgccgcttgctgctgctgctgctgctagggttcttgtacggagatgcggggcgtcgagtcggatggcggcggcggcgcgcctttctcctcctcctcctccgcggccgccccagataatttcgatgccgcgcagtaccccttcttcgggaaggagccactggaggggctcgagctcagttgcttggaggatggcggcggcggcggtggtgatgccaatggcggtggattcagtggaggagcagaagaagggctgtaccggctctcctctgttggagaagagattgataatctgagtaacttgtccgatattgatgatcttgcgagcacttttgcaaagttgaaccgaaccattagtggaacacggaatcctggtgttattggtgacagacgatccatctcaagaggaagttctctaactgttgattgggctgaagatgtagaatttcctaactgggtagatcaagacattttagaggatgaggaatttcaggaaagtaaaagatggtggtcacagtcacacactctggtgcagcaaggggatgccaaaccattgagccgaacatcttcctatcctcagcaaccactgcagcaccgggcaagtgaacctatcattccaccaaaatctccttcatttacgtcctttccaccgccaggtggtagatcaccttatacttctcaaggccttacacgccatgggtgcattccatcacttggtgctggcctgcaaatgggttctccaagcatgtcccttccaagttctccatatcatatagctggactatctcatggactaccgtatggagggagcatgtccttcggcacttcaaatctgcctgtaaacaatccaatgcaaaatgattggccaagccaagccaatctttatgctggggagcaatttaatctactgccgaacatgttacagaaacaaatatcacttccaaatagcccgatgtcatcactgttattttctcaacagcagcagagattggcacaagttcaagtccaaccatcccatcagaattacctaaatttaccacctcacatattttaccaacatcactccccagaattaacaggaagatttgattctgttagcagtgttccttcatcaagagacaagagatcaaggtcaggaagaggaaaacacaacatacgtttttctcaaccattgcctgatactggtaatcaaaatggtgatagtggaggaataaaattcagatctaagtacatgtcatctgaagagatcgaatctatcttaagaatgcaacattcagcaagtcacagcagtgatccttatgtggttgattattaccaccaagcttgcatcgcgaaaaggggcgccaattctaggccaaaggccaattttgccccaacgtcaatgaaagacttgccttccaagtcccgatccagtggtgaccatcatgcatatcttcaggttgatgctgtaggaagagtttccttctcttccatacgtaggcctcgttctcttcttgaagttgaccttccttcatcaagtgatggttctcatgatcagaagtcttctctgagaccattggagaaagaaccaatgctggccgctagagtcactgttgaagatgccctctgccttcttcttgaggtggatgatattgaccgtctgttgcagtctagtcaggcacaggataacagtttccaactgaggcgaagacggcaggtcctccttgaaggtttagctgcatcacttcagcttgttgaccctctcgggccgagcacatcaagccattcatctggattggctgctaaggatgatcttgtttttcttcgcattgtttctcttcctaaaggacgcaagtttttgtcacgttaccttcgacttcttacccctggaagtgagttgacccgtatagtatgcatggctatttttcgacatctgaggtacttgttcgggggtttaccatcagattctagtgcagcagaaacaacagttactcttgcaaagactctttcatcttgtgtgcgccatatggaactaggtgctcttagtgcttgccttgctgctgtggtctgttcacctgagcagccacctctgcgtcctctagctagctctgctggtgatggggcttctcttattattaaatcagtactggatcgagcaactgagttactgactgaccagcatgccgcagccagctatacagtgtcaaaccggactctctggcaggcatcatttgatgctttctttggacttctgacaaaatactgtctcagcaagtatgaaagtattaggcagatgtttaccatgcagtcaccaggctctgtaattggatctgaggtctccaaagcaaccagcagggagatgccggttgagttgctacgtgcaagcctccctcatacaaatgatcagcaacgccagctgctgcttgattttgctcagcgaaccatgccagtgactggttttaatgccagcggtgcaaatggtgggcacatcacctccgagtctgttcctggttgatttagctcaagatgccaaaaagtgtagattgtcaatgcttaaaggacttaaatgtgcttgtctttggatgataattcttttatatctggagacatgcataaccccttcataaggtaaggttgtgtgagcttggagaaagttccatttgctcaggaaaaaatagccttcagattgtgactttaggcttcagattaatctcatagaccaacaatctcctttctgtgggtcatttatatagcacccacctgatatgcatatgtacatgcactgttgtaacactatgcagggatgaactagccgtctcgttggggcgaattttagcttttaacataacattcatatgctcccagtgaagaagacatccaagactagtgggtttagcagcagtggttgtacaggctctggtactttgaggccttcctgtctgtctttttactagtgtggaaggttcctagcgtcaagtgcgtagtagtctggtcttatcatgttttaattaggatcaaaagtgtgttggggataatgaagtggtgatgtttgttaggtttctggaaagatatttaaaatgtcatggagatggccagtgtttccaggtacctactgacactatagtgaggatactggaaactggggctatattatctcttatttatacatggttacaatttgttgtc

SEQ ID NO: 17036 - DNA, 1438 bp, Oryza sativa
  ref <308>: DATABASE ACCESSION NUMBER: AK067501
  ref <309>: DATABASE ENTRY DATE: 2001-12-06
gctcccacgaacaaaaccaccggtacaccgccccggcgcggcgcgcggagacgtgtcccgatccaactcacgaattggggagcacacaacaaaattccgatccaaccctaagcccgatccgccctagcacgatcccctcccccctccccgtctccgatccccctcctccacctcagatctccggcgagccgatcgaatcggcggctgcggcggcggcggcggcgcgatgtcggggcagacgcagcgcctgaacgtggtgccgacggtgacgatgctcggggtcatgaaggcccggctcgtcggcgccacccgcggccacgcgctcctcaagaagaagtcggacgcgctcaccgtgcagttccgcgccatcctcaagaagatcgtcgccgccaaggagtccatgggggaggccatgagggcgtcctccttctccctcgccgaggccaagtacgtcgccggcgacggcgtccgccacgtcgtcctccagtccgtccgctccgcctccctccgcgtccgctcccaccaggagaacgtcgccggtgtcaagctccccaagttcacccacttcgtcgaccccgccgccggctccgctgggccatccaacgcgtcccccagcctcaccggcctcgcccgcggcgggcagcaggtcgccgcctgccgcgccgcgcacgtcaaggccatcgaggtgctcgtcgagctcgcctcgctgcagacgtccttcctgaccctcgatgaggccatcaagaccaccaaccgccgtgtcaacgcgctggagaacgtcgtgaagccgaggctggagaacaccatcagctacatcaagggggagctggacgagctcgagcgtgaggacttcttcaggctcaagaagatccagggttacaagaagagggagatcgagaggcagatggctgcagccaagcaattcgcagaggaacagcttgcggaggaggttgccctcaagaggggtatctctgtgggtgctgccaccaacatgttggttgccggtggagagagggacgaagacatcatcttctgatcatcttcggtcatacagtgattcaatcgtggtggaaataataagttgtgatgctggagctccagaatcgcacctgtttatagagtggcggaggttttgtttcaggcggtagtctggactctgttcatccaaaagaccacaaataatttgtacttggaaccaaccaacggatggattgtttatgtgcagttttcgtagttaattcaattgggctgtatttctttgccatgttcgttttagctatatatttgtttggaaaggtgttcgttgattggggtttcgcaaactgaagctgcagactcgaagtgtatttcgatctggttgagtaattctgtactctgtactgtagcagcacacttttcgttctgaattgtcgtggatgggaaaagaataattaagctc

SEQ ID NO: 17037 - DNA, 3413 bp, Oryza sativa
  ref <308>: DATABASE ACCESSION NUMBER: AK067502
  ref <309>: DATABASE ENTRY DATE: 2001-12-06
ggctaacctctcccttcgcgcgcaactccttaaaccctagccgccgccgccgccgccgtcgtcgccgtcgccgtcgccgccgccgcgcgccatggcgaccctcaagcgtaaggccgattccgcggccgccgagctcgcgtcccctcctcccaaggccccgcggggctcggaagcactcgctgaatcgccttccctcgccggcgggggcagcgagcccgtcgcctgcgtgcacgacgtctcctacccggaaggctatgacccgtccgcccccgccacccacctgctcaacggcgtcggcggcgccgagggtgctgggcctgccaagaccttcccgttccagctcgaccccttccaggccgaggccatccgatgcctcgacaacggagaatccgtcatggtctcagctcacacatcagctggaaagacagtggttgcattgtatgcaatagcaatgtctttgcgtaatcagcaacgtgtcatctatacatctccaatcaaggctttgagtaaccaaaagtacagggaattcaaagaagagttctctgatgtcggcctcatgactggggatgttactattgagccaaatgcatcttgtttggtcatgaccacggaaatttggcgtagcatgcagtataaaggatcagaagtcatgagggaagtcgcttggattatatttgatgaagtacactacatgcgtgatagagagagaggagtggtgtgggaggaaagtatagtgatggctcctaagaactcacgttttgtgttcctctcagctaccgtgcctaatgccaaggagtttgctgactgggtggctaagagagtgctttatttctcaggtacataagcaaccttgtcatatagtatacactgactaccggcctacacctctccaacactatgtatttccttctggaggtgatggtttatatctggtagttgatgagaagagcaagttcagagaggatagttttcagaaaggtttgaatgcgcttgtccctgctagtgagaatgacaaaaagagggaaaatgggaagtggcagaaaggtctcttgacaggaaaacctagtgaggacagcgacatattcaagatggtgaagatgataattcagcgtcaatatgacccagtgatacttttcagctttagcaaaagggagtgtgaatttcttgctatgcagatggctaagatggacttgaatgatgatgatgagaaggcaaacattgaaacaattttttggagtgctatggatttgctttcagatgatgataagaagcttccccaggtttcaaacatgcttcccttgttgaaacgtggcattggtgtacatcattctggtcttttgcccattttgaaggaagtgattgagatactcttccaagagggccttatcaagtgcttgtttgccacagaaacattcagtattggtttgaacatgcctgcaaagactgttgtgtttaccaatgtgcgaaaatttgacggtgatcgattcagatggttgtcaagtggagaatacatccagatgagtggccgtgctggtcgccgaggtattgatcagcgtggtatctgtatattgatggtagatgagaaaatggaaccttcaactgccaaaatgattctgaaaggaagtgctgatagtttgaacagtgcctttcatttgagctacaatatgttgttaaatcaaatacgctgtgaagatggtgatcctgaaaagcttcttcggcactcattttaccaatttcaagctgatcgagttctccctgatcttgagaagcaagtcaaggagctggaactagagagaaattccatgattattgaggaggaggagaacctaaagagttattatgatctcttgcagcagtacaaaaatctaaagaaggatgtccgcgatattgttcattctcctaaatatgttctacctttcttgcaaccaggaaggcttgctcgcgttcagtacagtactgatgagcaatccaccttctctattgatgaaaacatcacttggggagttacaataaactttgaaaaggtgaaaacccatagtgaagataggaggcctgaggattccgattacacagttgatgttctcacaagatgttctgtaagcaaggacaaaagtggaaagaagacaatgaagattattcctctgaaagaccgtggagaaccagttgtgatttccttgccactttctcagattgatggactaagcagcattcggatgcacataccaaaggatcttttgcctgtagaagctcgagaaaacacattgaggaaagttgatgaagttatttccaggtttgctaaagatgggatccctttattggatccagaagaggatatgaaagtacaatcaagctctttccggaaagcttccagaagaatagaagctcttgaaagtttatttgagaagcacgatgtccacaattctccacatattaaacaaaagctaaaagtgttgcatgctaagcaagaattatcaaccaaaataaaggccattaaaagaacaatgcggtcttccactgctttagccttcaaggatgagctcaaggcccgaaaacgggttcttcgtagactgggatatattacaagtgaggatgttgtggaagtgaagggcaaagtagcatgcgagataagttctgctgatgagctaacattgacagagcttatgtttagcggcactctgaaggatgctacagtagaacagatggtagcgctgctttcttgctttgtttggcaggaaaagcttcaggatgccccaaagccaagggaggagctcgacttgctgttcttccagttgcaggagacagctagaagggttgctaaccttcagcttgactgcaagatccaaattgacgtggagagttttgtgaactctttccggcctgatataatggaagcggtgtattcatgggccaaaggatccaaattctatcaaatcatggagatgacccaagtatttgagggcagcttgatcagggccatcagaaggcttgaggaggtcctgcaacagctaattctggcatcgaaatccatcggtgaaacccaattggaagcaaaacttgaggaggctgtcagtaagatcaagagggatagtgtttgcagcatctttatacctgtaaaatagcttgatggtctcctgagcatgtgaaggctatcaaagtcactctttctgttgagctgcctgattactgttgaaggggagcaggtccttggcagagaaattttgttgttactaccccagtaggcgctaactaaattaattggaattttctaaaggaatccagatatgtacccattttttcatgtgtacaaattacagatgtattggaaccttgtttatcatttgaaaatctaggtttgaggtaaacggtgtaatttgacgctatgtttctccttcaatctatcatgggttggtacg

SEQ ID NO: 17038 - DNA, 1855 bp, Oryza sativa
  ref <308>: DATABASE ACCESSION NUMBER: AK067503
  ref <309>: DATABASE ENTRY DATE: 2001-12-06
gagtccctcttttttcggatcggcgaacctcgggggtacggcggcggtttgtgggtggcagcgacggcgggaggagagcggcgggcggcgggcggcggcggctgtggctcgtgctcggggatggatgcggcgacggtctcggcggggctgtcccccgctcgaatccggcgatgacggtcgtcctccgcccggatccattggcggcgggcgtccctcgcctggcccctcacggatccaccggcggcgagcgtccctcgcctggccccgcacggatccaccggcggcggggggaggagagtagcgtcctgaatcgattctcgtcggcggcggtggcgcccgctggatttgtcgtgaggatgacggtggggtcgttgccgtcattcctcccccaacgtcgactacacatccgggaggcgggcgatgcatccaggctgcgaggtgagacgcccgggccgtcctccgtgcgcggcgctcgctgatggccgtcgtcctttgcgccgtcggccgacctcatccccaccattttcgtcagggtcggcggtaggtggaccaggagcacacggctccagccatggcgccgcctcccacgccggtcatcctcatctgctgcttcttccacaatagatccaccgtccccctacgccgtcgccgcggatcaacacctgggaggttccatggccacagatcgtggtcgggaccggcagcagcggacttcaccggtgcgggcgtcgaggagagccacctcagcttcttccagcgctggtggtcgtcctccccaacggccttcatcttctcgccgtgagagccaggcggcgagtcgggatggcggtggcggggccatcttctctgcctccccgcgccggtggatgaggaacaggaggggatggggctggcacgtcgtccggcggcggcgcctgcggtgatccggtccctgctcccccgcctgctgttgctgctgctgctttcctctcttcttgctctggtttttctcctctcatggcggttgctctgtctagagattactcctcctttgaaatccttttcagttttggttggattaattggagttcgctttgctgcgcgattgcaattgttcttgattgatttgtttgactcataatagtccaaggcgctgtccttgttgctcttcgcatactgattcctggttaagaatggtctccgctttgtgcacttgttcttctatctccacgaagaaaattggctttctcaaaaacctgcaaaactggaaacaagaattgcctatgattagtatgttgctcgcaaacggaatagatcgaatcaacgcagttgatggatacagtacatactccttgcttgtctctggctttgccttctactgattggtacagatgagcctgggaagcaagtccggagtgctgtcaagatcaagaacatcagcaagtctcatatagcatttaaggttctctcatatgttggcgggttccagggtggagaaggttggatcctcggtggagcaggccaatgcgaccaactccgccatggatgtagctggcagtgggattttgacgtcgaccgtgagtcttcggcaccggcgctggtggtggtattacgcgagttgggatgtacccccttcatctcaatatgtcgcaacctcctctatattcgtagttttaggattgatctaatctgatcctagggtgcaacatatggcgacggagggagtagtcattggttgcaattttcttgttttttttatcaagatgaatatgtgtatgtctatttcccatctgtaatttttattggtctcgaaccagcctaatattgtattcatgctgtgtaggatatataatttgaaaaaaaatactcttctcgt

SEQ ID NO: 17039 - DNA, 957 bp, Oryza sativa
  ref <308>: DATABASE ACCESSION NUMBER: AK067504
  ref <309>: DATABASE ENTRY DATE: 2001-12-06
gtgttcctacccccaccagcaagcagcagctgaggtgaggtccgtggcgttggagtgaggactgaggaggaagaagagggcgggatctagggtaccggatgcgctggctgtgctgagtgagagtagagatgagcgcgtctcggttcatcaagtgcgtcaccgtgggggacggcgccgtgggcaagacctgcatgctcatctcctacacctccaacaccttccccacggactatgttccaactgtttttgataacttcagtgcaaatgttgtggtcgatgggagcactgtgaacttggggttgtgggatacagcaggacaagaggactacaataggctacgcccgttgagctatcgtggcgctgatgttttcctgctggccttttctctgatcagcaaagcaagctatgagaatgtttctaaaaagtggatacctgaattaaggcattatgctcctggtgtgccaataattctcgttggaacaaagcttgatctgcgggatgataagcaatttttcgtagatcaccctggtgctgtacctatttccactgctcagggcgaagagctgaggaaactcattggtgcagcggcatacattgaatgcagttcaaaaacacagcaaaacatcaaggcagttttcgatgctgcgattaaggtggttctccagcctccaaagcaaaagaagaagaagaaaaaggcgcagaaaggatgtgccatcttgtaattaaatggtagacagtgcagtgcagatcgatgtatcccttcatttgtagcctctggcttcaatcgtcgcttgtttgtataattacgctagatgccaccggcagaagatataatatagtcctcctgcctttgtggtgttggtctctaaggtcgtccagactccagagtccagacgcatttggtttcttttgttctatctataatcaatctatctatatctgctagtgttgtgctcc

SEQ ID NO: 17040 - DNA, 2164 bp, Oryza sativa
  ref <308>: DATABASE ACCESSION NUMBER: AK067505
  ref <309>: DATABASE ENTRY DATE: 2001-12-06
gacccatcgataaaagccgccccaaaacgggcaacacctcgacggcgccatcgccaccatcacccacctcctctcctcaccttcccttccccgcgagctccaacgcccacaaaccctcaccctcccgcaaaaaccctaatcccacctcctcctcctccccccatggcggccaaggcggcggcgctctcctcctccccgttcgtctcctcccgccgcctctcctcccccgcggcgtctctccgcgcccgcacgccgaggtgcgtgatggggagcgagcaggtgagggtggtggtggaggaggaagggaagacgaagaagaggatgggggtggcggagccgaggagcgcgccccccgcggtgtggacgccgcgggcgcccgcgcaggaggcgaggctcgccgcgctgcgcaccgatgggcgggattccaggttgaagatcttctccggcacggccaatcgccccctcgcgcaggaaattgcttcttacttgggtgtagacctgggtaaggtcctcatcaagcgttttgccgatggggaaatctacgtgcagctgcaggagagtgtgaggggttgcgatgtgttcttggtgcagcccacctgctcccctgttaatgaaaaccttatggagctttttgtcatgatcgacgcatgtcggcgggcgtcggcgaggtctattactgttgtcattccatactttgggtatgccagagctgacagaaaggctcaaggacgtgaggccattactgccaaactttctgctaatttacttacagaagctgggagtgatcgtgtaattgtatgtgatattcattccactcaagcattgggatacttcgatattcctgtggatcatatacatggacagcctgtgattctggattaccttgccagtaagacaatatctaaggatcttgtggtggtttctcctgatgtgggtggtgttgtcagagcacgtgcatttgctaagaaattatctgatgcccctttagctatcgttgataagagaagacagggtcacaacatgtcagaggtcatgcacttaattggtgatgtgaagggtaaggtcgccatcatggttgatgatatgatagacacagcaggaacaattactagtgcagctgctttgttaaaacaggagggagcagaggctgtctatgcttgtagcacacatgctgtcttcaggtttggcagttggtttattgtaacatccatgatccatgtaatagtattgattcattggcttgttgcgaaggaaccatgttatggcatgattaggcagattggctttatgtttgatcaatataaaaatgacagggtagagcaataattttactagattccacttgagcacaccaatcacttagtgctagtaagtgggagtctggaaaagaggttggctttaatctagttgagtgcggatctggttcttgttgactctatttcattagtagtcatgaatctgtgccacacatatcagcatatgtttttctggctattttgatttaggaagggacctcaagtcctcaattgaagtcttgaattttattagcatcaacatgcatgatgtctttttacatggtaccgcacagtaatttgacttcaaaataatagcaggatgtgttgccacttacttcatttgcaaaaattgttgtccttttgtattcctgcactattttgtaggcataaaagtaagtcgtttaccacacctactttttcccactagcactgtctttgcagccctcctgcgattgaaaggctctctggaggcatctttgaggaagttattgtgacaaactccattctgctgccagagcacaaatgcttcccccagttgacagtgctctcaatggcgaaccttgtggcagaaacaatctggcatgttcatcgcgatggctctgtgagcagcatatttcaatagcggcggatgctatggctaccgcgatgccacatttgtgtggtgtggagaaggcacctgatggttgtgcccatctgcgtaggaatcaattttggtgacaagactaaataaggatatccattgtatcaagtataagagaatcagtctcgtgcagttctttcatcctttagcaactgttgagggacaaggaaaagatttgtgctgttcactgatatattggaagtaatgcaaatgatgcttagctctgacg

SEQ ID NO: 17041 - DNA, 2478 bp, Oryza sativa
  ref <308>: DATABASE ACCESSION NUMBER: AK067506
  ref <309>: DATABASE ENTRY DATE: 2001-12-06
gactttccttcccagctgcgctaagcaatccccacccaccaccgctgcagctgcagttgcttcctctcctcccctctcttctcgccgtcggtggggtcctcctccaccctgtctctctcctcccccccagatccacccctcccccttcccgaaccttctggaaccatctggaggaggaagcaaccgcccaagctgtagcggcagcggcggccggcgggggaggagcgatggagacccttgcgcagcgcgcggcgttgctgcgggagtcgctgcagaagagccagtccgtgaccgacgccgtcgtctccatcctcggctccttcgacagccgcctctccgcgctcgacgccgccatgcgccccatccaggtgaggacgcacgccgtgcggacggcccacgagaacatcgaccggacgctgcgctccgccgatgtcatcctcacgcagttcgatcgaactcgagaggcagagcgtgaaatacagaaggggccacatgaaaatcttcaaggttttctagatgcagttgatcggttgagaagtattgagcgtttctttagctcaaataggagctaccgaagcagtgatggtgtgctcaaccatgtgaatgccctcctttctaaggcccttgtgaagatggaagatgaattccagaagcaattgactcagcgcagcaaacctatcgagcctgatcgtctttttgattgccttccaagtacgcttcgaccatcatctgaatctcatcctgaaggtggaaaaaaccaatcacattctgaaaatcagcaaaactcggaagcagctgtatacagcccccctgctcttattgagccaaggttcattccttttctggctaaattagcacaacagttggtacaagcgggatgccaacaacaatgctcagaaatatacagcgaagcccgtgcctctgctttagagtcaagtttgaagagcttgggtgttgaaaaactgagcaaagatgaagtgcagaaaatgccatgggaaattttggagtctaaaatagggaattggattcacttcatgcgaattgctgttaaacttctttttgccgcggaacgtcagctttgtgaccaggtttttgagtgcagtcaatctttgagggataagtgctttgctcaaataactaggaatagtttggctacactactcagctttggagaggcaattgctatgagtaaaagatcaccagagaagctgtttgtgctgctagacatgtatgaaataatgtgtgaacttcaagcagatattgacaccatctttgttggagaatcatgctctcaaatgcgtgagtctgcattgagtttgacaaaatgcttagcacaaactgcacagaagactttcagtgactttgaagaagctgttgaaaaggacgcaacaaagaatattcatattgatgggacagtgcatcctttgacgagctacgtgattaactatgtcaaatttttatttgactaccagtcaactctaaaacagctcttccaggagttcaaaagggaagatggaacaggttctgagttggccactgtaaccatgagtatcatgcaggctttacagaataatctggatgcaaaagcaaaacaatacaaggatccagctttgatgcacatatttttgatgaataacattcattatatcgtgaaatctgtccgcagatcagaagccaaagatttattgggggatgactggattcaaaggcatcgaagaattgtacaacaaaatgcaaatcattatagaaggattgcttggtcaaaggtcttgcaatgcctctctggtcaaggtttgacttcatcaggaggtagtggtcaagtaggaagtgagggaggcaatagcagtggagcttcaagagctgcggtcaaagagagattcaggtctttcaatgtgctatttgaggagatttatcaaaagcagtgtggctggtctgttccagatacggagttgcgtgagtcactaagacttgcagttgctgaaatcctgttgcctgcatacagatctttcctaaagcgctttgggcctctcatcgagaacagcaaggcacccggaaaatatgtcaagcacacaccagagcaagttgagctactgcttgccaatttgtttgaaggaaaacaagagcgtacttgattggggtatgtggctgcttaatatacaccagcgacgatgtgatgtcattctctgtaaattgggaccctggtagcattgcttttgtttgtgtagcgctgctgctcagaaccgttgctatgtgcacctttccttgctggggtgcatgatttgtatagatactgtcctagttgccatttattgtttttgttgatttggtaggtgctaggttcgttctgatatgttggaaactcgtgttagtgcattcattattcagtatcagcagtgtgcaataattgtccaatgttaatgcaacctctagtgcctccattttgcagttgcgggagtatagtcgcaactgtttcccact

SEQ ID NO: 17042 - DNA, 2436 bp, Oryza sativa
  ref <308>: DATABASE ACCESSION NUMBER: AK067507
  ref <309>: DATABASE ENTRY DATE: 2001-12-06
gcggcaagcgcccccctaccggcatcggcgccgtcgaccgcgaccaccccgccgcgcagcgcccctaccccaccaccaagcgccaccgcagatcgccactgccgccactcgcactcgccccagctctctgcccccgagcggtggcgccccaccaccccgcagccaagcggcgatctgcagcggcgcttggtgctgaggtaatggcgctcggcggatctgaaatgtgggcctaggggtagaaatgcccacaaacctgtaaagaacatataaatggaattaagaaatgagaaatacatgaaaaacagtaaaagtggtatcaaatagataaattagcactcctaataatatattatagagggcatgcaaattgagtggtaaaaaagttgaggcacgcgaatttgatggtaaatactctaaattctcgttgaattctctgcactaaaccctgaaccaaataataacccattcagttgagcatgggaaggggttcgtgtgacggtctcaggacagtcctggtggagactagactagaaggttgttgtttacggttattaagtactaatttcaactgccaagtatcatagcaaataaaggaagaactagcatttcatatacgtatatcaataataaataataaataatgtagttgtactatacttcgagaaagaaacagttaattgtcaaaagaaaatagctagtaaaacaagtgcgccaaaattctaaaaaagaacattaccaatatttgtaatacgagggaacagaacaacagttgagatagaggccggtgggtacaacaaacacatcttccagaagagcaataatgcttttacatcattacctgggcgccgcgtgggaggagatctaatgatcgggatgttgacgaaccgtagctagcttattgtactatatatacgtatagttagtctggatactgtgctatgaagtgaagaggccattgttggggccaaaagatctaccgctctgcatcaataagctgcccccgatgatcgatcgtgagcctgcgggtagtagtaggcacggaagtaatatggatccatccatcaacataccggtcaacagagatgccatcaccgaagaagtcgccgccgcgttcgcggaatccgaggtgatccccgagaggtattgccgacctgatgaggtccatgacggcatcgtcgttggccatgacgatgacgaggcctacgagctgccggtggtggacatggagaagctgcttgacccggagcttgcggaggcagagattgctaagcttggttctgcatgtcaagattggggtttctttcagttagtaaaccatggagtcgacgaacaagtggtgaatgaaatgaaagacagcacggtcaaattcttcagcttgccactagaaagcaaaaggacagtggaaatccaagacaatggctttgaagggtttggccaccattacagaagggcatcaggtaagctggactgggcggagagcgtgatcctccttacgcagccaatccaagagagaaacccggaaatgtggcctacaaacccatcgtcgttcagggatgcacttgacaagtactccgccgagatgacgaagctggctatgaggattgcgagcatcatggctaccgacctcggggtcgaccaggaggctttggttggcgcctttagggataaacagcagagcatggccatacaccactaccctccttgccgccacccagacaaggtgatcggcatcacgccgcactccgatggtctcggcctgacgctgctgctgcagctcgacgacacgcccggcctgcagatcaggaaggatggcaggtggttaccagtgcgacctcgcccgggcaccttcatcatcaatgtcgccgacatactcgaggtccttaccaatggcgcgtacaagagcgtcgagcacagagtactcgcggacgcagagaaaggccgaaccaccatcgtgacatttcatgaagcctatgtcgatggaatggtgaagccgatcccggaggtgctcaagctcaacggagcagaggcacgctacaagtccatagaaagaattgagtatatcaagggaaactttgtggcgctttctgaggggacacgatttctggagagccttaagatatagcttgtgaaagttacgcaggcaactagaagatctctatggaacccaattaatcatggatgctggaaaatactgcgcctcctatatattatccagttcaatgtaatgtggaggaaggattattatcgaaaaatgttaaatgtgtttgttaagaataaaccttgtgtgctgattagtagtagctctatatggttagctgttcatttttaggtgcatgtttgcatgtgtcggcctgattggaggctatgtctgctttccttgtaacagcttattttaagcaatggaatatagtctggaaaagctgtcaattcagcagc

SEQ ID NO: 17043 - DNA, 3009 bp, Oryza sativa
  ref <308>: DATABASE ACCESSION NUMBER: AK067508
  ref <309>: DATABASE ENTRY DATE: 2001-12-06
gattcttcttcttctcatcccaaatctctcctcctcccatcccgccgcgcccgcgagagatcagcagctactcgactcgactcgactcgaatcgaatccgaggggggcggcggcgaggggtggtggtggtcggccatggcgcaccgggtggacaacgagtacgactacctcttcaagatcgtgctcatcggcgactccggcgtcggcaagtccaacatcctctcgcgattcacccgcaacgagttctgcctcgagtccaagtccaccattggcgtcgagttcgccacccgcacgctccaggtcccccttccctcgcgcgatccatcctcttctctcgcgactatggttcagaatagtagtgttggggatttcgcatgtcaccattgcgttcgatgcatttttgtttgattggcctgtcgtgatgtagggtttttctgtttgatatgagatgattacttcgcgtgtactgaacatgaattaagttcagttcaattctgtgaatctgacgaacgaaatggggggaaaaatatctactactattgattaatgatgcacacgttgagctctgactctttttgcatgtaccactcgtttaatagtagtatgtcattttgttgtgcttcatggggcccttggaatgatttgaagaaagtaactttattcttaactgcactggtatcaacataaatcagatccataggtacagagctacagaggtactaagtatcatttatcatgtccttatttaattgattaaggggatattaagaaaaacttgaattacatgttgctaaagtcaatttggtagtcaatgtagaagatggtgagctttatgctgtgctagttgaacttatgttgctaacttatatatggtgcataaatctctactttttctgttggaagttctacaactgctttggcgtatttcactcaactgtctttcaatattggaagtatctctgaaacatgcatttatattgcattgccttctgatttcgtataaatccaaactttgcagtttgtcatccattattttgtttataccttgacttgggtgtatggattatgcgtatcattatttgaacagtatatttcacattgcaccatatattttgaccaaagtttcacaatgggcaaggtccaaaccaaccttttttcacttaacaccatatatctttgcactagttggcactttggactagggttgagcacatcaaaggaagttgtcagagaaaagctagtttaaatcatcaattttagtgccacaatattaggataaatatctttagaaaaagttagcaaatcagaaaataacttttttcagcaaatcacactaaaacaatgacgtgaacatgtttaaaagtggcacaaaatgatctatacattggggcaaatgaataaatagaaaatagaactagttaattaccacacactgaaaagaaggaagaaaacataaaatgttttgccttttataattatccctatgtaaatcatatgaatttctctcatattcccttgttttgctcaccccttgtccaaactgaaaacttatgtaaagatgtatgatgttagtgaaaacattgatttaaccctagtccattatgaaaccttggtcaaaatatgtggcccattgtaaaatttactcttatttcaatagcatgttaaagtataccgttatctttgtaacgtcataaagcttgtattaagttcataacaccggcgtggtaactataattctgcaggaattttttatttgatttgctctgttgctggagcattgctgatgcatttacagagcttctgaagtctgagcagtgtatttatcattattcggtatacttgctcaattcaaactgcttgttaaaaaatgatagcaacttgcactgcatagattgtacaagtggatcctgtccagaaatattttaggagaagggtaacattttggggaggtcggaagggggtatgtaccattactcttttgttttcttttagtgttgtaggcctctgaatgtacctgacggttaacacacactgtttctatagatgagtcttttgattaatttgttgcatttcagagaacttctgaattttgggagctgttttgcctgtataaggctctgatatagtgaacttgtaatagaccttaacaatctaatttcaccatactatagcgacttctttcatggcaaatactcaagttaaatttatccatgatattggtattttggctcaccatattaggtatgttggtctttcttatttagtgtggtatcatgtatacagatagaagggcagaccatcaaagctcagatatgggatactgctgggcaggagaggtaccgtgcaatcacaagtgcttactaccggggagctgtgggggcacttctagtctatgacataacaaagaagcagacgtttgaaaacatccagaggtggcttcgtgaacttcgtgatcatgcggactccaacattgtcattatgatggtaggcaacaaatcagaccttaaccacctgagatcagttccagaggaagatggtcaggcactagcagagaaggaaggtctatcattcctcgagacctcagctctggaagcccttaatgttgagaaggcatttcagactatccttaaagatattcatcaaatcatcagcaagaaggcacttgctgcccaagaggcagcaggcagtggacctcccactcaaggaaccaccatcaatgttactgattctgctgttaacacaaagagaggatgctgttcttcctaggtgcaaccgaagatttggtgatgctgcaaaaggaaattcccatggatcttacagcactaggtgttatgtaggtcgcttgactccttttggcctgtaattctggtggggttgtaatcacaatttaaatcgctagaaagaaatattccttttaaggtagataccatgtgtagttgcaaaattttggtagagactgttgctgggcaagactttctacagtttcatatctatatcatgttttctacc

SEQ ID NO: 17044 - DNA, 2373 bp, Oryza sativa
  ref <308>: DATABASE ACCESSION NUMBER: AK067509
  ref <309>: DATABASE ENTRY DATE: 2001-12-06
tggggcgagtcgaatcgaaaccgaagccagaatctctctagggttcgttcccttctcgcgatcctcccccacctctcacctcccgcgccccagtctccgtccgccggttaatctcgatccctcccccaccgcggatcgcggattgggatactgcggcgaccatgatgtcatcggacgacgaccttgagccgcagctcaaggcggtggagaattactacttcgttgacgacaacgatgtgccggtatccttcgatgtcctgccgttccagttcgatgcggccgagggggtcgcgtcgttcaagaaggatgtgtacctgcgggggttcaccgacggcggcctccagaaagtctacaagcaggtggttgcctggaagctagtcctagatggagactcgcctgagatcgcggtgctttcgacggagggcagttggattgccctgctgaagccgaggcctagctacgaggagaccatccggtctgtactgatcactgtcgaaatgcttcacttcgtccgaaggaggccaacggattccgagaaagacatgtgggatcacctctatggggtttttgagagatttgtggttaggcccttagaagatgactttgctaatcatcagaatttaataaaactctttgctcagagggacccagatttagcaaattcacaggttttgcaagtcttcatcaaagacaagattatggaaaagaccaatgaggttggttcaaataatctggataataaacgagagccagacattaaacaagagccagacattaaacaagagccggttgctgctggtgatgaaatggaggagatagttgaagaaggcattccagatgcaccaagcaatgatgatgatgatgatgaagaagatttggtttatctttttgaggatagagctacacagaatcatgatgtcaataataagaactacacatctggaaacgggaacttcactgctgagaaaccagtacaagcagacgccttccctccagaaaagctagtagaagttgcatacgaggaaatgaaggttgcttctaacagaagcagtatgtatcaatcagatcaaattagtgttcatgatgagagagatgcacattctgacttgccgatgtctcggcacaacagtatgaaagcaaaagaggtttcaaatagctcaagagacagaaggaaatcagataagacaggacatgaagcagattccgatatgagtatcttgccctcagattccaggaattttctacacaaatcaggcaaccttgaacctccaatatcaagtagaagtggatataccttggagaggttgagatatcatgataatcatttcgatcatcttgtaggagagcactcatcatctagccttcagatgccaatctttgaggacagctatttcagatctgtgaatgaatatggagttgcatctgtagaaaataacattgccctttcgactgataatgttggtgccggctcaaggatgtatagtcctgatccagagctgaacgggtatgctgttgatcctactgttaatgcttatggttcagtatctggtggaaccggtggcagcttttacaggaggcagaacctcgaggattacaccatggacagtagtgagtctgctcagatgaatccagttcctggtagagatgtgcaggaatatgcaagaacatactatggacacaacagggatgaggttccccaaacagcaattaacacaccttccatggatattcgaacacacataagaatgtacggcaggcacatcagggatgatcatacccaaacaaccatgaacccacctgccaatgatattcgggcacagataagaatgtatggtcaacacgctacctccgatcaccagcatgcaagtagatactcttctgggtctccagatgctagatttgagcagcaaccttctttcacttcatatggaatgccttctttgggttcgacagggaggtcgatgatggataggtatagtccctccattgatgaaacaagctataggactggccaaagaggcccatacaatgcttctgactttcggagggatcggcatcctgatgacatgaattttgctctccataaccagtatccatacccacatccaggttcctctggtggctggcacgactagtaactgaacttttgatgttcacacagaattatggtctggcatcctctggcagatgtaatataaacaagataataaagagatgatctagaggatgcaaagttttaaaaggtaaaccatgtgtaggaatgtttatgtaggttataccatttgtcgttctttgagcttttggaataccaattttgtttgcatttaatgtacaaaaacttaccttttgttttgaaatggaacctttttcgtg

SEQ ID NO: 17045 - DNA, 1874 bp, Oryza sativa
  ref <308>: DATABASE ACCESSION NUMBER: AK067510
  ref <309>: DATABASE ENTRY DATE: 2001-12-06
ggctccaaatggccggcaccggcttacgattccggcagggcgccatcttcttctcaggagctcatgctgctgctcatccaagaacaaggactcctcaccaccattgctcacctcagaggacgcacgatgcgagaggaaggtgccgcctcacggctaagtccgcaaatggacgcccacagatcagtgcctccttcagagatgtggcgatagatggggcacagtctgaagatggggcgccagagcagggaggatccaccgtcagcatcaccgtcgtcggcgcctccggcgatctcgccaagaagaagatctttcccgcgcttttcgccctgtactacgaggactgcctcccggagcattttacagtttttggttatgctcgtagcaagatgagcgatgaagagctcaggaacatgattagcttgactctgacatgccggattgatcagagggagaactgcagtgacaagatggaacagtttctgaagagatgcttttatcaatctgggcagtacaattcagaggaagggttttctgaactggacagaaagctaaaagaaaaggaggctggcaaggtaccaaacaggctcttttacctgtcgattccaccgaacatatttgtcgatgtggtgagatctgctagtcgcacagcatcatctcaagacggatggacaaggttcatagtggagaagccattcggccgcgattccgagtcgtcaggggagctcactcgaaacttgaagaagtacttggccgaggagcagatattcaggattgaccattatttggggaaggagctggttgagaacctctcggtgctccgtttctccaatctcgtcttcgagccactgtggtcgaggaactacatcaggaatgtgcagctcatattttctgaagatttcggcacggagggtcgaggcggccacttcgacaactacgggatcatcagggacataatgcagaaccacctgctgcagatcctggccctgttcgccatggagactccggtcagcctcgacgccgaggacatccgcaacgagaaggtgaaagtgctgaggtcgatgaggcagctgaggctggaggacgtggtggtgggtcagtacaaggggcacagcaagggcgggaagacgtacccggcgtacgtggacgacccgacggtgccgagcggcagcatcacgccgacgttcgccgccgccgccctcttcatcgacaacgcccgctgggacggcgtccccttcctcatgaaggccggcaaggccctgcacacgcgacgggcggagatcagggtgcagttccggcgggtgccggggaacctgtacgggcggcggagccggagcgtgggcggcggcgggacgacagcgacgagggagctggagaaggcgacgaacgagctggtgctgcgggtgcagcccgacgaggcgatctacctcaagatcaacagcaaggtgcccgggctggggatgaggctggacagcagcgacctcaacctgctctactccgagcgctaccccgccgagatccccgacgcctacgagcgcctgctgctcgacgccatcgagggcgagcgccgcctcttcatccgcagcgacgagctcgacgccgcctgggccatcttcacccccgtcctcgccgacctcgaggccaacaaggtggcacccgagctctacccgtacggcagccggggacccgtcggagcgcactacctcgccgccaaccacaacgtccgctggggtgacattagctagctcagaaaatgaaaagatcgatcggagtcgctgttaccgtgcttgctataatcttcatttaccatttgcattgatgaattctttattggactgctcagggacgaaattaataaaacaaagctctagtcattc

SEQ ID NO: 17046 - DNA, 3871 bp, Oryza sativa
  ref <308>: DATABASE ACCESSION NUMBER: AK067511
  ref <309>: DATABASE ENTRY DATE: 2001-12-06
tggggtttagagaggcaacaaaaatcagtaggtcgtcccagggcagggccttgctccgatccccaatccgtccctcgagcgagcagaggcgccgccgtcgctcatcctgctgcttccgccgccaccgccgccgccgcctgcgccgatccccatccatcccgcaagcgagcatcctggattaggatgagttcgaagaaggttccattccaccgacataaggagaacgaagaggcgaggaagaagagagagcaagatgaagcggcacgtgtgtacgaggaatttgtggagtcattcaagggtgatagcacatctgggtcgaagtttgtccgaggaggtgtgattgatcccaatgccaagctgaggattgattccgaaggtggaaagtccaaagatggggggtctgttccaaagaagggcagtaggtaaacgaaaaaaaatacttgatttctagaagagggtatcttgtggtaccgctgcttcatcttagatggccatatggccaatataatcggaatccagaggccaaccacgagcattaaatgattcatgctatattttttcaccattttacttttcgctagcatcatggttttgtgaattgtctgcttatgtatctacaaagttgataccaactattgaatgcgtttgatagacacgagggttgtacaaatttctgcttgacaaaacgcattcaaacgcattcaataattattccagtaagtaaataattttgcttgactaattgcttgtggactgtatggaaaagcacacagatagccatatttccatctagtgaagtgtaaataattttgggatgacttttacttgtctgacatataaggataatgatggctcatgttatatgttttcttaaaagcatttccaaattcatcatacttcgttccttcgggaagaagtttcagttatcagtgaagctgactataacttttagaatcttaaaagaggtcttagaatattatgatttacatgtgctgagcaactggtatatttagtactacatccgtcctgaaatgtagctatttctaccacaccctctcaaccaatcacaaccattctccatttaatttcttcacctactttctcttctcaaccaatcacaaacttccttcaatcatttctacctacttccttaatacccgtgcccacctaaaaaaatgctacgtaacattttggggtggaggaagtagggttgtttttagtaatcctctttctctctctcctctgaaaccattatctaactaactaactaactttatttagttagatttatggagtttttactaattccatattttcatcaacgtttctgctgttatttctccaaaacaagatgatctgaactattttcgtccagaagttgaaaaatgtgcatgcttgtgaaaacctatggcatggcaaggatgaaaggagccttagttttgtaatactccgtatttggattcctcttgtgcaatcatgctagtataagtcagaatttccattaaatcattgcaggcagtcgagtgtaagctttatgattaactgaacgttctatatagtttcttggttaacatgattttagaaagagaatttgtgaaagtatagcaaaggtgaaaagtacagctatttgtcaagaaagctgtagggttattagcaactcaccatgctggccatttgggcacactgcttgattctgttttctttttcatatacccgtgtcatctaggtgtatacatgatagataccttatacgtagcgtacttttatccaggtatgttccatcttttttgccgccgtcatttgggaaagagccggacaaaaaggttagtacaattccaatattcttatggctgtctcagtagtcactatggttttctggttaagcattatcttgctgtgcagaaagaagaggagcgtccaaaggaaaaggaaagacgaaagccacgggtaatagacgagttcatggaggagctcaagtttgagaaagagcttcgacaaaagcgtaatcaggaacgcgagcaatggcgtgagggtcgacacactgacacatctgcttcctctagccgttttgatgaactaccagatgaattagatcccattgggaaacttccaggatcatttgatgatggggatccacaaaccacgaacttatatgttgggaatctttctcctaaggtggacgagaattttcttatgaggacatttggtcgttttggacctattgctagtgtcaagattatgtggcctcgaacagaagaggaacgcagaaggcaaagaaattgtggttttgttgccttcatgaatagggctgatggacaagcagccaaggatgaaatggaaggtgttgttgtgtacgactatgaactgaaactagggtggggcaaatctgttgctcttccttcacaagcactgcctgctcctccaccagggcacatggcaatccggaataaggaggatggatttaggctcaacgaagatggtgccttggccacaggaaaggcagcggcaacaagggagctgttagggcttccgctagctgaacttgaacgccgttgcagacataatggcctctcgctatgtggtggtaaagagatgatggttgccaggttgcttagcttggaagaggctgagaaggaacgagtatatgagaaggacgcgggcattaaatatggacaaggagaatcgcatagaactggaagagatgacattgctgtgaatgctcgtaatgcttctagacctggagaaggtactgatagtggtgaatcagacatgttgggtctctctcattatgctatggaagcagggtacaaacgctctaatgaatccacacccgctgaacctgttccaagcaagaagccaaaagttgaccctgttttgcccgcttcaaaatggagtcgagaggatgatgtcagcgatgatgaagatagaaaaggtggcagaggcttaggattaagctattcatctggtagcgatattgctggtgattctgggaaagctgatgcaacagaagttagtactgatcactcgaatcatcaccaggatacgattcttgatgaagagcatagaaagaagttaaggcagattgaaattgctgttatgcagtatcgtgaatctcttgaggagaagggtttgcgaaacacagaagagattgagaagaaggttgccagccaccgtaggcgtcttcagtctgaatatggtttatcattttcaaatgatggtgcaaacagcaggcgctcttctgagaggacatcgtcggagcggagagataggcatgatgattgttcaagaaagcgtcatcgaagcctgagcaggagccgtagtcctccaaggagatcactggaaagagatcgagagcacaatcgcaacagagacacagacagatctcatggtaatgatgctggacgagagagagacagggtacgtgaaaaaagcgcaagccgagggagggatgatcactatgatagaagcagagacagggagaaggacaggagaaagggaaggtgattgatgcctgcaaaatctcttgcattcatccccttgcctgaataaggtgcagtgtgatatcctgtgccaggttgcatcagttaaaatctgttgcatatatgaagagtatctggcctgccacctgccgcatggcttgaagaacctgtgtattgagtgccctactcatgtagcttgaaaaacagggacagcgtgtgaaaaatagaatattatcaagtggaactgcggaagtagtgcattgaaactctccgccttgtggtggacgaccgcagctaggaactttgctttggtgacaaatgaagtcaagagagttgctttggcgacattgtccatttttattcattgatgaaatcaacgagtgtagttgact

SEQ ID NO: 17047 - DNA, 4262 bp, Oryza sativa
  ref <308>: DATABASE ACCESSION NUMBER: AK067512
  ref <309>: DATABASE ENTRY DATE: 2001-12-06
ggaatctatcatctgtgaggatgaatatttcgctgcagcttgatatggtcatatggcttcttgctgaactgaaggatgtggaggcaggcagggagagggatttctgttggtttaatcgtgctcctccaaacaccttctctactggagattctgattcaccgagcatttccttaacaagcgaaatgaaaaaacttagttttgactgccaatcgtatctcagctttttgtaccaggtcctatttgaattgaaatttcagatatgtttttgcaggttgtgctcgacgagctggtaattaataaatcaaagttatttcagcgaactcgattactgacaaagaaatgctcttcagatcacaatcaaattcagtatgtgtgccacgtgagtatctcaactcctcacacctattcctctccattcagtatcaaagctatctctcgttaaaaagttctcatcttatctctctctctctctctattcttatatccatcggatcgaactggatcatgtgttgttaatgagccttaggtccgttcattagcatataattagttttttttatctgagcatataattagttgagtattaactattgcaacatcgaacaagagtttatttaatttttaaagaaacttttatatagaaaaaatattaaaaacacaccgtttagctttaattttcggaaagcgcactaagaaagtaaaacctaacccctatatgcacattcgaactcaaccttgtagattgtcgtggtagacccagataaaatttagaatattgacaaacctaagtatttgatataaaattttattttaaatattctttttctttgaaacacagtacaaacataggctcgtaaaacgcacactcatcccaacatagaattttaatttccaaaaataacttcacaactattttatattataagacagaagtagtatgaatatttagtgtctactcatacttgcagtagtactgtgagactctgggtgtgtttagttcgtcaaaagaaaatttttgggtgtcacatcggacgtttgaccggatgtcggaaggggttttcggacacgaatgaaaaaactaatttcataacttgcttggaaaccgcaagacgaatttattaagcctaattaatcagtcattagcacgtataggttactatagcacttatggctaatcatggactaattaggctcaaaagattcgtctcgcgatttccatacaaattgtgcaattagtttgagtaaattgcattggtggtacacaaacttgttagctgggtgcgatttaatacataaatttgtaaaatgctcgtttcagtacatgaacttgtctagttcgtgcgaacgaggaccaaaataacttggtaatgttaattttacgaagctgattaggatgtgacgtgcatacgtgtagtgagtatgcataagatatgcaatatttataaatttggtctctactttatccttcatcatggaaatgatgaatttcatatatttctaaccctcatatcattgctaagttttttctttatcttttttctactatcactacatccaattattattttatcagagaggtgtatgtctaatagcaaccttctcagatatgtatttacgtagtattctaatcagcccctaaatcaataagattagccatgtagtgttcttttcgcctttctccgcacgcatcagacaagtttatgcactaaaatgagcattttacatgttcgtatactggattgcacccacctgacaagtttgtgtaccggcaatacaatttactcaattagtttctttatctatatttaataatctagagtatacatatattcaaagagtgtacatatattcaaagattcgatgtgacgtttttggaaaaaaaaatattgggatctaaacaaggcctctggatggctttgcctcactgtctgaaagtgctggacctacagtacacatagcaaccgacaaagccgtaccttgtccgtgcatgcatgcaaccgacaagcaggatggatgtatatgctagggggacaccaaacatgaatgaactcatcacacaattggcaccaagttggatggatcaccatggatgtgactccctccgacgatatttctagcgtgttttgtggcctaggatatccgagtggtcatggtttcatcaacctagttgcagaggatgatatcgtggttgttgagataaatatatggtgggtttgggatgattacaaccgctctgagtatatacttcctccgtttcacaatgtaaatcattctaacatttctcacatacatattgatgttaatgaatctagatagatagatagatatatatgtctagattcattaacatcaatacgaatgtaggaaatactagaatgacttatattgtgaaacggagggagtatataggttgagggcgtgaggcacgctaacgttttgttatgattgtttgttttgtattggagatacactatctatagcgagattgtttgctccatacgtaaaatacgcagattcgttcgtaagaaagtgatgtgaaatgtgatactaattgaattctagagaagctatatatatatataggattctactaataacgtttgcatgtatgaaagaactattgtattcgattaacttgttacatattcaatgaatatggatttataaagatatatagttgttggcattatcttaaaatcacatcgaactatagttacttattagatgtttgtatggaacttctccattcaactaatctagattcctttttagataaatatcaatttacataattttccacatatatatgactatgaaatatctccatcgatttctgtcgtctagatcattttctttcacggaggagttattttctttcacgcttcttcttgttccaatttaccgagtcacttgtctccacacatcattttcattcagataagaacgtactgtacgtacatccacgaaatgccgcgtaggcagcgtatatacatgcgctagactgatagtgtgacgattagctaggaaaagtgcgtttacaatgcgtgaattaaggctgagagatatttctaattaatccagatgggaacaataatcgacttggctttcagtggtgatgtcgcaacactgaaaaagtatatgtcggaaaaagtctgttgatcttttccccgaattttgttaaagttcgtgaaatcactgtggaattaattcaaaccatggcccctgctctcgcctccccctgtctccacttgcttataagtagaaaatctcaaaattcacatagatatgagaaaaatttccatcaaaatttccaaacatactcttacactaacaaaatatatcgattgaaaattaagacatgactcattctgtttaatttattctttacttataacaaaggggattacattgcccaacaccatagtactcatgtacaaactcccagtgagcccaatcgcataacctgacaactgatctagcaaaccacaaccgttcattgcatttagcgatgaaagagagctgaccactaacccacatacatgctatttaagtggaccaacccaccaaccacgtactccatccttgctataaaaaacaaacctagaatcagatatgacatattatagtactgtgaatctggacatatatatgtctagattcgtagtatgaaggtgtgtcacatccgatcctagattggtttttttacgagagaagggagtagtaaataacctattttggtgagtttgtacatcagcctacttgcatccctaattgcattgcagccacacaagcatgtacacaatctctcctgcctttaggcgcacgagatgtgtgcctcctcgccgacgtggatcgccttcgtcgacgatggcacggcgcactgtgccgccgccgccgccgtcgccggagaagaggacgcctgctgctgctgcttgatgacggcggccctcttgcaggcggccatgacgagcggctggtcggcgccgagggggacgacggggaggttgtcgcagttgcagatctcgatcatgaagccatcgggatcgtggaagaagatttggtccacatagatgccaccttcctccacacatcgttgtatgtaagggatgcctagctccttcagccgccgctccactgccaccatgctctcacactgcaaaaccgaccagctacatgtcaagtctagctcataatccaacatggcatatgtaaatttgtatagcgacgtagcatattttatagtataaaatttggtacctctc

SEQ ID NO: 17048 - DNA, 2293 bp, Oryza sativa
  ref <308>: DATABASE ACCESSION NUMBER: AK067513
  ref <309>: DATABASE ENTRY DATE: 2001-12-06
gattctcgatctccatctcctcctcactctgctcgacgccggcgcccagcaccagcagcctccgctctccatctccgccgccgccgccctcctcccgccgccggatcaagaaatggaggccactggtgctgaagctacattgtcacaggttacagcagttgatggagaagataaccttttccaagataaggaaagtagggctactgccaaggagcgtggggaggcagctgtttttggtttggaaaacattgttactgcaaatggagccacaagtgctgctgatcttgcacccccaaaagatgttgtggatgagtggcctgaacctaagcaaactcacacgttcttctttgttagaatctgttcatatgaggatcctagcctgaaggcaaaacttgaacaagctgacaaggagtgccagaagaagattcaagctcggtcccatatttttgaggctttgaggaccaagaggagtgaacgatccaatattatatcagagctgaagccattggctgcagagaataaacaatataatgaagttgtgagtggaaaattgaaggaaatagaacctcttcaaaagagtttaggaaagtttcgtagtgaaaataatgctatgcgcgcacaaggcgcaggtttatgctcatcaattgaagagcttgatcagttgatcaagagcttgaatgaccgaatttctcatgaaagcatatccttagatgaggaaaagaggttggtcaaagaaataaaacaacttaatggaaccaggtcaaaggttattgagaatgctgctaagagagctaaaatgcaagatacagttgttgagagaggcacaatacatgatcaggtcaaacaaattggggtgggcattgatgaagttaaaagggataggcaagctgtaagagacaagattaaggttcttgaagatcaaatccacgctgttgatggtgagattgctgcacttcaagatgacctcactgcagctactgctagaaaagataaagcatttgaagctctaaatgaattgagaaaaacacgtgatcttaataatacatccttccatcaataccgcacaatctcaaacagtgttagagacctttcagcgaggggtgaagtagaagcggtgcagcagctctgccagaatgaggttgagaagttcatggcacaatggtgcagcagcaagtcctttagagaggattatgagaagaggatactcgtttccctcaacagccgacagctgagtcgagatggacgaatgaggaatcctgatgagaagcctatcgttctcgaaacacaagtggcaccacctgctgaacaggagcctgctccactgaaaaagccggcgaagcaggcgaaggaggctcctgctccacgtgcagatgttactccaaaggatgagattcgtgccaaagcacctgccaaagctgcaaaggcaaaacaacctcttgatattgatgatattccagatgtccatgatgatgagcccccaaaggagaagacaaaacctaaagtagatgaagcaaaattgaaagagatgaagagacaggaagagatagaaaagaacaagctggcactggaaaggaagaagaagcaggctgagaaacaagcaatgaaagcggccgctcgagcagaaaaagaagctgagaagaagcttaaggagaaggagaagaaggcccggaagaggagtgcaacagctggaggtgccgagtccgaggaggcagctgaatccgatgccaagtctgatgaagccgaagcccaggaggaagagccagcagctcctgtcacaattaaaaagaatgcccggcacagaagtacggtgacgaaaacgaagacccctcttccgaaggcggtcctgaagaggaagaaatctcaggctttctggtcatggggtgcacccatggcagcattggcagctgcgctcgtggcccttcttggagccctggtctactaccagtactactaccttccagctagcaccagcaactgatgaacatgtcacaagtgctctggctgtgatacaagtgcctgcctgatcaattttttgcatttgactagaggcatatgatctctgaatgaggatcccctacatggttcctgttcttgtagttcctttactaagtgaattctagagaaggattataccgttataattttggctggagaatggttttcgctctactatactgtatgttgggtatctgttgtagatggatggacggcttgccgtatgaaataaacaaataatgcttgtgttgatacatatgtatgtttcggctgatgaattcatagctcgctttgattg

SEQ ID NO: 17049 - DNA, 3713 bp, Oryza sativa
  ref <308>: DATABASE ACCESSION NUMBER: AK067514
  ref <309>: DATABASE ENTRY DATE: 2001-12-06
gccttccttccttcgtccgaccaaaacgcgctcgcctcgcgtcatcggatcaaatggtggaggcggccacgcgcggagcagagagcccttcctcctcctcctcctcctgctaatgcgccgccatggccgcccgcgcgctgggtccacctcctcctcacgccctcggcgccacgcggcaggctcctcgctgcccccacgctgccgccgcggacgcctctgcgccccagacgcatggataccggcgtggcgccgcggcgctcggctccgcgctctccgcccgccggggaaggcatactttgtgttcagtacaattgatggatgctcttagaggtggcaatcttcaagtggaaccaaacatacttcattcccccaagccattgatgtctactagacgtgatgactcagccataacctgtaaaggattctgtacaatatcgtggaacctcaaatcagatgtgctggatggttacataatcttcgtcactggagatccagttaccttgggctgttgggaatcagatatggctgttcagttgtctccttctgttgaaagtaacaacttatggacggccgaaataaaggtaccatatggtgtgcatttcaagtataactattttgttcgagaggagaatgacgcctcttctgatatcatatggaggccaggtcctgagtactccttgtcaatacccccagttggccggaaaaaacatgtcattgttgtgaaagatctgtggatgaaaactagtgtggcaggcattcccactccttcctggggatcatggctgatggaagctaattttcttgaagaccaatttgctaagagtggagagcatcaaaacattgtgaaagcccattctgtcattgatacggtgggtcgagcctcatcagtaggtgaacatattattctgaggcttgggaacggcacacctttacatgtcaagaatatatcagagaatccatctgccagtgtccatgatgattttactgtaaccgataaagcaaattcaattaaatcaagtataagtgaacatgaaaggaatcagcctgttgaggaaccatggatccttggatctgtcatggcagcaaagaaatctgttgcagcagggaagcacgagaaaaacagatggaagtttgtcaataagaaacagaacttgagtgaagtaagtgaaaacatacctgaacaggatcaacctgtagaggagccatggctatttcaatccaaggtggtagcaaaaaaacctgtagttcaaactaaaggcaaaatagaagcaaaggatattatcagaaagctaaggaaaatggataaacctccagcgcctttggaggaggataaggcaactagtggagagccttcatcaagagtcatagtaattaattcatcagtctgcaccatgcagaggattgcagtattggaagatggaaaactggttgaactcttgctggagcccatcaagaacaatgtacagtgtgatagtatttatttaggcattgtaacaaaacttgtgcctcatatgggaggtgcatttgtggatattggactttcgaggccttcactcatgagcataaagcaaaaccgtgatccatttgtgtatcctcaaattgtcaagaatgctaaaagagattctgcgaatttttctgattataatgatgatagccttccaacatatgaagacgaagatgatgatatgactgatggggagttggcagatgaagaaaatgatgatgagtcatcagcatttccagctgaggtagtttctgaaaatgaagaacacatggcctttttgcccaattctaagataaatatgattcatagtgctgaatttgaaagtatctctagttatgatgaagaaaaagatgatgaaattgatgatcacatggaagatgaatataatgaggatcttttgcctggtgatcagtcagaagtatccaatgatcttaagacattatcttccattcaacatgctttgagagagtctagtgatgatacaaatggaagtaggtggtctcaagttcgcaagggtacaaaaattatggttcaagttgtcaaggagggattgggttcgaaaggtccaacgctgagtccctttccatgcttaagaagccggttttggatactggtttcccgcggtaacaaagttggagtatcgaaaaaaattactgggatagagcgcacccgattaaaaggcattaccaaattattacgacctcctggatttactctgacagctcgtactgttgctgctggccattcttgggaggagttgcagaaggatcttgatcgcttattatctacctggaaaggaataattgagcatgctcaatctgctgccttagcagctgaggagggtgtagaaggtgctgttcccgtaatgttgcataggtcaaagggtcaggctctatctgttgttcaagatgatttcaatgagaaggtcaagaggctagttgtggattctcctcgcacctaccatgaggtcacaaactatctccaagaagttgcacctgagctctgcaatcgagttgatctttacgaaaaaagaactcctatatttgatgaatataaaatagaaaaggagattgacaatattctgtgcaaaagggttccactacataatggcggttctttagttatagagcagaccgaagctctggtttcaattgatgtaaatggtggtcatagtatgtttggtcaggggacgtcccaggagaaggctatactagaagtaaacctagaagctgcaaaacaaattgctcgtgaattgcgcttgagggatatcggcggcattattgttgtggattttattgatatgaccgatgatacaaacaaaaaactagtttttgaagaaatgaagaaagcagtagaaaaggaccgataaacagttggtgtttcagaattgtcaaagctgggtttgatggagataactagaaaaagggttcgaccaagtgttacgttcatgatcagtgagccgtgtccttgttgccatggtattggccgtgtggaagctcttgatacttctttttcgaagatagagcgtgaaatctgtcgacgccttgctgcctctggacataaatcagaccctgagaaaccaaaatcatggcccagatttgttcttagggttgaccatgagatgtgcacgtacttgacatcaggcaagaaaacaaaactagggctcctcagcagctctcttaaagtgtggattttgttgaagatcgctagaggttttgctcgtggggcatttgaattgctaccatattctgatgaaaaggaaactgatgagcggaaggaagagacatcagaatcgcctccgaaagaagcaggcagcccaaaactctctgtatttcctatcaagaagtggatgagccgtgcaaagagagcgaagtgaatctctaccaaagagatgatttggttgtgcgatatgctttattgttattcccagatcaagaagtacagaatttgatatggctctgttgttaattctttcctgtggtgatccaacgtcagatagacgccttcctggtcaatggtttgatagattttttttttccttttccaaaattttagatgcaaaaccacagtgtgttaactatgacggatgcaaagaagtagcacgaacattttaggtgggaggaaactagattttctgagggataggaattgttgtcagggcattgatgtggttacagtacatacatcaacatagttttattccatggcc

SEQ ID NO: 17050 - DNA, 2764 bp, Oryza sativa
  ref <308>: DATABASE ACCESSION NUMBER: AK067515
  ref <309>: DATABASE ENTRY DATE: 2001-12-06
gagttggcctctgtcgtcagtttgcccgccgccgccgccgcctccgcctccgctgaccgcgagcgagcagggcgccgtcgttcgtcctgttgcttccgcggttccgccgcatcctgcccaagcttgttggcaccatggatgaatcacgaaaaagagccgcatctactgcaaatgctaaaagttcatcccttggtgaagattttggcaatgattttctttcatcttggaaattaccaaaatcaggaaatgacacgattgactttgacgttgagtcagttccgaagaatagcaagaaattcagctttgacaacctggatgattttgggcttgatggagcctttgacaaattgtcgtcatttaaaatgggcatgtctgatctagatttctctggtcctctcaagaaaaaggtgaagcccaacaactcaaatggcaacgatctttctgaagggataaaagggactgaaaaggacaacttctccttttcctttgatttcaatgagctgggcaagttcaatcttgatgctaacttgggaattgaggagaatggtatgagtaaatttgtagaaaaggtcaaccctgtctcttcagagggtgacaaggatccaagaaaaggtctttcagttaagggctctgatgttctgggaggtaacattagtaaggaacaaaagcaaacacatgatgcttgtactctgaggcctactcatttgggaagctttagccctgcaagaatggaccaaaataaagtagatttgctctcaactgatacacatgaagagaaatctaatgagacacacccatcaagagcagctgttaacaagccttctcagaatcttccttgcagttctacacctggtgaagatcctacacacgtgactacaacagcagttgctgagaactgtagagaagctcctttggtggaacttagtaaagttcatatatcaagggggaataatgatagtgggcaatcagttagttcacaattcatgaacaccagcaccacgtgcccctccatctcaagaaaattgacggcccaatcagattcccaaaatgaccagaatgagattgtgggggaaagtgcatgtcttaatgcacaaagtcctgataaccaaaggtttagaggaacttcaatgaagcttctgaagaaaacatcatgtgaaacaaagaaggctgaaaaggggacttcaggtccaaagagtctctcttcatcaatgcagagggatatgagaaatgtcaaacccgcatcattgaatgaagcagggagtttgtctcttccgccccagtcttcaattgttaaagcaagcaggcctcctcaactaacttctgaaacaaccttaaatcaattaagtagtgccaataacatggtaaaaaagatgaatacacattctactgagttgaaaagggaaagcacacaagctaatgcaagatctgaaaggcctaaaattgcttcgtcaaaaacattctgcaagccagcattacatgagctgttgaccacctccatgaatgccaaagatcataagaattccaaacttagacttgagtctcctagcacaggcaatgtttctacactgaatgctcctagcagcccagcacatagcaatggacataagaccgttgcgagtcggtcactcttgggaagtaccaatgtttttgatgcaggaaaaggcactcctaaagctgacaatagaccactttctcaactgaaagcagcaaaaattactaaagcaggcaccataagttcaaagtctgacttgcttctggagaaggatatgatggaaacgagcgggaggaagggttcccctgtaacaacatccaataacccaaagtcctatggtgaaggaaaatatgtgttgcctagcccatccatgatgcaaaagactcctaaggaatcagcttcagatccaaaagctcctgctatgctgaagcacatcatgaaatctccagctgtgagaacatcaccagaaactgtttcagagttgggaaataaaacaattccaggaagtggaactccaaaagcacgcatggataatgccattgcttcagcaatatcatgtgagatgggggaaatttctgaactagagttgcctgcgctgttagaaaatgatgtaaatgtacaaaaagctgaggcttgtagaaaggagcttgaagatttatgcatttcgttgaaaaggaaacatgaagaagccaaagagctagcagtgcgggctattgttaacaacaatacaatgctgatgttaaaccatccaatgtttgaggataaaatttgtgctcttcagaaatttgctagcaatctgagatccaagaaggttttattcgaggatattagtgccattgatgctcattaatgtgagactaaaatggagtgactgtgcttcacccaggaagaacaccggtactgtaaatgcaatgtaagaacgtacgatccatgatttgctcctgtgaaggcatttgtttagttagtccagcgggttgtgaaatacccttcctagttgctacacacctgttattctgggaagtatgcggaatttgtacttaggaattggggatgactccactggaccaagagcagagaaaaagaaacacggttcaaggggggcatgtgcgcatactttagttcgtaattgtgtggatattgctcgtagcgtcgtgaactgtgtccttgtggaccgaacgactagagtaccccttgttgttgatccctggtgctctatagtctgtcctgggcaaaatgcgattgaagaagtgctattgcatacggttttatgcc

SEQ ID NO: 17051 - DNA, 1149 bp, Oryza sativa
  ref <308>: DATABASE ACCESSION NUMBER: AK067516
  ref <309>: DATABASE ENTRY DATE: 2001-12-06
ggctgctgccgcgcgcctccgctccattcctgattcctcctcccaactcttgcttccgttttccgtgcccctcctgccgacaaacccacacctgaatagctcatcctcacctgatcagctgaacctgtttgagagaaagaagttagttggccatctcgccctcgctagaaaaaggaaaaaaaagaaggaaaggagaaggaggagagagcttgctttgctgctgggttgttgctaatggtgttctactacaaggcgaggccggacgccggcgactacaccatctacatgggcgccgacaagaacgagaacgaggagctcatcaagtacggcctccccgaggacgtctggttccacgtggacaaggtatcctcggcgcacgtctatttgaggctcaagaaaggcgagtcgatagatagcatctgcgacggtctgctggaggactgtgcacagcttgtaaaggctcattccattcaaggaaacaagatgaacaatgttgaggtggtctacacgccctggtccaatctcaagaagtccccatccatggatgtcggtcaagttggcttccataataccaggatggttcgcgtggtgatcgtcgagaagcgcgtcaatgagatcatcaacaggttgaacaagaccagggtagagcgccggcctgatctgaaagccgagaaggacgcgtcgaacgcggcggagaaggcggagaggaagatgcagctgaaggagaagaggcggcgggaggagatggagaggctggagaaggagaggcgggcggagatacggagctacaagggcctcatggtcgccgagaagatgacctccaaccgccagatcgcctccgccggcaactccatgcaggagatggaggacgacttcgtctgatccatccatccatccgtccgaagccagcaaccgctcccgggcatgcgtgcgtgcgtgcgtgcgtgcgtaacgtacgtgtgcggccacgtgtttctctgtacatcatccatccatataagcgtgcgtgatcgtctcaccggtcagtctccctggaacggtttctgcagttctgctatagtagtggtagtagcacatctctgtacatacacatggtccctagcaatgggcacagatgagaaagaaggcaacgcgattttcggtatttcg

SEQ ID NO: 17052 - DNA, 2830 bp, Oryza sativa
  ref <308>: DATABASE ACCESSION NUMBER: AK067517
  ref <309>: DATABASE ENTRY DATE: 2001-12-06
gcgtcgccgtgcactgccgccggcagccgaagcgagacgaaggcgtagcggagatgctcttctcgatcagaagcggaggactcgaggttagccttgtcttcttctcccccacctgatttgagccgcgtccaggaagggatcctccacaaccgcccagcgaatagctcggcgcctcggccagatctatcgcgtattcgcgtcgatcacggtattgcagtgttcgttagtttcagacttgtgatcccctctcttgccaaatttcagagaagtatttctaaatgtagtcgcaaattaatggaggagcatttacattcacgtaaaactttcacagtttcacttgactctcatctactgacagatttcagtttacttctttctacttgttggagcagactgtaccaactgaagttcactagaacatcaaagagtttggccttgctaagtgaaatgtgaaaatcactcgagtaaactacaaaattgcattacaggccactaagccagaacacatgtagagagcgagagtgtgctctcgtatctcctcgatataatttgctgagttcaataaaagcttccattatctttaaaaagaagaagctagaacacactattgactgtctctattggaactgctttagccaaaatatctggatatgattgtctgatcatatagcacacctattccaaagaacacaccaaatccaattgcaaagacaaccttgtcaatatactgctttgtggaggtaggggaggttggagctgcttctgccaaattgcaatgctgtacaagcattgggctgcatagctttgggttaccagcaaaactagaacttggaaatgtgctgaactggcctccaattggtacaggcccttgaaggtcattgtaggaaacgttgaattcagaaaggaagtgaaggttcaccagtgccgatgggattgcacctgtcagatggttggaagacaggtctagccccatcagattcttgatgtcactgatcgattgggggatctccccatgtaaattgttgaagctcaagttgagtgaaagcagtgctttcaactgaccaatctccacagggatcagaccacttaatttgttattacctagattcaacattttggggaatgcactagctgcacggtactgaaaacacaaagatacacccacataaattgtgaacggggagactcttgggccatctgggtgatcttcaatcttgtcggattttagcatcggcatctccatcagtgctgttggtatgtcccctataaggctattattggataagtctatatacttaaggaagtttaggctattgatccaggttggtattggtccactgagttgattgttgtgtaaaagtagaagttccaacttttttagctttgagagccaattaggtatttttccagtcagtgcgcagttatttatggcaagaacatgaagattctcaaaaccatcaattgtttcgtcctctggcatagcttcatgtatgaaattactcccaattagcaaggtagtggggtttcttaagctcttgagtatgtgaagtgaacctgtgatatttgtaaaattgttgtaggaaagagatacgaaggtaagggatttcaaattttctaatttctccgtcaactgaccttgaagcttattgcgagataacctcaaccaagttaaagtaccgcatgagtagatgctatctggaatcgtgccggtgaagtaattcgaggaaaggcccaaagcttgcagattgtgtaggttggagaagttaaccttagaaagctctcctgccaacttgttattttcaaggttgatggtgattacatttgtgcaatcacccaaggatgatggcagctccccagatatgttgttgttgttcatgtgaaactcctgtagtctcttcagcttgcctatagaatctggtattgtgccactgaatctgttccacgcaagatcaagaaaaaccagattgctgagctttatcatgagtacaccatcaattgttccttgcaaatcattgttaggaaaagagaggcactctagtgatgtggcatggaagagatcatctgggagggctccactgatgttgttgtgaccagccttgagcactttaagggcagtgcatttccctattccaggggggatgctgccactgaactggttgtagctaacatcaagcatggcgaaggatggcaagccggtacagaaagaggaagctatctgcccagtaaaactgttgttgctggcgttgattgcaaccaggctcctcattttctcccatgtggtggatggaaattctcctgtaaacctgttgcttgagatattcagaacctgcagtggccggtcagatactgatgaattcagctcttgcaggtccccgtcgaggcggttgaagctgacatcaaggacgatgatgctgccagaggacatcagctcctcaggaaggccaccggagagcaagttgtaggacaggttgaggtgatgccttcccacgcgcagcagtcgatgccattccgccacgacatggcgatgccattgtcatgcgatagcccagcaaggaaccggaggagagagctcttctcctgctcaaggcatgcaatggtggagttggccatggagagcagcagcaacaataaggcagcagcagcgagacctgagaaaggcatccctagcctgcttctccacagagaatgtggtgcctccttcatgatctctcccatcacagcagtgtttggacttagaatttggcaactaatatttgttcgcgaaaagttacactgttcggtgaggatatatatacacaactgaatgcatgtttcgaaccctgcatgtttg

SEQ ID NO: 17053 - DNA, 1595 bp, Oryza sativa
  ref <308>: DATABASE ACCESSION NUMBER: AK067518
  ref <309>: DATABASE ENTRY DATE: 2001-12-06
gacggcccaccccccttcctatcgctctcccaccacacctgcgtctccgccctccgccggaattccgctcccgcacctccgccatcagcgctccgctccgtatcagccgccgcgccgtcctctgcatcgcctgtctgccaccgatccccgccgccagctcgctctccacgatcctccgcctccccgatgcacgaggtcctcccgtcaccaggtcgtcgccgccgttctgctccaccgatccccgccgcacgaggtgctcccgtcgctaggtagccaccgcgccgtcctctgcatcgccttctccaccgatcccctctgcatcgcaggggtgagctgcagctatggagttcctcgccggtgggggagcagcaggtgaatcccgtgagagcgcttgccgcttttcctcagagtacaatgaacgcggggtgctcggcgaaatgtcccgtccggctcctcacctgcaatgcatgtgttctggagagtgtttatggattctggatcttagatcccctcaacgacttggatcgtcagtaaagcttcatcttgaaggtgcacatctgccgttgtttcgtcaaaatactatgcatgatctttaggtgataaaatattgattgaattgtctactgctatcgctcagaatccatactccatcaatcttacatatacacatatttgttgcgtcaaacacaagcttgctttccatacatccctgaacaattcagcctcacaactgctcttgacatatctcattcagaatttttttttctcaaattagttggactgatagaaaaatattgcttttcaagattgtaaaataaccaactgactgggaagttgatgtcatatgttggaagcaatctgctaaaatgttaaagaagtgcatctaacttttgtacccagtgaattgcaaatctctatctcgttttttttttgtttacagtttctttggttttaaagtaaaataggttgacatgggaactttactagcagaggaataggcttatattcttggaaaaaatacatttctccatgcagaatgtgattacaataatgatacttgctgccatgatttctatcactcatgcacgcattgcccttgatgattgtatgcagttgggatatattggtgagttcaccctctatctctctctcaaaccattatttatcttcattcactattcacttacaatttccctcgtattagtgatatgtattagtgagtttatgaaaaaaagatcagatatttaaaaacagagttagctcctttggaacgaagacaaaatgctactttgataacttgacttctcaacaccactcttatctgcacacaatttttttaatgaccagtttgaactttcatctctttacagtcatcaagcaagaaaatccttggcggttctgcttcctggaagcagtaggaacaacaagagttactgaaccagaaattgaacttgccttcttcatgcatcagatgaaccataaagggaacaacactactaccctctccaaaattgagctgctcaggacttcgtagaaatttacagcttcaggacatgtgatttatccattctcttttactgtttattctaaaatgc

SEQ ID NO: 17054 - DNA, 3570 bp, Oryza sativa
  ref <308>: DATABASE ACCESSION NUMBER: AK067519
  ref <309>: DATABASE ENTRY DATE: 2001-12-06
ggttgatgctgctgctgattacagctaagagagaatcagagaacagcagaaacgtgctatctctgcatgttttactctctcttttctagtgtgctgctgctcctgatgcgagttggtttgatgctgatgtgtggagaaaatggatgtctgtttttgcggattttcctttatctccagacggaaagttggttttacttttgtggccatctgatcccctttttagcggctgcaatttggttaaattggatgtgctgtgatgtggagccaggcgtcggtggtcatgtgttttcactgccaatttgaccccaatgactgcaccttgcatcgccggtgccattaaaattgctacacacattagttccatgtgcagtcctcagtggtcaccagtctttaggcacgttgaagcgtaagctacagttgttttgtgcctgtgtggcccatcagcgccaaatgggcgagcttagcgtgtgtatagaatgctgggttttggctagttggatgcttcgatgcacgctagtctagtgggttcagtagtcaggggccggctccgttgttttgaatcaaacttcttgacaaagctttggtgttcacagctgggattacccatgagtgcagcttttcgtttcatgtttaacgttatttaaatcgctaagcgcacttttaaatttgagaccaataacatggggttaggtactggagtatctttgtgattagtgatgcttttctttcctaaaagatgtggtgtgactaataaaggaagaatggaggaaaatgaattggcaccacttctttttgctaatctttttctttaattctcagtgcggagaaccttgctattttgttctctttagccttttttctttgatagctaatcaactttactatgatcgcttttccatactaccgtatgagagattaagtactcctttgaaaagatgtgctatattttttttatagatttagtgttactagggctgtttgtccatataggccagccagatcaaatacacacaagactagtgcaaacttctaggaaaacaaaacatgatcaccaagaaaaatgttttctaagctatctttttgggattaactaatgggaacaatggggccttacaattgatatggaccttggctagcaatttttattacttccatgtgctttcgataaaacagtacaacaatgtaagctgttttttggggaaaatatatcatacttatttattcagtagttctttcatatacaatttcttcttcagacagaattcccccttgtgtcttcatacctggtgcaaattccaaagttttgtttcatcttgctgactatcctacattcagggggatgacacagctaagagaaggacccagaaaagcaaaagtttcaaagaggtcgaaaaatttgatgtctttgtcctagagaaaagctctggttgcaagttccggtccttacaacttctgctcttcgcgatcatgtctgctgcatttctgacactattgtacactccatctgtgtacgaccatcaaatgcagtctagttctcggtttgtcagtgggtggatatgggacaagaccattcctgatccacgatatgtatcttcgcttggtgttcagtgggaggatgtatataaaaccgtcgaaaatctgaatgatggtgaacggaagctcaaagttggactattaaattttaacagcactgaaattggctcatggacacaattgctcccggatagtgatttttcgatcattaggctagagcatgccaaggaaagcatcacctggcagactctttaccctgaatggattgatgaggaggaagaaacagagataccatcgtgtccatcgcttccagatcctatttttccaagagggacacactttgatgttgttgctgtgaaacttccctgtacccgagctggtggatggtcaagagacgttgcacgtctgcatttgcaactatctgctgcaaaagtggcagtgactgcttcaagaggcaatcgtggtatccatgtgctgtttgtgacggattgcttccctattccaaatctcttctcttgcaagaaccttgtgaaacatgaaggcaatgcttggatgtacaagcctgacttgaaggcactaagggagaagctcagacttccagttggatcctgtgaacttgctgttccactcaaagcaaaagcacgactttactcggtagacagacggagggaagcatatgctactattctgcattcagcaagtgaatatgtctgtggtgcaatcacagctgcccaaagcattcgccaagccggatcaactagggattttgttattcttgttgacgagaccataagtaaccaccaccggaagggcttggaagctgctgggtggaaggttagaataatccaaaggatccggaatccgaaagctgagcgtgatgcatataatgagtggaactacagcaaattccgtctatggcagctcacagattacgacaagattatatttattgatgctgatctcctcattctgagaaatgtcgattttctgttcgcaatgccagaaatcactgcaaccggcaacaatgcgacactgttcaactctggagtaatggttattgagccttcaaactgcacattccagttgttgatggaccacatcaatgagataacatcctacaatggtggtgaccaaggatacctgaatgagatattcacatggtggcatcgaattccgaagcacatgaacttcttaaaacatttctgggagggggatgaagaggaagtgaaagtgaagaagactcggttgtttggtgctgacccaccaatcctctatgtccttcactatttgggtctcaaaccatggctgtgcttccgggattacgactgtaactggaataacccgatactgcgggagtttgccagtgatgttgcacatgcccgttggtggaaggtacatgacaagatgccaaagaaacttcagcactattgtcttttgagatcaaggcaaaaggctgggttggagtgggatcggaggcaggctgagaaagcaaacttcaccgatggacattggcggaggaacataactgatcctaggctgaaaacttgctttgagaagttctgcttctgggagagcatgttatggcactggggtgaatccaagaactcaacgaaggaaaaccctgtgccggccacacctaccgcgagcctcacaagttcatgagatgtgtagatagccctataccagatacaaacttctaagctccatacatacatagcaacagcttgtaaaggtagctatgcttaggtttctcgacaaaactataccttgtgtttgctatcatggcttcggctccactctggctgctttgatagctcacaatttttttggttttttggccaataattcatcagtataggtaaattttctgttcatgaattgtttggtcagtctggggttggttgttgctcggctgcaatagcctagttcgatgtatggtggttgaactgtttcggtgataaaatctggagtgacgcaacatgagattgctgaccagcaaacactgcctcattttgacatgaaatacagtattgtttt

SEQ ID NO: 17055 - DNA, 2062 bp, Oryza sativa
  ref <308>: DATABASE ACCESSION NUMBER: AK067520
  ref <309>: DATABASE ENTRY DATE: 2001-12-06
ggcagcctccggtcgcctcctccgccatctactcggagctcccggatcgaggggagcgctcgccgccgccgcagcgacctcgccggatcacggcggcgggggccgatcgatcggaggtcggtcgattgccttcggcgggtgggagatggatggcggcgtgggaggcgcgcacagctcgcggaggagcgtgtcctcgtcgaccggatccaggaggagggccgggcccacggagaacggccaccacgacgccgccgctgccgccgccggcaggaggtcctccgcttccatctcccgcgcctcgcagcagtcgatgaccggggagaggaccgtgaagaggttaagattgtccaaggcactgacgattccggatcacacaaccgtctacgaggcttgtcggaggatggctgcacgcagggtggacgctgtgttgctgaccgactccaatgctttgctgtgcgggatccttactgacaaggacataaccacaagagtaattgctcgcgaattgaagctagaagagacacctgtttcaaaggtcatgacaagaaatcctctctttgttctgtctgacacactcgcggtcgagacattgcagaagatggtgcaaggtaagttcagacatttacctgtcgtggagaacggtgaagtcattgcactgctcgacatagccaagtgcctgtatgatgctattgcgcgaatggaaagggcagccgagaaaggaaaagccattgctgctgctgttgagggtgtagagaagcactggggagcttctgtgtctggtcctaatacttttattgagactcttcgagagcggatgtttaggccatcactatctaccattatttctgagaattcaaagtagagtggtgactgttgcaccaactgacacagtgttgacggcatcaaaaaagatgcttgaagttaaagtaagttcagcggttgtagcaattgaaaacaagcctggggggattctgacctctagagatattttgatgcgtgttatagcccagaatctcccacctgaatctactactgttgagaaggtcatgacccagactcctgaatgtgccacggttgacactccaatccttgatgccctccatacaatgcacgacggaaagtttttacatttgcctgtcttagacaaggatggaaatgttgtaactgtagttgatgtccttcacataacccatgctgcaattgcaactgttggaaacagcgcgggatctggatctgaggcgacatcagctatgatgcagagattttgggattcagcaatgtccattggacctcttgatgatgatgatgactccagaagtgaaggatcaactaaagtggcgtctgaggcaacagatgtaggaagatcagctttttatccggcttctggtttgtccaacacattcgggttcaagattcaagacaaacaaggcaggatgcacagatttaactgcgaaacgagcagcttgacagagttgataaccagcattctacagaggcttggcgatgacatcgatagaaaaaacctaccacaaattttgtatgaagatgaggatcatgataaggtcatactttcatcggacagtgaccttgtagctgctgtggaccatgcaaggcaaatcggttggaagagcttgaagttgcacttggattacgccggtgttggtcgccggaagagaggcggtggtggcacttcagacttcgagtacgctggaaaggatgcgtgggcttcagcctacagcgctgtggctgcaggagcagctcttgttgcaggccttggcgtgatggcttacctgaagagagcaggctaggcttgcagctttgcagttgcagatgcagatgcagatgaggctttcatcttgtgatgatgatgatacgaaatgttacagaatcaaatttgagcagattggtgtgtaaattaattcttgtggggaaaaaaatctgtaataatctcacggcagcggatggctgcctacatataatgacgaaattttccggtggctaaaaaaatgtctggtattcagcttgtatcgccactgtacaatgaagcaaatgctctgtactg

SEQ ID NO: 17056 - DNA, 1753 bp, Oryza sativa
  ref <308>: DATABASE ACCESSION NUMBER: AK067521
  ref <309>: DATABASE ENTRY DATE: 2001-12-06
gtgtgctaggagaaatggagaggccgggtgatgaacatgatgactgcaggacggctcctctgctggagcctaagcacgctcatggcgaaggcagcaacaacgacaagcaagaagaagatgaagaggaggttgggtcgttggggccgcgggtgttggtggagagcaagaagctgtgggtggtggcgggtccttccatctgcgcgcgcttctccaccttcggcgtcaccgtcatcagccaagccttcatcggccacatcggcgccaccgagctcgccggatacgctctcgtctccaccgtcctcatgcgcttcagcggcggcatcctcctaggcatggcaagtgcattggaaacattgtgtgggcaatcatatggcgccaagcaataccacatgttgggcatctatctacaacgttcatggatagttctcttgtgttgtgcagtcctcctcctcccgatatacctcttcaccactccactcctaatttttcttggccaggatcctaagatcgctgctatggccggcactacttcattgtggtatatccctgttatgatatccaatgttgggaacttcacgctccaaatgtacctacaagcacagagcaagaacatgattgtcacttatcttgccatgctcaatcttgggcttcaccttttcctatcatggcttttaacggtccagttccaccttggccttgctggggtcatgggctccatggtcattgcctactggattccagtatttggtcagcttgcttttgtcttctttggtggttgccctctaacatggacaggattctcatctgctgcttttactgaactcggtgctattgtcaagctttcactgtcttctggagtgatgctttgtgtggaattatggtacaacacaattttggttctcctcactggttatatgaagaatgcagagattgctcttgatgctctttcaatatgccttaatatcaatggttgggagatgatgatttctatagggtttttatctgcaacaggagtgcgggtggcaaatgaacttggagctggaagcgcaagaagggctaagtttgccattttcaatgtggtcaccacttctttctcgataggatttatgttgtttgtgctcttccttatctttcgtggaaggcttgcatacatatttactgaaagtaaggtagtagcagatgcagttgcggagctttctcccttgctagccttctccattttgttgaatagtattcaaccagtgctctcaggtgtcgctgttggatcaggttggcaaagtgtagttgcctatgttaatgttacatcatattacttgttcggtatccctattggtgtaatactaggctatgtgctaggatttcaagtaaagggcatttggattggtatgcttcttggtacgctagtccagactattgtgcttctatttatcactcttagaactgattgggaaaaacaggtagagattgctcgacagagattaaaccgctggtctatggatgagaatgggagacaacagaatccgggtgaaaatccatgatctaaaacttctgcacacttgtaatgaattatggtgatctatgaatcagcttgttctaatgggattgccctcagagtttaagatccttcaaggtgacatcatccttcaatgaacctataaatggcttggaatgatgtttttccccatgtgtcacaccatggaaaaaccgtgatgttattgaaggaaccttatatatatatggtcgtaaattatcc

SEQ ID NO: 17057 - DNA, 1623 bp, Oryza sativa
  ref <308>: DATABASE ACCESSION NUMBER: AK067522
  ref <309>: DATABASE ENTRY DATE: 2001-12-06
cttttttccccatcgagagttcgccagaaggaagaaacctaaccctaagattgcgattcggcggcagcgacgaggcgcgggcggagatgaggaggcccaccatagaagagaaactggcgacctactccatgttccaggttcgtcagggatccaccgtcccgatcaccgcgcgggagtggctggactctgtgatggctggagttggctcgatctctctggcggtgcggggtgctggctcgatctcggcggcggcaggagcgggagatggggcttgctcgagctcagtggcggtggcggggactggctcgatctcggcggcgggagcggcagatgggccttcctcaagctcagtggcggtggcggggactggcttgatctcggcggcgggagcggcagatggggcttgctcgagctcagtggcggtggcggggactggctcgatctcggcggcgcgagcgggagatgggcctttctcgagctcagtggcgggggcgggggctggctccatctcggcgacggcgggagcgggacatggagctgggtcgagctcagttgcggcggcggggtcaggcgaagccccggcgaggaggaagaggacgcctgggagatggaggaggatccctcgcacgctacctcatccttgcctgagaaagaggcccatgacatgggaggagcttctcgcggacagcttggacatgagcgatgaggttcactgcttcagagaggaggataagcccgctttccgcaagtccaaggcgcagatggccaggttctatcagaggatgatcgacatcgagaataacaagatcaaacaaatcttccgaccccgcgtcccatccgatacacacgagcaacatttgaccgcagaagagatggaggcagagttcgctggcaagaaagtttcttcccaagcttgtcactttgccaatttagcaattaaccactacaacaatattgaggagaacattgttaagattgagctttgtactgttcttttatcaaattgttttcatgagatctgtgggtccacatacgcccatgtcaactttactgccagggctgaggatgatgatcaggctaagaagagactatactttgcagagctcaagttgaatccggatcttctggcaaagaggagggaacgctttgtagagttgagccttgatccaaatattgttggatgtgctgatgatatcgagcccatgtgtgtcgtctctatacacaatcttcagggttcttgttttggtggatgccatgagatcaacaggagaattgattatgtaatgatcaggaatcaggactacgagcgttgtcacgcatgtagcgatcgtatcaagcatccatacgggacagaatttattgcagggcatgatagttccaagattccgtattacactgcaggctgatgtaataataatatgattagagctatgacttggagtattgttagaatttagactctttatttatgctttgacatctatgtgcgcgagtgatctcttctaatgcgcaaatattacctgatgaagtagccaggatctttaatgaagcctctatggtatgtctactgtaaccaggatcattaatgctctattcagttgctccctctgggctagtattatt

SEQ ID NO: 17058 - DNA, 2088 bp, Oryza sativa
  ref <308>: DATABASE ACCESSION NUMBER: AK067523
  ref <309>: DATABASE ENTRY DATE: 2001-12-06
ggtagtgcaattcacttatacacggagtttaattagtttattgccttctacaatggataggatcttcgcccgtttcttttgcttcctactgattgcggcagtaagccatgcagctgatctgtcccccgagcaatactggcgatccatcctccctaacaccccaatgccaagctccatctcccaacttcttaactacccttacttgcctgctgttagattacctcgccgtacggatgctggtcagcgcaactacaaatcatcagtttcacatgtggctgaacgatctcaccgtgtagatgatggccaacgcaactacaagttatcagctttacctgccactaatgaactacctcaccgtacggatgctggtcaacgcaactacaagtcatcagtttcacctgtggctgaactacctcaccgtgtagatgatggccaacgcaactacaagttatcagctttacctgccactaatgaactacctcaccgtacggatgctggtcaacgcaactacaagtcatcagtttcacctatggctgaactatctcaccgtgtagatgatggtcaacgcaactacaagttatcagctttacctgccactaatgaactacctcaccatacggatgctggtcaacgcaactacaagtcatcagtttcacctgtggctgaactacctcaccgtgtagatgatggtcaacgcaactacaagttatcagctttacctgccactaatgaactacctcaccgtacggatgctggtcaacgcaactacaagtcatcagtttcacctgtggctgaactacctcaccgtgtagatgatggccaacgcaactacaagttatcagctttacctgccactaatgaactacctcaccgtatagatgctggtcaacgcaactacaagtcatcagtttcacctatggctgaactacctcaccgtgcagatgatggtcaacgcaactacaagttatcagtttcacctgctgctgaactacctcaccgtgtagatgatggtcaacgcaattacaagttatcagttttacctgccactgaactagttcactatacagatggtcaacgcaattacaagtcatcagttttggagacgccagaacttctcaaagaccccgacatggcgctcttcttccttgagaagaatcttcaacaaggtaaaaaaattaataacgccctccacttcgccaacttgttggccactacgaactccaagttcctgccacgaggcaaggcggactccatcccgttctcctctaaagaactacccgagatcctggaccggttcggggtgcggccgggctccgacgacgcggctgagatgagtgctacgctgcaggactgcgagctgccggcgaataagggagagaagaaggcctgcgccacgtcgctggagtctatagtcgacttcgtcacatccagctttggggccagtgacgtcgacgccgcctccaccgttgtgctcagtaaggcggtggagtcttcttcgctggcgcaggactacacggtgagcggcgtgaggcgaatggccggaaccggccagctcatcgcttgccatccggagtcgtacccgtacgctgtgttcatgtgccacctcacagaggcgacgacgagggcgtacaaggcctcattggtcggcaaagatggtactgcggtggaggcggtcgccgtgtgccacaccgacacgtcggactggaacccagagcacgctgccttccatgtgctcggcgtcaagcctgggactgtgcctgtctgccacttcatgcagcctgacactgtcgtctggacccgcaggggctgatgtatgtatgtatgccatatagtacctacttcatcgtactgtactgcgtacgcatgctgccagctgctttgcataccttgctgctggagatatataattaatatccagcacttatatactcgtcacttctatcgtgtgtcgaaggttatatacttgtagcatttggggatgcagtacgtacgtgtgtctgtaataagtttcgtgatatgttgcttcatccatatggaccatatgtaccaccaatcccagtgatatataataatataatatcgttgtct

SEQ ID NO: 17059 - DNA, 1923 bp, Oryza sativa
  ref <308>: DATABASE ACCESSION NUMBER: AK099003
  ref <309>: DATABASE ENTRY DATE: 2002-08-28
gactctctctctctctctctctctctcaagctcggcggaggcggaggcaagcaaagccttctcccctcgcctcacctcgcaatccaccttgggcgggccgtccggcgagctgagcgcggcggcgccctccttactcctccctccccacgtgcggccccgtcggagcacggcggcgacgaagaaccaggggggtgggggggcgaggaggagggcatcattccaccggctgattcattcttcttggctcgagtcgaattggagaggtaattgcttgccttctgaggaactgcgggagggagcgaggagtcgtggagcgactcttgaaggatggcggaaggtgccaaattccatgggatcgttggcgctgttggcgcgcatgatgttggcgggaacttctgtgacatggggtactaccagaagctaggggagggctccaacatgtcgatcgatagccttaacagcatgcagacaagcatatacggtggttcggttgcaatgtcagtggacaacagtagtgttgcatctagtgactctcgtaccgggatgcttaagcatcctggcctcaggggtccagtcattgtgtctagctattctgtcgggaacagcattttccgtccagggcgtgtgtcgcatgccttgagtgatgatgcattggcacaggctttgatggactctaggttccccactgagacactcaaggattacgaggagtggaccattgatttgggtaagctgcacatagggatgccatttgcacaaggtgcctttgggaagctctataggggaacctacaatggaggcgatgtcgcaattaagcttttggagaggccagaggctgaccctgagaaagctcagttgttggagcagcaatttgtgcaagaagtcatgatgctcgcaacgttgaggcactcaaatattgtcaagtttgttggtgcatgcaggaagccaatggtttggtgtattgtgactgagtatgcgaagggcggatccgttaggaattttttgaatagaaggcagaataggtctgtcccactgaagcttgcagtgaaacaggcattggatgttgcacgtggcatggcatatgttcatggccttggatttattcacagagatcttaagtcagacaacctattgatttctggagacaaatctatcaagattgctgactttggagtggctaggattgaagtgaagactgagggaatgacacctgaaacaggaacttaccgctggatggctcctgaggtgatccagcacagaccatatgaccaaaaagtcgatgtctacagttttggcatcgtcctgtgggagctagtaactgggaaccttccttttgcaaacatgacagcagtgcaagctgcatttgcggtggtgaacaatggtgtccgcccagccataccccatgactgcctccctgccctcgcagagatcatgaccaggtgctgggatgcaaatcctgatgcccgtcccccgttcaccgaggtggtcaggatgctggagcaagtggagatggaggtcgttaacactgtccggagggcccgcttccggtgttgcatctcccagccaatgaccctagactgagtcacagccaggatccagggtggaaaaaggcaacctggagaaaagttaagtcctgtgtacctatcatattaataggcctgttctgcagagaagatgaaagcccaagctgagtgtacttggcgtcgcgcgttctcttcgtttaccctagacaatacctagtatctatcgtcagactggaatgtattagcggtagctttttatctttgacaacaaaaaaacaccatgcagggctcttgttgcaacaaccgcatgttcctgctgtatgttatctgttgtaatcatcctgcttggaacatgtgcaaggctgcaaggcttgatgcctaatagtatatatagcatatg

SEQ ID NO: 17060 - DNA, 3763 bp, Oryza sativa
  ref <308>: DATABASE ACCESSION NUMBER: AK067524
  ref <309>: DATABASE ENTRY DATE: 2001-12-06
gttggtttcctagagagaggtcttcgttgctgcctatcgttcttgtgtgtcctaaaaaattcgagtggagagggaagaaccagtagcgctagcgcaagcagattgtggttggcggccatggagaccgcggtgctgagcgccgtgctcagaacgctggggccgaagctctacgcgttcctccgtgacgggcacgacctgttgcggcgggacctggagcgcgacgtccactacatccggaacgagctcgccatgatcgccgccgcgatcgaggagcacgaccgccgcccgccgcccgccgcaggcgacgtgcggagcgcctggatccgcggcgtgcgcgacctggcctgcgacatggaggactgcgtcgaccgcttcgtgcaccgcgccaccggccacggcctggcctccatgggcgcccgcgccaagttcgccgccgtgatccaggagctcaggaggaaatccgaggagctgtcccgcctcagagccagttacgccgccgccgccggcgagcccagctgctgggtggctacaggatcatccgcgttgaccctgccggcgtcgtcgtctgaggcgcacacccttgcatctgacatcgtggggatggacgggccccgggacgagattcttgagctgataggggaaacccagggccagctcaaggtgatctccattgttgggtttggtgggttagggaagacgcttcttgccaggcaaatctacgagagcgacgccgtcgccgcgcaattccatccacggatttgggttcgtgccgcggggaagaacgcagaggatgtcctcatggacattctccagcagctggggatgccggtacatcactgccatgccagcaatctcgttgtaaatctcagaaattgccttgaatccaagaggtaagaaaccaaccactgacatgttcaactgttgttactgtttgttaccaaatcaatctctgttgtgtgtccttcatcctacaccttttgcggcctctgaaagcaattgcttccaagaactacgagggattgaggagcactagagttgtttttcttgatttgttttatactcaacttaaacgaagtatcagaaggtacaacgtattttagtactaatctacatttcagtcatacagagtaaggtgagtacaaaaagttagccctcaagtgcagaaagaatcacatgttctttgttgtaattgacgacatgcagagggaatattggaacagctctttcagaaatgcctttccttctgatacgggactgagaagcattgtgatcgtaacgacggccatccagtccatagcaaatgcctgcagctctcgcaacagccatgtgtacgtgatgagaaccctgaatgaggaacactcaagacagctattcttgaaagaagcatcatggaaagattacccaccaggttcagaagcaatcctgaagaaatgtgatggtctgccgcttgctctcgtcacaacagcccaattcttgcaaagcagatgtcagcagcagcctctgggatgcgcaaagctgtgcgacaacctgggtaagcatcttgtgacagaagacaccttagcaagaatgaagcgtgtgcttgttcaccattacagcagcctccctggccatgtcatcaaggcctgcttgctctacctgggaattttccccagtggtcatcctgtcaggagaaaaactctgataaggagatggtcagctgaaggattcgtgggagcagaccatcaccggagctctctagatgtcgccatcgacagcttcgaggagctcgttaaccggagcatcatccagcctgttgatgtgagcagcaacactgaggtgaagacctgccaaactcacggtatgatgcttgagttcatcctgcacaaatccatatgtgacaacttcatcacatttctgtacggtcaggctcgcctgcctgacaagatccgttgcgtttccatacaacagaacagtggtagtaagaccagagtggattcagacattgatctgtcccttgtccggtctctgacgatcttcggaaaagcgcacaagtctttcctgaatttctccaggtataaacttctccgggttttggatctcgaagagtgtgatgaattggaggacgagcatctgaagaagatatgcaagcggttgcttctcaagtacctaagcctcggccgtggaattacagtgcttccaaaggagatcgcaaagctgaaatttcttgagacgctcgatttacggcgaacggtgattaagtttcttcccatacaagtgctcgagctgccatgtctgattcatctgtttggagtgttcaagatccaagatgctgaccagcaaatgaggaagctcaaatccttcctgacggagaaaagcaagttggagacactggccggatttgtcaccgataggtgccaaacatttcctcagctcatgaaacatatgaccaacttggcaaaggtgaaaatatggtgcgagaacaccgcagatgccagcagcagcagcaactctgatgttcacctgtcagaggccattcaggagttcatccagagaggcacagatgtgaacgatgtccgatcactctctctcgatgtcggcgaatgctcccaagaatttctcaacttctctttaggagattcatgctacctaagctccctgaagctgaaaggaaacaagatatgcaggttgccaccgttcgtcacctcgctggccgttctcactgatctgtgcctctcatcctctgatcgcctcagctctgatgttcttgcggccctgagcaacgtccgcgcgctgcgttacctgaagctgatcgcgcgtcacctggacaggttcgtgatcgaacgcggcgatctgcagagcctgcgacgcctgcacatcgtggtggtgtccatgacgacgatgagcaagcagcagccagagatccaggagggagccctgccgaatctggagtcgttccatctcctctgcaaggatctggatggcccctgcggccatggaggcatcaggatcgactccctcgggctcgggtgcctcagggagattgttcttgacgacggagttcgtgagacggcgaaggagcagtggaaggacgcggcgaggcggcacccgaagcggcccaaggtggtgttcgtcggagcgggagacgtcgtcgatcggcggcgggtgggtgctgctgctgctgccgcgcctgcagcaggagagagcaattctgcgatggcaccggcggcggtggcttcggtggtggccgccggcgacgtcaagaggccggctagggaggaatccgatatctccgccgcgctggcgagccttccggcgaagatggcgaggctgctcggcgctgcgagcatccaccagagtagtgggactcagggcgagctgtcctgcggcgggaacggagcatcacagcgccatttcagctagacagagatacagagagcatagcgtggtaacgggtaactatctctgttacctctgttccatattacatgtcgtttttagttatattctaagttgaacttgtatagttttgatcgagttacatataaaagtaaatactactccactataagagcaggtacaatagcaaattataagctagctatacacatattttaagaagataaaataggggagagaaaagcagtcggctacatatttgtagccagctatagtatggactctgagacacattgtgtgtgtatgatagatgagaccagatttaatagggtagtatgtaactgttgtatgaattagctattaaattaactatagatgatttaaagct

SEQ ID NO: 17061 - DNA, 3268 bp, Oryza sativa
  ref <308>: DATABASE ACCESSION NUMBER: AK067525
  ref <309>: DATABASE ENTRY DATE: 2001-12-06
gctaagtggatactggaagttccttttggcttcctcgccagaatctgttccagagaaattctatgatgcctacttcaatgattcagattgggaggctttgccagttccctcaaactggcaaatgcatgggtttgaccgtccaatctacacaaatgtcacttatcctttcaccatgaacccgccatttgtgccaaatgataatcctactggctgttataggacggtttttcgcatcccaaaagagtggaaaggtcgaagaatcttgttgcactttgaagctgttgattcagcgttttttgcttgggtaaacggcgttcctgttggatatagccaggacagcaggcttcctgctgagtttgagatcacagatttctgccatccttgtgactcagaaaaggaaaatgttcttgctgttcaagtgatgaggtggagtgacggttcctatcttgaagaccaggaccattggtggctatctggtattcacagggatgttctactagtatcaaagccacagatctttattacagattattttttcaaagcaaccttggatgaaggcttccgtgtagctgatattgaggttgaggtggaaattgactcacaaaagcaggatcgggagcatgtctcaactttgtctattgaagcaacattgtatgacaattatggacctgctgatgttttaacttctgatatgtctgctgctagtgtggccaatttgaagttgaagccagcttcaagaccaaaacactgttatggttttcatggttatgttcttggtggaaaagtagaaaatccaaaactttggtctagtgaacatcccaacttatacactcttgttgttgtccttaaagattccaacgggaagctcattgagtgtgaatcatgccaagtaggaatccgtaatgtcgtcctggcacacaagcagatgcttgtcaatggatgtcctgttgtaataagaggtgtcaacagacatgagcatcatccacgtgttggaaagacaaatttagaagcttgcatgattaaggatctggttttgatgagacaaaacaacattaatgctgttagaaacagccattatccccaacatccaaggtggtatgagctgtgtgacatttttggactttatgtaattgatgaagccaacatcgagacgcatggctttgatgaatctagccatttcaaacatcctacacttgaacccttctgggcaagtgctatgcttgatcgtgttgttggtatggtggagagagacaagaatcatgcatgcattatagtatggtccttgggaaatgaatcttcgtatggaccaaatcactcagccatgtctggctggattcgtggaaaggacccgacaaggcccatccattatgaaggaggtggttctagaacatcctccactgatattgtatgcccaatgtacatgcgtgtctgggatattcttaagatcgcacaagacccttctgaaaataggcccctcattctttgcgaatattcacatgctatgggaaacagtaatggaaatattgatgcatattggatggccatagacaacactgttggactccaaggtggttttatatgggactgggtcgatcagggtttactaaaggaagatgctgatggatctaaaaactgggcatatggtggcgactttggagacactccaaatgacttgaatttttgtcttaatggcattgtatggcctgatcggacaattcacccagctgtgcatgaagttaaatatttataccagcctatcaaaataacaatgatggataacatgcttaagattgaaaacgtacatttttttgagacaacagaagctttggacttcagttggctacttcaaggagatggctgtgctttgggctctggttcacttaatgtcccatccatagcaccacagagtactcatctgatcaatatgaagtcatcaccttggtttactatttggagtacttgtgtcgtaaaagaaatatttttgtccattaacgtgaaattgaggtaccaaacacaatgggccaaagatggccatatcttggcttcagcacaaatttgtttacctccgaaaaaaggctttgtccctcatgcgatagcactgcccaggagctctttggtttcggaacgtgttggtgatcatgtactcatcagcaaaagtaatgcctggcaaatcaaagtaaacagtatttcaggaacaatcgatagttggaaggtcaacaacattgagcttatgagcaagggaatacacccatgcttttggcgaacaccaactgacaacgacaagggaggcttctacaccaagccctatgtttcaagatggagagaagcttctctcgacaacatctcgttctacagcagccagttttctctgaaggaattgccagaccaaaccgtcgagatctccaccatctactacggtcttcctgggaatcaaccaaagcctgatgaaacctctctctcagacgaatccgagtccgtcctcttccgggtgcagatgcgcggccggatctacgactccggcgacgtgatcctggactacgaggtgagccccaagaacgacctgcctcctcttcctcgcgtcggcgtcgtgttcaacgccgacaagtccctgagccgtgcaaaatggtacgggagggggccattcgagtgctacccggaccggaaggccgccgcgcacgtcggcgtgtacgagagcggcgtcgacgagctgcacgtgccgtacattgtccccggcgagtgcggcggccgggctgacgtccggtgggtggcgctccaggacgccgacgggttcggcctcttcgcgtcggcctacggcgagtcgccgccgatgcaggtgagcgccagctactatggcgccgcggagctcgaccgcgcgacgcataaccacaagctcgtcaagggagacgacatcgaggtgcatcttgatcacaagcacatggggctgggaggggacgacagctggtcgccgtgcgtgcacgagcagtacttgctgccgccggcgagatacgccttctcggtgaggctgtgcccgttgctgccgtcgtcgtcgtgccatgacatctaccactctcagctaccctgttgatccgtctgagatgggcaagtgaggcaataaagcagagacgtatatatgctcctgtaaactaccggctgcaatgaccaggttgtttgtcgactgtgaaataagcgagcgagcttgatgctattcctcaatcttgactacagtgtcaatttctcctataaatggcaatggggacccatgaccctg

SEQ ID NO: 17062 - DNA, 1520 bp, Oryza sativa
  ref <308>: DATABASE ACCESSION NUMBER: AK067526
  ref <309>: DATABASE ENTRY DATE: 2001-12-06
gatcttcttcttcttcttcttcacttacttgtccatcttctttcttcttcttctccacttacttgtccatcttcttctcctcctcctacctagcttattgttgttggtagctagcgagctcactcctcactcactctctgcccttcctttcctaccatacctctcaattattcctttcctaccatacccctcaattattagtaagatcgattattagtcccagttagttgctagctacaaggaattgaagcaacaagttgtagcagattgagagagagttgggaagaattacacaagaaatttagagaaatagtactagctagctagcaagaatatagatatataatgtcgatcaagcactgcgagcaacacaaggattgcgagcggcagcgcctgtaccggcgttgctgcgcggccatcttcggcatccttctcctcctcctcctcatcgtcctcatcgtctggctcatcctccgccccaccaagcctcgcttctacctcaacgacctcaccgtcgtctgcctcaacgtcaccaccggtggttcctacgccggcgccaccgcctcctccggctacttctccttcctcaccgtcaccatgcagaccaccctcgccgcccgcaacggcaacgagcgcgtgggcatctactacgaccgcgccgacgtgtacgccgagtacaagggcctccgcatcaccgtgccgacgtcgctgccgccggtgtaccagggccacccggacctcaccgtctggtcccctttcctctccggcaacaacgtccagctcccgccctacctcgccgtctccatcacccaggacgagaccgccggctacctgctcgtcaccatccgcgtcgacggctggatccgctacaaggccggcgccttcatcaccggacactaccacctccgcgtcaggtgccccgccctgctcatcgtcaacgacggccggggaagctacggctccaactccggcggcggcaacggctacttcaggttccagcgagccgccgcctgcgtcgtcgacgtctgatccatccatccatctcctcatcctcctctcatgcatccaacaaatcatatcatccttaattaattctcctccttccatatataattgcttgcttaattgatcgatctacattctacaagcacagccctgatgaagaagctatataattaaaagctcagctcaactgatcgagtgaggatcggagtaatcttgcatatatgcctgccaccagtggttttatgtatttacagtacgaattaatttgacctttttcttacttaattttcatgcctgtgttttttttggtactacgtacagtgccatgcttgtggctagctgcatggttcaggtgtacagctacttgtagtaataattcgcatatagagaggggataattaagcaattgctacaatcttgtaattactactaggatatataataattgtacttatcttcacatgcatactacatagttgcaacattgtaatcaattaatgttctgttcatttttc

SEQ ID NO: 17063 - DNA, 1561 bp, Oryza sativa
  ref <308>: DATABASE ACCESSION NUMBER: AK067527
  ref <309>: DATABASE ENTRY DATE: 2001-12-06
gaggtatggcggacgccatggcatgctatattggaaggtccgcccatggtggcaactgctataaatagctaccctaccccgcctccttccttctcaacctcctcctattctctctctctctctctctcttcccccagatgcgaaattcctgccccagctcaacccaaagctccgtgccgttacctcctctctattctccaaccgtttcctccctcttcccggaaggggggcgttctggcgcagctgattgatttgattgaacctcgaggccgattgattgggtccgagtaatctcggaaatgtggggttgttgcggttgattttttgtatttggtgttgctttgatgtttgcttgcgttctccgatggaggaggcaggaagagagaaggataggtcggtggtggtggtggtagaggatttgggcacagccactaaggatacagtcaacccaagcgcgaagtctacaaggaggtaccctctcctgtcatggacaactatattggccttgatcgcgcttgtcggagtatacattttctcagtgtctttgaagcaaaatgggatgcttcttggtcttaagcagacagacatgatagaaaaagaaagggaaaaactttgccaggaccccagcattccggtgactgagatcccttatgtgcattatcccacacctgatacttacagtaggaaagaatgtgcatgcacaccagttaggttcttcgctatcttgtcgatgcagaggtcaggaagtgggtggattgaaacattattgaatagccatgagaacattagctccaatggagagattttctctatcaaggaaaggcgtagtaatatcacttcgatcacaaaaacattggataaattgtacaatctggactggctcagcagtgctgctaaaaatgaatgtactgcagcagtggggttgaaatggatgctgaatcagggtctagtgcaacatcatgaagaggtagttgaatacttcaaccgaagaggcgtgtctgcaatcttccttttaagaagaaatactctccagcgttatgtctctgtattagcaaatgctcatgatagtaaggcaaagcagataaatggaactcataaatctcatgtgcactctgaacgcgaggctcaaattcttgctcaatttaagccagaaatagacacaaagaagttgatcgccgatcttaagaaatccgataagttggccgctgatgctttactgtacttcaaaaagacacgccatattattctgtattatgaggatgttgtcagcaatgatactgtgagtcctattgctttatatatccttgtccggaggctgaatgagcatctctctctctctctctctctctctaaacagctttttttttctttcttcagaagctcatggatgtcctggattttctgagattgcctaagagaaagctgtccagtaggcatgtgaaaatccataccaaacttttgcgtgatcatatagataactgggctgaagttaatagtactttgatgggaacacagtacgagagtttcctgaatggctgaaggtgactgaactagcttgccc

SEQ ID NO: 17064 - DNA, 1239 bp, Oryza sativa
  ref <308>: DATABASE ACCESSION NUMBER: AK067528
  ref <309>: DATABASE ENTRY DATE: 2001-12-06
gcgccaattcgtcttccatctcctcagctttccaagttcttcgctttcctttgcaccattccgtattcaaagatccactgccctttctctttaactgacgggaagacacaaggaagccatcttgacagctctaagatcggacctgctggctgctgctgtgatttttggatggaccagatgtagggatctccaaagaagcaatcagccctcttgatttacgctgcctcttgccacggtgtgcactgtgcagttgcagagtagagcatggcattcagtcacctcctccacgccctcctcgtggccgcggcgttgccgctgctccttctcccccgtgctgcagatgctggcgagatcggggtgtgctacgggagggacgcgaacaacctgatcgacccaccggcggcggtgagccttctgaaggcgaacggcatctccgcggtgaggatcttcgacgcggaccagacggtgctggacgcgatggcgaacaccggcatcaaggtgatggtggcgatacccaacgccgatctggccgccgccggccaggatctgcgcagcgcgaccgactgggtgacgaacaacgtggtgccgtatcgcagccggggcacgctgatcaacggcgtcgccgtcgggaacgaggtgttcaggcagagacccgaactggccgggatgctcgtctcggccatgcgaaacttgcacaaggcgctggagaacctgaacctggcgaacgacgtaaaggtgtccacgccgatcgccttcgatgcgctcaagcagtcgtcccctccatctgcgggggagtttaaagatgagatcgcgcaatcggtgatgaagcccatgattgacttcttgaaacagaccggctcgtacttcatggtcaatctctacccgtacttcgcatacgtggctcagcctgacactaaggtagcacacgcgacctatgcattcaacgatttttaccagaccaccggccgggctagtggatcgtgtgactttgccggtgctgcttctattgtcaaccagcaaccaaaaataggaaactgcgtgctcccaccaaacaatgctgggacagaacaaactgcaattgaagatcaatcgactgcaaacttaccagcaacagcttggcagtgaggatggattaaagaatcacttcatatttttctgcagagaaaaaaataatggtaccattaataattagttgggattgaagagacgaataaatgtaccgttcactcctgttgaatg

SEQ ID NO: 17065 - DNA, 1622 bp, Oryza sativa
  ref <308>: DATABASE ACCESSION NUMBER: AK067529
  ref <309>: DATABASE ENTRY DATE: 2001-12-06
aactccgcgccccctagccaagcagcacgagcacacgagaaaacaagagaaaaaaagcagcagcggccatggagggatacgaccgcgagttctaccagttcagcgaccagctgcggctgcagacggcgagcttctccggcctctccctcggcgactccatctggtcctccccctccgaccgccgcaacgagccggccttcgacggcgagtaccaccacttctcctccccctcccccgccaagaacgccatcgccaacatcaacggcgtcgccggaaacctggatggcccgggcctcatcggctccggcaagctcgccttcggcgccaccaaggccgaccgctacaacagcgtcaacctccccgtcgacaacaacaacaacaacaagtcctacggcggcgccgccaagatcaacaacaacaacgtcaacgccttcgggttcaacaagatggggggttacaacaacagcagcaacggcggcggcaactacggcggcaacggcggcgacgtgaagagctacttcaacaagtcggtcgggaggccggcgagcaacaacaacaacaacaatagtaacggcggtggcgggtactacggcaagaagggcggcgacggcgccggcgggaagaagaagcacgccaagaacagcgacagcggcgcgcaggcgtcggacaagaggttcaagacgctgccggcgtcggaggcgctcccccgggacgaggccatcggcggctacatcttcgtctgcaacaacgacaccatggaggaaaacctcaagaggcagctcttcgggcttccatcgagatacagggattcagtgagggcgatcaggccagggctgcccctcttcctctacaactactccacccaccagctccacggcatcttcgaggctgcgagctttggcggaacaaacatcgatccgacggcgtgggaggacaagaagtgccccggcgagtcgcgcttccctgcacaggtgaaggttgcgacgaggaagatctatgacccgctggaggaggacgccttccggccgatcctccaccactacgacggccccaagttcaggctggagctcagcgtcgccgaggcgctctcccttcttgacatctttgcagacaaggatgacgcctgaggctactgcttccctgctgctgcttgctgaagaatatcaggggactgccggtgaaggacacaagtaataaagattcgacgtgtatccgttgtgagatatacatacataaatacataaatacaagtagtaagtaattaacggtgtgtgctgatgaatttggaacgattagtacaatttctgagggggtttcccatctcgcgggctaagagatgatgcgtcccattgtattttttttaatcatgtgcgatgatgatgacttcagtctgcagaggattagcccctttgttgttgtaatatttatacacacgttatttgcttctggacggccagccatgtataatactttgagacctctttctgtttctcctgttgtaaaatcttttgacagaataaacagccatagtctctccagaggcgagtacttcacttttacacatgagaatgtcttgaacggaatttgtcttggtatcattaatcaataactcccttagcccc

SEQ ID NO: 17066 - DNA, 1397 bp, Oryza sativa
  ref <308>: DATABASE ACCESSION NUMBER: AK067530
  ref <309>: DATABASE ENTRY DATE: 2001-12-06
gaaaggcatccgtatccaatggcagtctcctctttggccttcgctagagtcctcgtcccgccatctccaagaacagcattagcttcggcttgctcccattctatcaagatgtgcgcttcttcagcctcaccgtcggagtcaaagaagaccgtctgggtgtggacaacaaatcggcaggtgatgacggcagccgtggagaggggctggagcactttcctctttggatccaaagatcttggcaaggattggtcatctactgctcgcatcaatcctctttttatcgatggcctggagatattcgatgagaaaaaacaaaagattgctgtaatttctgaagtctcttccccaggagagctggaactcatacaaccagacaatgtggaagtggaaaacatcgtgatagacttccgaggtggatggcaggttataccagcagaaaatatagttgctgcattccagggatgtagaggaactgtattggctgtttcaacaaactcaactgaggctcaggtttttcttgaggccttggagcaagggcttgatggagttatacttaaagtagaggacatggatgatattatcaaactcaaggattattttgacagaaggaacgaggcaaagagccagttaatgttgacaaaggctactgtgtcaaaggttgaagttgttggtatgggtgatcgtgtttgtgtggatctttgcagtatgatgcgacctggtgaaggccttctggttggctcctatgcaagaggaatgtttcttgttcactctgaatgcctggagacaaattatattgcaagcaggcctttcagggtcaatgcgggccctgttcatgcatatgttgcagtccctggtggccgaactagttacctctcagagctgcaatcaggtcgggaagtaatagttgttgatcaaaatggtttgtggcgtactgcgattgttggtcgtgttaagattgaatcaaggcctctaatccttgtagaagcaaaggagaacggtggagatgatacttacagcattttcctgcaaaatgccgagacagttgcacttatcactcctgaaaaaggatctagtggaagaactgctatacctgtgacttcactgaaagttggtgatgaggttttggtgaggaaacagggcggtgcccgtcacactggaatagagattcaggagtttattgttgagaaatgagactgcgtcagttattcagttacctgctagcaggccagtctttgttcttcccaaacaattcttttgctaattcatgggagtgaaaattcacaccaacttatgataggggactatctgaatcatcattgaattcgagccatgtacatctgtatatactatagtactagtaacttttaagtcaaggaggaaatttccatttggatgcg

SEQ ID NO: 17067 - DNA, 2025 bp, Oryza sativa
  ref <308>: DATABASE ACCESSION NUMBER: AK067531
  ref <309>: DATABASE ENTRY DATE: 2001-12-06
ttgtggtattggcattggcaatgctccttcctttcattgcattgttaactggagttgctgtctggtcttacctctctccttcagatattatgaggaatcagccacatctgcttgtgatcggaactggttttgcttttggatatttggtggtaagtttttaatttgttttgcccctagcatggattttaatcgatggtttaacacaggattctacctccttcctcagtgcgcaatcaccaattcactggagcagccactgtcatacccattgttgtcatgcttatcagttctaaccacatggttcctgctaggccttgcctatccttaaaaacagccacctgctatgagttcaaatttcaaagcaaccaggggcactccatgctccagttctcttcactatttcagcattcttcatgcttcagttagtgagagcctgagagggcaccaaggacaaaaatcgtttttgaaaccagccttgtttcaatacctgaggggtgtcaagtatccagttttagagtttagagtcaaaatgcggcctgctaagagtttagagtcaaaatgtggtctgctaagagcaagtaaaaacttcctacattttggaaatggatctttgttagtaggttactagaaaaacagtaggctgcttcgatcaggttttgatcaacccatctaacctataaaaatactataaactatatgaaataatgaccaaattatacagaactgtgcagcagaattgcaaagggtccatatgcagataaatcaggccaatggtatttgggcatttgtatcactgttgtcttgtggcagcaattagttacgcaactgaacatgcctgccatcagctgaccttgccttttgatctggaaagggtggtaaactgaatactgtttagcttgttttgtggacgatatatcatattggatattcttgtgttcattaaatgtggatcagcatttcatcaacttgcagttccttaattactttcttatagttttcattatagttttcatctttgcaaaactttcttatgatctactttgatctatctgcacagcagttataagtctaggaatttttatctaaccatcacaaatcactaattaggttatatctaaccatccaagttatattgcgacaattaaaaacttgatagtcccattatccgcctggatttttatgaaaagcatttatggctaacatgcacaacatattggtactgatatactgttgctgaagaagcacctaatgccacttggttcacctaatgtgccactgcgctttgttctttactgaatagtgatggagcatttttctgtagagtgagatttgcaaacatagtgcataatactaatctaccatcatccttgtttttccttcctggaattagagctcatattttgagttgccatgcatggacagggaaggatgatacttgctcatttatgtgatgaacccaaaggtctcaaaactggaatgtgcatgtctctggtgtttcttcctttcgctattgcaaatgctctcacagcaaagatcaatgctgggattcctttagttgatgagctgctggttcttttcctgtattgcgcatacacagtgggcctttacctgcatcttgccgtttctgttgtgcatgaaatcaaggatgctcttggaatctattgcttcaggataactagaaaagaggcttgaatgtgttctgagttcttacatagcaataggaggcattctgtcaccttgtttcgttccagatatttttgcctttggccataccaaatctcatcggtgtgcatcctggggtcctgccccttgaacaccacaacaagcagtcgtttgatctgtttgatgcagatggatacttttggagtgtaatgcagaaatatctttagtcctatatatgtacatgttgtacacccagcttttgacgtacttttgggttccatagttaaggaatcgataggttttgtactatttagatgacgggaggatgaactattattgcaagtgtggagtcgtgccttgagc

SEQ ID NO: 17068 - DNA, 1518 bp, Oryza sativa
  ref <308>: DATABASE ACCESSION NUMBER: AK067532
  ref <309>: DATABASE ENTRY DATE: 2001-12-06
ggatcagcagcagccagccgccggcgagctgtgccgttcttgatcaccgaggcgatggcggcggcggcggcggtgctgcttgcggtggcgtgcgccgcggcggcgatgatcgccggcggcgagtgcgggagggtggtgcacgtgggggaggagcaccggaggagcatgctcgccaatggcctcgccacggctcctcccatgggctggaacagctggaatcacttcgcctgcgacggcaacggagaagacgtcatcagggagactgctgatgcacttgtgtcaaccgggcttgcagctgctggctacaaatacgtcaacatcgggtaatcttgtggccaacaaaaagacattcccccacgggatcaaggcgctcgccgattatgttcacagcaaggggctcaagctaggcatttactccgatgcaggattcaagacgtgtgcgaaggttcagccggggtctctcggccacgaggagcaggacgccaagacattcgcatcgtggggagtggactacctcaagtatgataactgcaacaatggcgacctgaagccactggagaggtacccggagatgagcaaggctctgatgatggccggccggccgatctacttctcgctgtgcgaatggggcgacatgcacccggcgaagtggggcgcggcgtacggcaacagctggagaaccaccaacgacatcgcggacacctgggagagcatggtgtcgagggcggatgagaacgaggtgtgggcgaggcacaacagcagcagggttcatgctgtgatgcagataagaatcccaaggatgtgccaacctatgagcgctccgtgtcactgcccccaactttgaagatcatatctgctatgaaaggaagccgccaaaagaatgggatggcttcatcaactgaaagtcgccacgtcaaatgggcccctgacgtgtatgaccccccagtgacatctgtatgtcattcagtgaataacagctaccagcgtcggtccaaatcccggaagaaggacaagaataagcagaagcagaaacaaaagcaaaagggtaggtccaagaaaaaccaccagaatgctatccagagttcagcagtgctccaagctcctggcgaatttgataggctcaaggatgctgaaaccacaagtagtaattcagcaccagacgatctcaacaaacatgagaccgatatattggattatggcatcagcagtcaagacgccaaatgtggaagcagctttttgcgtgaatcggctgctaaaatgcatttctccactgctgaggcttcctgaaagaaaggaaaatgagtcctgcggattctcccttggtatgtaaatatgatggatgtgtagataaataaaatccagtttgttgttgtgtttcctgctgtgtgaggcgttaagagaacttctggcgtgctttgatttggagcagttaccatgactgttggactggtttttgtatgtattgatggacaaagctagtaagcattaatctatgagctgcagttgttttccttgatc

SEQ ID NO: 17069 - DNA, 1089 bp, Oryza sativa
  ref <308>: DATABASE ACCESSION NUMBER: AK067533
  ref <309>: DATABASE ENTRY DATE: 2001-12-06
gaaagtgcaccgccgccgctacatccgagggtgcttcgtgccttcgtctgctcgcttcatctgctgggcggtggctcggctgctccggctccggctccggggagaatccggcgtgagcgattggggagtgggcctgcctcgacggcgttgaagcgggaccgccgggatgtcgccagccgccacctcctcgtcgccgccgccgcgcgagcgcacagcacggccggcgggagccgcgcgcgcggtggcatgccccgtttccattccccgacgctcccttcgtccaagggtgaagaggttcgaatccaaggagacgaattctggcacatgacaagagtcttgcgccttggcataaatgacagggttgaactatttgatggcgcgggtggtttggttgaaggatctatacaaaaagttgacaaaggcggttcagatgtgaagttgcttgaggatgctagactcattgctcctgatggcattcaatggcatgtttatgctgcatttgggacattgaaaggtggacgtgcagattggcttgtagagaaatgtactgagcttggagcttgtagtgttacacctcttcttacagagcgatgccatacaatagcagaaaatagagttgacagattgcaaaggcttgtgttagctgcagttaaacaatgccagagaatacatggaatgttgctgaatcccccaattcagatagctgaccttcagcctgttgtatcacagtcaaagctcgctttcgtagcttcagcagaatcacctcctcttttaagcactttgccgaagtcctgcaatgaagaaagtgggcttttgattgttggaccagaaggagatttcacggaagaggaggtaaacgttttgaaagcatcaggcgctgttcctgtaggtcttggtccatgcagactacgagttgagacagccacaatttcactgctatctgcgctcatgctgtggtcagatgctcatcgccaggaaacactgaaatgcaggtagtcaatgtagagctgtcacccatgtgctactttatactcgcattatgtccaaaccttttgaggtgatatcctcttaagcaagacattttaaagc

SEQ ID NO: 17070 - DNA, 2654 bp, Oryza sativa
  ref <308>: DATABASE ACCESSION NUMBER: AK067534
  ref <309>: DATABASE ENTRY DATE: 2001-12-06
gatatttcgatgcaaaagctcgtccggtggctggccgacggcgagccgaagctcaaggtggcttccattgttggatccggaggtgttggcaagacgacgctggccacagaattctatcgtctgcatggccggcggttggatgcgccgttcgactgccgggctttcgtgcggacgccccggaagcctgacatgacgaagatcctcaccgacatgctgtcacagctgcggccacaacatcagcatcagtcttcggatgtttgggaggttgatcgactccttgaaactatccggacgcatttgcaagataaaaggtacttcatcataattgaagatttatgggcttcatcaatgtgggatattgttagccgtggtttgcctgataataatagttgcagtagaatactaataacaacagaaattgaacctgtagctttggcatgctgtggatataactcagagcacattattaagattgatccactgggtgatgatgtctcaagtcaattgtttttcagtggagttgttggccaaggaaatgaatttcctggacatcttactgaagtttctcatgacatgataaaaaaatgtggtggcttgccactagcaataactataacagccagacattttaaaagccagctgttagatggaatgcagcaatggaatcacatacaaaaatcattgactacttccaatttgaagaaaaatcctactttgcaggggatgaggcaagtactcaaccttatttacaataatcttcctcattgtttgaaagcatgtctgttataccttagcatctacaaagaggactacataattaggaaggccaacttggtgaggcaatggatggctgaaggtttcatcaattccatagaaaataaagtcatggaagaagttgcagggaactattttgatgaacttgttggtaggggcctggtccaaccagtagatgttaactgcaaaaatgaggtattgtcatgtgtagtgcaccacatggtattaaatttcatcaggtgtaagtcaatagaggagaatttcagcattacattggatcattctcagacgacagtaagacatgctgacaaggttcgccgactctcgcttcacttcagcaatgcacatgatacaacaccactagcaggtttgagactctcacaagttcgatcgatggcatttttcggacaagtcaagtgtatgccttccattgcagattataggcttcttcgagttctgattctttgtttttgggctgatcaagagaaaacaagctatgacctcacaagcatttctgaactgttacaactgagatatctgaagataacaggtaatatcacagttaaacttccagagaagatccaaggactacaacacttgcagacactggaagcagatgcaagagcaactgctgtcctattggatattgttcatacacagtgtttgttgcaccttcgtcttgtactacttgatctgctccctcactgtcacaggtacatcttcaccagcatccccaaatggactggaaagctcaacaatctccgcattttaaacattgcagtcatgcaaatttcccaggatgaccttgacactctcaaaggactgggatctctcactgctctttcgctgcttgttcgaacagcgcctgcgcaaagaatcgtcgctgcgaatgaggggttcgggtctctcaagtacttcatgtttgtctgtacagcaccatgcatgacttttgtggaaggagcaatgccgagtgtgcaaagattaaatctaaggttcaatgccaacgagttcaagcagtatgactctaaggagacagggttggaacacttggtcgcccttgcagagatctctgcaagaattgggggcactgatgatgatgaatcaaacaaaactgaagtggagtctgccttgaggactgcaattcgcaagcatccgacgccgagcactcttatggttgatatacaatgggtggattggatctttggtgctgaagggagagacttggatgaagatttggcacaacaagatgatcacgggttttgtatgctaccggaatcctcttcacgtcttcagagtagagagataagtatcgaagaagacatgcccaccggtgcggaagggacggtgattgtgccccacacaatggagcagttcgccctccacatgagccaagccaagcaatcccacaagctcgtagtcatccagttcactacttcccggtgccctgcttcacgctacatcgcgccagctttcaccgagtatgcgaaggagttcgctggtgcggttttcattaaggtcaatgtcgacagcgatgagctggagagtgttacggactggtatgacatcgaagggatagtgccaacatttttcttcgtcaaggatggggagaagattgacaagattcctggtgctaacaaggagttgctccgagccaaaattcgaaggcacacagcttctccttacttcctccgttgataatgacttcttttatcgtctttgtctagtatatatatggcacttatatagttaactaggaagggcaccttgtttaatgtagctttcatttttattatgaatgttaaggatgatattatattgttgaagtatttttttactccttgtaaacatgtattggttaataacgaagtagtttggacatc

SEQ ID NO: 17071 - DNA, 3286 bp, Oryza sativa
  ref <308>: DATABASE ACCESSION NUMBER: AK067535
  ref <309>: DATABASE ENTRY DATE: 2001-12-06
gtgatacaggtagagagaggtgagaaggcagtggtgggagatccatctgcgaggtgcctccatggctgagaaggagggcaacctcgacgccgtcctcaaggaggccgtcgacttggagaatattcccctcgaggaagtgtttgagaacctgagatgcagccgcgagggtctcacaactcagcaggcgcagcagcgcctcgaaatctttggccccaacaagcttgaggagaaggaggagagcaagttcctcaagtttttggggttcatgtggaatccactctcatgggtcatggaagctgcagctatcatggccattgcgctggcgaatggaggggggaagccaccggattggcaggactttgttggtatcataactcttcttgttatcaactcgacaatcagtttcattgaggaaaacaatgctggcaatgctgctgctgcactcatggcccgtcttgcaccaaaggccaaggtgcttcgtgatggccgatggactgaggaagaggcggccatccttgtaccaggggatatcgtaagtattaaacttggagacattatacctgcagatgcgcgtctccttgagggagatcctttgaagatcgatcagtctgccctgactggagaatcattgcctgtcaccaaaggtcctggtgatggtgtctattctggttcgactgtcaagcaaggtgagatcgaagccatagtgattgctactggtgttcacactttcttcggaaaagcagcacaccttgttgactcaactaaccaagttggtcatttccagaaggtcctgacggctattgggaatttctgcatttgctcaattgctgtgggaatgtttgttgagatcattgtaatgtaccctatccagcacagggcataccgccccgggattgacaacctccttgtccttctcattggaggcattcccatagccatgccaacagtcttatctgtgactatggcaattgggtcacaccgcttgtctcaacagggagcgatcacaaagagaatgactgcaattgaggagatggcgggcatggatgttctttgcagtgataaaactggaactttgaccttgaataagctcaccgtggacaagaacctcattgatgtctttgaaagaggaatcactcaggaccaagtgattctcatggctgctagagcatcacgaacagaaaaccaggatgctattgatactgcaatagttgggatgctagctgatccaaaagaggcccgtgctggtattcaagaagttcatttcctgccattcaatcctactgacaaaagaacagcattgacatacattgatggtgatggtaaaatgtatcgtgttagtaagggtgcacctgagcagattctccaccttgctcataacaaaccggagatagagcggagggtccatgctgtgattgacaaatttgcagaacgtggacttagatcgcttgctgtagcataccaggaagtaccagaggggacgaaagaaagccctggtggcccatggcattttgttggtctcatgccactttttgatcctccaaggcacgacagtgctgaaacaattcggcgggcacttaatcttggtgtcaatgtcaagatgatcacaggtgatcagctggcaattggaaaagaaacagggcgtcgcctgggaatgggtacaaacatgtacccttcatccgctttgctgggacagaacaaggatgagtccattgccgctttaccagttgatgatctcattgagaaagctgatggctttgtgtattcccagagcacaagtatgagattgtgaaacgtctgcaagcaagaaagcacatatgtggaatgactggtgatggtgtcaatgatgctccagccctaaagaaagctgacattggtattgctgttgctgatgcaactgatgcagccaggagtgcttcagatattgtgctcacagaacctggtcttagtgtgatcatcagtgctgtgcttacaagtcgtgcaattttccagcgtatgaagaactacactatctatgctgtctcaatcaccattcgtatagtgcttggatttatgctacttgcgctcatctggaaattcgatttccccccttttatggtcctaatcatagcaattctaaatgatggtaccatcatgactatatcaaaggatcgggtaaaaccatctccactacctgacagctggaagctggctgagatttttacaactggagttgtcctcggtggatacttggcaatgatgacagtaatcttcttctgggctgcatataagacagactttttcccgagaatatttcatgttgaaagccttgagaagacagctcaagatgatttccaaaaacttgcctctgctgtttacctccaagttagcaccatcagccaagctctcatctttgtcacaaggtcccgcagctggtcatttgttgagcgccctggatttctgctggtctttgctttcttggttgcacagctgattgctacactgattgctgtgtatgctgactgggcgttcacctcaatcaaaggcattgggtggggttgggctggtattgtgtggctctacaatctaatcttctacttcccactcgacattatcaagttcctcatcagatatgctttgagtgggaaagcatgggatcttgtcattgagcaaaggatcgctttcacaaggaagaaggactttggtaaggaggagagggagctcaagtgggcacatgctcagaggaccctccatggactgcagccgcctgatgccaagatgttctcggagaaggctggctacaatgagctcaatcagatggctgaagaggcgaagaggagggcggagattgccaggcttagggagctccatacgctcaaggggcatgtagaatcggttgtgaagctcaaaggcctcgacattgagaccatccagcagtcttacaccgtgtgatccagcctgtccataaagaaagaaaaaagaggattattttttttccagattttcctgtttcgctttaacttgactgcaattctgcaatcacctacgtgtacttgaaccgaattgctgtaatctttgtccctcctgctccagctttctactacatggtagtgttatataatttttggtcacctgaaaatatataagtgtttgaggtgaagcacaatggcaatgccagagtttttttgctcggttactgagaagcatgttttcataatcaatcggtcaattgtatggacatattatagatgaatttggtaactgtttgtgtgggggcagctggcagtatgtaacatgtgggcttcaatgt

SEQ ID NO: 17072 - DNA, 3474 bp, Oryza sativa
  ref <308>: DATABASE ACCESSION NUMBER: AK067536
  ref <309>: DATABASE ENTRY DATE: 2001-12-06
gaatctccgttccaattttgtgcacgtacaaaaaaaagatctccggaagagaaacacaacatggaaacataaattttgatgttaccctgtgcaaccctgcaacgcggcgctcgacccaggccccccggtcgcacgcatccgcgccccgtgcgcgcggctctcacgccatcgcgccgacgatttcgttccgcgaggcaacgacgtcggcgcggcacaccgggcacgtcgtccccctctgcagccacaggcagatgcactccgcgtggtagacgtgcccacacggccgcagccgccggcacggctgtcccccgccgtccgcgaccgcgaccgcgagcctccccttgcagatcgcgcagagcgccacgtcgtcgcccctcgcctccgtggcggcggcgacgtcgatgatgacgacctcctccttgttcagcaacccttggcgctccccgttgggatcgccggtggcgacctcgaaccgccggccgattaagcatcgcacggtccaggagatggcacagatcgcggcgatgagcgcgacgacggcgaggaatatctcgaggcctgacagatcaaccatcggcgagagttcgttttcgtagctaggtacgtgttgctggctcgatcgtcttggcgagtggtggaaccctgcacgcacgcgtacgtattaacgtataccagtacgtgctccggctccaggtacgtttgttactcctacttgtttcctatactgatttgtatttcgaaaaggtttgtttttttcccagatattactgcggagataattaaacagttcgtatcagaggagaaaatcgttgtggctgatctccacgtctttgttactcccacaaaaatatgaacaaattatggctcgcatggatgctagtagtatttctgcttgctttttgctcatggaaattattaaaggactaggcaactgggcatttaaggagtggcaactgacaagtatgggctaactcaaaggcgcagacataatcaattggaagagtgcttaaccacgagcatcagttagttttacactgaggcattggggacatggcattacttatctccaatcgtgtggtgttcatcagaaagaaactttggttaaagctttgctcctagggggttgtttattgtgcaaacacacaagtaggctatttgatggtgcaaaatattgtaagtgtatgtggatgggcagagcaaattattccctccgaggaatctcagttatcattcaagattgaccctgaggaccactagatagcagtagaaacataaaatctgaacaacactgagcgccattcagcactgtactacctctcccaaattcaacttccaccaacccaaaaaattcttctttactgcatcgtgacacggcatgcaacaccgtcagaaaaaacgaaaaacgtggcgataccctctgaatattcccgctttctatccccatggtaaagatctggaatagaaggccagaagtcagatctgcagttacagtctttacagagcctaaaattaactaaaattaaatggcatagccgcatgggcagttacagtctttgcattgagtcagagataaatgagagattagggtttacctagccccgcttcctatggtcggccaagtccttagcatctggggattacaaaagaaaactgccccgagtgagtggctcccactcgccttcctcgatccacccttttttgttgttcgaatccattggagcccacgaggtctttgcctcccattctcccaaaaccacttggattctcgaagattcagagcagggacctcaccttcgctgcagcttttttctttcaggcttttggcttcttggatccgtgcaggcgcgagaattcaatggcggttattggagcttcttggggtggtcactgaagtagaccagtagtacgcagtcttgcgatggagtcggcgacggagaaggtgaggaggacgccctcctcctgcctgctgctgcgcatctccgacatctgcaaggtgcgctccgtcggcgtcgcgccgaccgtccgcgaaaagcccaaggccgacggcagcgccaccggagagagcagcgaagacggcggcgcgcacctgaaagtccacccgcatcatgtgtccgaccatgagagcgtctctgaatgctcctctgctcgctgcgaggaagcgtttgttgagaggcttctcgacgcgatttctggcctcaaattgagttacgtgaaccttcagcaagctcttgtgccatatgatcctgaagagattacgatcgctgatgagcgattcacatcggagcttcaagagactgccgggttgaaggatctgtatgtcaacatgaacaaatggagaaatccaatgtaccagtgctatgtgggctctagaattcaggagcaacaaaagttggccgtggagttgcaagctggcatgtgcaagagagactctgagattgtgtgtttgcgagcggagttggatgaactggaaaggaagaacatggaactggaggagaagatcggtcaaagtgcgttacagaaagaaggaagttttgcaattgggatgggagtatcaacggatatgtttatggaattattcgagctttcgacaaagtctatccatgattttgcaaaactcgtcgtccgttggatgaaactttctcggtggaatcttggcaacttaacatccccaatagacaattctgttgtctatgataaaaggtctcacaagaattacgccgttgaggcctactttgcttgtatgatgttgatggggcacaaagaggagtacctttcgctggatgtcttcgattatgtaatgagtttcagtgatccttttgatgctcttatgaaggccccagactcttgttttgggagattctgtcgagaaaagtatctggccattttgcctcctagtatggaggattcattcttcggaaatttggatcatagatcatttgttgagaatggcggccatccaagaacaccattttatcaggcatttgtgacaatgtcaagatatgtatgggcgtccctaaccgtagcacgttctctgaatccaagagcagagatgttctatgtcaagggtggtactgaatttaggagtaaacacatggaatgtgttccatccaagataaccaaagaaggagacaaggtcagtgttgggtttacagtaatgccggggtttaagattggatgcactgtcatcagatgcagggtgtatctgtccatggtcaacgaaagaaacttctgaacacgtcatatagctacagaattaggtaagcagcatcagataaccagttagctctatatagcatttcttttgacttgagtttctgttgagctcctcttatattagaccaggggcataagctaatagatagattagtgtattaacttgctctgtaatacttgatgtaatatttaacattttcagtcgttcaggtctgttaagtcgttgctttgttcgtgagtaaatggatcaattgaagaagg

SEQ ID NO: 17073 - DNA, 1002 bp, Oryza sativa
  ref <308>: DATABASE ACCESSION NUMBER: AK067537
  ref <309>: DATABASE ENTRY DATE: 2001-12-06
gagaatgctgtgttaggcaaggtagagtacactagtcacaaggctcgctctcttgcttaagcttgtgagcttggaaaagagtagtatattgagctgttgcttcgcttgctttagtttgcttgcttaccaggagaaagatatgaggaaggaaattgtcatcaggctgcagagctctgagaagggccacaagaaagctatcaaggttgctgctgcagtctccggtaaaaattccttgcacacccaaacacatatttcagcgaaatataataaaaagatggcgcttttcttgagttatcaagaaccaatagtaatttaactatatgatagatgtaataatcacacatatttcagcgaaagtatatataataaaaagatggtgatatttttcttgagagatcaagaactaatagtaatttaactgtaatcgatgtaataatcacggtgcatgagactgatcagactgcatgctactaatttgttctgcgtgaaccgatggagcagtacgccaacaacgacccggacagctgcgccatcatgtagctgcaccagctagtgtacgatcgatgctgcttctgctcgcgcgcgagcatgccggccgtcgtcgtctcgatcgtcacgatgatcggatgatcggaggacatattgcgaccgaatctagtagctgattgtcccaatcgataactggcccaaagtacgtagatataccttgaattttctgtgtgatgatgaggccgatttgattccgtgtgattactgaacaacagacaggtacgtacctgttgtctgaaactctgaagtctgaacgttatatgtgcagtagtatatgtgtagtagctgctcccggcctccaagtgtatacggtgtgcaagtgtaaattaggtgtactagggagatatatataaggtgcaagcgactttatagttcatcaaagtgtgctcatttgtacatgcaaattaaatctgtacatgcgactttatagttcatcaaagtgagtaattctgt

SEQ ID NO: 17074 - DNA, 1227 bp, Oryza sativa
  ref <308>: DATABASE ACCESSION NUMBER: AK067538
  ref <309>: DATABASE ENTRY DATE: 2001-12-06
gtgtgtcgcttcgtcctcactctcactctcctccactgagctaagcttagcttagcttagcttctcctccccgcttcttcttcttgcccatcccactcgccggccgccgccaaccggagaggaggcaagaacggtggtgcgacaatgcagccgttgcggccgagcccggcggcgggcgggtgggcgggggtcgccggggtggggcccaccaccgtcgacgaggcctccatggagcggagcaagagcttcgtcaaggcactgcaggagctcaagaacctgcggcctcagctctactccgcctccgagtactgcgagaaatcctacctccacagcgagcagaagcagatggtgctggaaaacctgaaagattatgctgtacgagctgtcgtcaatgctgttgatcaccttggtactgttgcatacaaattaacggacctgtttgaacagcaagcttctgaggtctctacggttgagctgaaggttgcacgcttaaaccagcaaatcctcacctgccaaatcttcaccgacagagcaggcctcaggcagcagaagattggtggaacaacttttaaacatcataagcactatatcctaccatctaccggtcataaaagaactcaagctgcacgcctgcaaacagacaatggtcaggattcaaaacctaaaccttatccttcagccaagaccctttcatggcatctgtcttcagagaacagcatttcgacaactggagcacagaaatatacatttacactaggggatactatatcgtctaaacctgcatcaaatggttccatgtaccttctaggcaaggacatacctgcttctcccatgcacaagcctctgcaaccgaatgggaacaccagttttgatgctaagaaaaatgttggttcaaaggaccagcctggtttcatgcatatgtcgacatttaatgcattggacaaacctagagggcgtgaaatccaaaaggttccagttagcactaaaagcatgctagctaccctctttatcaagcacaagtcagcaaagacgagaaaggcctcagttcgatgattagttcccgtttgtgtgtgtgaagtgatatcactgtaaagttcaagcaagaggcttattgtaaatctgattttcgcttgtgcggtttagagctgaatgtgtaagtgtcaatttttcaggtcagcatcagtggtgccattcctgttgatgaacaaaatgtagtaattctgcatc

SEQ ID NO: 17075 - DNA, 1611 bp, Oryza sativa
  ref <308>: DATABASE ACCESSION NUMBER: AK067539
  ref <309>: DATABASE ENTRY DATE: 2001-12-06
ggttattgacatttttttcccgttcaaaaaaaaatattgacatttttttccccaactgccggcgatatggccgctacggccgcctcctccctgtccgccgccgccgccgccgctcgccggagcttcccctcccgcctccgactcctagcacgccgccgccgcctcccgttctcgtccaccgcctccttctccgccgctgcgccaccggctgccgcggcgagcttcggctgggaggacgccctccgggtcgccgccgacgaccggcggggcgacgagtccgacctctccgggtactcccggaaggtcgacacctgcaaccgaggaatggacaagaagggggagttcgtggcgttcatggtggaggatcaggttgtggggtatatccaccaaggttttgttgaacatctaagagacttccgtgatgtttttaccattgcctcgggcagcaatggaagcaataatgttgaacatgtgactctccattcatctctaaggactccagatgaacgaacaaatgctgttggaagtgtcataagaagtctaggagatctgattccaggtattcgaaatgagctctatccaataacatcatcttatggcatgcctgtgtacttctctctggaacgtgctgctgccccctactttggcttatggagttcatatgaatgggtatgttgagaaggagggccagaaatttctttggattgctaagagaagtgatacgaagcagacctttccaggaatgcttgatcatcttgttgcaggtggcctgccatatggaatctcctgtgaagagaatgttatcaaggaatgtgaagaggaagcaggaatcccaagatccatttcaagcaatgctacctctgttggagcgatctcttacatggatattgaagggtttagatacaaaagggatgttctcttctgttatgaccttaaacttcctccagattttgttcctaataatgaagatggagaggttggtagcttcagattaatccctgtaccacatgctgcaaatattatccggaggacacattttttcaagccaaattgcaaccttgtgattattgacttcctcttccgtcatgggtatataaacccagattaccatggctacctaaagctgctgcaaagcttgaggagaggtgattgctcgtagtgctgccttcagttcagactgattatgaggattttaaattcaagactttactctgtcaagtgctttcatctcctccagtgatcactgtttgtaatcacatttgtcgagcattggttcagattcttgaaaaccttaacctccatggctccatatgcatacaatctgaagcatcaacggtggctcggattatccaactagcaagtgcaaatgtttgcttgatatttgatttttgccaaacaagttcgggtgtttgatttgcttcagcgaatttgtgatgatggacaccaggcgttgcggaaggtggatcacatggcatggaaccatggatggatagttcgtcccttatcctgtctctttttttttttttctggaaaacagaggatagtactggatttgagtatgaacataaatagtgagggaatatgaattcatatatggaggaaatatatgcc

SEQ ID NO: 17076 - DNA, 3805 bp, Oryza sativa
  ref <308>: DATABASE ACCESSION NUMBER: AK067540
  ref <309>: DATABASE ENTRY DATE: 2001-12-06
ggggaccgaccttgttcgccgccggcgccttctcgcgcggcggaatcaggccgccgcgctaggcttggcgagtgtgcgtcgcccgtcggcggcttccgcccgcccggactaccgcatccttctgccctctcctgggacgacgagtctctcttcctgttccggtgtcccggcgtgttccgggccttcgacccggtgggtgggtcagcgtgcaggccgcgcctctcccctggagcagcagagcttgacatggatgggaacatgacttcttggaatggcaatgacagatggaattacttcttaagggcttccagaaacaattcaatgctctggagaataaaaagtattttcgttctatgatctctttggttgtggctatttttggagaatgagctacagctggtggacttctttcaaaggtgccacatacgaagaggaagtcaggaaggaacaaagtttacttcatgccccttatttgcctctcagttggtttcatcctactgcataccagtgcgagtcttgtgactgaactcatgacacagttgatttctcccaatgtgttctcaattgatagcagatgggggtcaacaatatcgatcagtcttgctggatatgccatttctgcatacttctgcaatgtcaatccatcagtaaacatgtcatttgtaggcgccttccctgtaaacatctcaaggagcactataccaaagctatatacatcaccagatggagaaatttgaccacattcagcatattctgcagtgcgtaaacgtgataattaagtattgcatggctcaaaccataagatttattggaaaatagtattgagtacctggagcaatatatccaattgttcccattagccctacagaactctttgaattgatcaattgctctccttctgggtcagtgagaatcttggcaaggccaaggtctccaacatgcgcaaccatgtcctccccaagaagaatgttgctgggcttgaaatcacagtgaactattgttggatggcagctgttgtgcaaataatctagtgcagcggcgatatcagaagcaatgctcaatctctgcactagtgttagaactttaactggatctgatgagtgtacctccggatgtaaccatttatcaaggtttccgtgaggcatgaacttgaatactatggctttaaagtcattttgattcaagccagagcaagaacagcaagttatgacaccaatcaagttgcgatggcggattttgctaattgcgttacactcagccacaaaacttttggaagaaccagattgttcaagattgaaaaccttgatagctacagtagtttccgactttttgagcagcattgtccccttataaacagatccataccgtccagtgccaaccaaattgttgacattgaagccattcgttgattgaaacagttcataataggatactcgaggatacatgccatctggcagaggtgctaccgttgttcgcatggatgaaggtcttagtttcttccgtatagagaagacaacagctgccaggataaagcacacaaagattgtaacagcagtcggaataaccactttttgagtgactagaagtatacttcgactatgttccatgggtttggttgggcatgaaggcaaatgaagctcacgtataccaccacaaagcttatcattcccatcaaacttaaatcctgtcttaaatcctgtcaaattggcaaacactccatgtgctgggacttggccatcaaggttattaaaggatatgtcaagccaatataatgatgtcatgttttccatgttctctgggatttgtgcagatagattattgtgtgaaagatatagctctttcagtccatccatgagtcttaagtcctgaggaattgcaccaagaaggctatttttggtcaaatttagcagtactaatcctcgcattttgctcactgatacaggaatggtaccattaaagaagttatcgtccaaatgaagttccatcaagctctgacagttgctgagactatttggtagcaacccagaaaagttgttactgtacatgtataagtatgtaagttttgtgagaccacctactgctgatggaagagaaccgctaaaatgattccttgacagatccagaatgtacgacaaggatggaagattaaaaatatctccaggtaattgatctctaagtttattgtttgaaaaggttgcgatgataagttgttgcaggttcccaatgcttgctggcaatggcccctccaagctattgttatctagagagagttgctgcagttgcgttaagtttccgagtgaggatggtatgatcccagacaataggttattttctagtgtcaagtactgcagtgtttcaagccttcctatgctgtcaggtatcggaccactgaaacgattgttagagagacccaacttaattagtttgaggaagttgttaataccatctggtattttacctgaaattttgttaaatccgatatccaggagttcgagctgtgctgataggttggtgatagagtttggcagtgctccaccaagcctgttgttttgtattgtcacagcacgaagtcttgtgcaatttgtcaagaacgtgatgaacctccagtccttgacactggttgccttcagctggtttctttgcagcatcaggtatttcaggcagagcattccaatctccggaggtatgattccagtgaagttgttagaagagaggtctatggagcgcatgttggttgcatttgctattgaaggtgggatgcttcctgtgaaatggttcaaggcaacgatgaagtattggatttttggtaggccattgcccaaatcagaaggcaatcttccatgcaactcattctcctgcaggccaatgtggatcagcgaggaaaggttgaggagtgttcttgggatggtgcctgacagatgatttacttgcagtgccaacctctcaagactgctgatcttgccaagggcctcagggattggtccagtgaggtgattctcattgaggaaaagttccgacagcgccgagaggttgccaagtgattgcgggatgatcccggtgaagatgttcttccctactgaaatggaattgagcttcagaaaacctccaaaccaatcagggatttttccgttcaggctgtttaagtcaagtttgatgctagcaaggttagtgcagttccttagttcatcagtgatctcgccttgaagtgaattgtttgacaggtacaggtaggataactgtggtagctggccaattgtcctaggaatttcaccttggaatgaattgtttgacaagtcgagatatgacaacttcgacagccaaccaatcgtcaaagggatttcaccataaagttgattgcaactaagatctagacttctcaaatatgtgagattcccaatggaagcggatatgtagccatggagcccagtcgagccagtgcatctgactgatggcttagacctgccttgaatcctagcaaggcatccagatcagtgttattgctgaaaggcaatccttgagtacatgaagctgatgccagtaggagcagatatggcaagagaagcaattttagggcagtaaacattttgaagcacttttctggcagctaaaaacaaaaaagaattagtcttcaattccatgcccaggtaagtttcacttggaataataagtgtgccagaaaaaactcccatcggtcacaactcagaaatacgccattttggacattgacatggtctcccaaataaaactttgatatctgatctttatataaaatactatttataaagctcattagtgttataatgcc

SEQ ID NO: 17077 - DNA, 2263 bp, Oryza sativa
  ref <308>: DATABASE ACCESSION NUMBER: AK067541
  ref <309>: DATABASE ENTRY DATE: 2001-12-06
gatgagcctatttggttcttgtttttactagtataagtggttgcttaagatctaaaactatccttccacctagactacattagcctctgctagcctaatttgtcaagaagccctgcttttgcagttcacattcttcccaagccttcctacagactgctgttcagacttcagttccatggttcagatgtctatacagagggctgcaaccatttcacctccttgttccttatccttgccatttgattgtgtgagtggtacaagtagaagatttgcctcatgtagatcccagtattcatgctttgcctatagtgaaagactatctccaaatgttttgaagaccaacagtgtcgtcgatccctctgaaccgaagattttggatgcgagttcttctgcttcaagaactggacaatatagtgcaactactcatctatcaggtacaattggagtaatgggaatatctgcctcttcctctctcagattcttacagaagcttgtgcattggagtactcgtgatggagaagaggcacctccctttctcgtgtgtaatgatccacttcttaagaaggagctcatgtcatctcaaaattcacagcgcccttccgactgtaacactgctcttgggaagttaaggctgaggaggctcctcttggagaaatctggagtatgctgcattgccatgccatgtaataccttacatgcctaccatgatgaaatttcacaaggatgctctgtaccttccctccatattggtgattgtgttgtaaaggaactcaaatcggcaaacttaaaacctgttgaatatggaagtaatgtttgtgtcggaattctatgtacagacaatacattgaatgcaaagtgttatctaaataagctggagagccagggttttgaggtgctgcttccagataaagcttcattggagcacacggtattaccagccatcggcgcttttaggagaggggacatggaaggtgcaagaaatctgttgcgaatatcactacaggttatgttcgtgagggctgtcaatacaataatccttgcatctgatgactttgttggtatattacctgatgatgacccactgctcaagaaatgcatagacccaatggatgctttggttagagagaccatcatgtgtgcaagaacagatagcctgagaccatgatatccttcaaagtgatgctggttccttgtacagtttgcaagtagtagatgttttcattttttatctccagcgagcacacatgtaaattttaggatcagagaagaattcactattcatcacaagtcaatatcattaatagtacagtgtattatgcagtgtgatctgggtatgcattatgccttgctgctaagtcaagaaagatgccgagtccatctgcgagttcagattttgtcagatgtgtttgtggcctggccacaccagggaaaacttcaaacaagaatctagaaatcaaatagatgatgtggatgtttctgtggatcagcctgtagatagaacaaatgaagacatcgtcgaatcttaactgcgcagaaggagcacctttctttttcagataagtagcaactgccttgacatctgagatcacagttattcagtaacatctccctcttgtcaaaaatatatccccatcagaaagaatgcagcctcatgctcttccaaacacttctacaaggcgtgttcagacttcagagcctgtatggtaacacagttatcagaaagttatcagtgtgtttttttttttcagaagttgtaacagagatgatgcttccattttgacttgggaaagccaatctgagtgggcctgttcactggtattccaagagaatctggtgattggtgtggaggaggagggggaggggcttgaatgttctgtgcacaggtgggattgcaaaaggtgtgcacaatgagtgagcaatgattcaggctgtctgcaggggccttcaccaaacaagtggctaccctttctcccatgcaggaaccagggacaaaaagaaaggaagcacaggggacaatgcaacaccaattgggccttcctctctctgttcttcagggtaagcaaaggcaccaatgcttaacccaagattgatcatatcagaccctgtgctggagaaataaacaactccagcatcatgctattgtgctgtgatatatttgtatacatattcagatatggctttgttttttaagttcttcggtcgtcgcggtcgggatatttattccattatcataagaaataataacaatactacatacatattc

SEQ ID NO: 17078 - DNA, 4080 bp, Oryza sativa
  ref <308>: DATABASE ACCESSION NUMBER: AK067542
  ref <309>: DATABASE ENTRY DATE: 2001-12-06
ggagagccagaggctgcttcctccctccttctctcggtgcgacggtttaggcggcagcgcacggtgacggcggcagcacggcgcacggcaactggggcgacgcagcacggtgacggtggcagggttggagcacggtggcgagcagagcaggggaggggatcctgaggacgcagattctgagagtacctcgaagttaggatgggtagcacggagaaattcagattctgcattgacaggggcggcacattcaccgacatctacgcagaggtgcccgggaggagggaaggctacgtgatgaaacttctctccgtcgacccgtcgaactacgacgacgcccccatcgaagggatcaggaggatcctccaggagttctccggggagaggatcccgcggtcgtccaagattcccacgggcaagattgattggattcggatgggcaccacggtggccacgaatgcgcttcttgagaggaagggtgaaaggatcgcgctgtgtgtcacccggggattcagggatttgcttcagattggtaaccaggctcggccgaacatattcgatctcaaggtgtcaaagccgtcgaatttgtatgaggaggtggttgaggttgatgagagggttgaacttgttggtggtggtgatggtgagagggatgatggtttatctgttaaagggatctcaggggaattggtcagggtggcgaagccggttgatgtagaagcattgaagcctttgttgaaaggtttgcttgacaaaggaataagatgtttggcagtggttttaatgcactcatatacttatcctaagcatgagcttctcattgagaaattatctcttgagatgggattcaagcatgtatcgttgtcttcatcattgacgccgatggtccgtgctgtgcctcgtggcttgacagccagtgtggatgcttatctcacaccagtcatcaaagagtacctatcaggattcatgtccaggtttgaagggggaggtgagcaggtgaatgtgctgtttatgcagtcagatggtggtctggcaccagagaggagattctccgggcacaaagcagtgttgtcaggtcctgcaggtggtgtggttggctactctcagaccttgtttcaacttgagacatcaaaaccgctgattggatttgacatgggtggtacatccacagatgttagccgctacgatggaagctatgaacaagttctggagacccaaattgctggggcaataatacaagctccccagcttgacataaacacggtggctgctggtggtggatcgaagcttaagtttcagtttggagctttcaaggttgggccagattctgttggagcacatcctggtcctgtatgctatagaaaaggtggtgagctggcaataactgatgccaatttgattctgggaactgttattcctgagtacttcccatccatatttggtcctaacgaagatttaccccttgattatgacgctactaaaaaggcatttgagattcttgctgttgagataaactctcaccgaaagagtcaggatccatcagcaaaggacatgacggttgaggagattgccctcggttttgttaatgttgcaaatgaggcgatgtgccgacctataaggcagttgaccgaaatgaaggggcatgacactaagaaccatgctctcgcatgctttggtggtgctggtcctcaacatgcatgtgctatggcaagatcccttggcatgtctgagttacttattcatcgctactgtggcatattgagtgcatatggaatgggccttgctgatgttattgaagatttgcaagagccatactctgctatttataatgttgattctgctgcagaggcatctcgaagagtagatcttttagttaagcaggtgaaagaaaagttaatagagcagggttttggagaggacagcatcaggacacattcatacttgaacttgaggtacgagggaaccgatacagcaatcatggttaaacaaccagagagggaatctggaagtgattatgctgatgagtttgtgaaactgtttcagcaagagtatggcttcaaattattaaacagaaaaatactcatatgtgatgtgagggttcagggagttggtgctacaaatatcttgcagcctcatgaactgacaccagtatcaaccaaacctgtgccagaaagttcatgtcgaatttatttttcatacggatggcaggaaacaccactttacaagcttcagaatttgggctatgggcatgtattgaagggtcctgcagttataatgaatgggaacagtacagtgatagtagaaaaagactgtaaagctatcatcaccaagtatggtaacataaaaattgagataagtgctgctccaagcagtgtagaagtatcagagacagttgctgatgtggtccaactttctatcttcaatcatcgattcatgggtattgctgaacagatgggtcgaacacttcaaagaacttctatttctaccaatataaaggaaagactggacttttcttgtgctctctttggtccggatggtggccttgtcgcaaatgcccctcatgtccctgtgcatttgggagccatgtctagcaccgtgcgttggcaactcaaatattggggtgataatctccatgagggtgatgttcttgtaacgaatcatccatgttctgggggtagccatcttccagacataacagttgtcacacctgttttcaatgaaggtaaagttatcttctttgttgctagtagaggtcaccatgcagagatcggtggtatcaccccaggaagcatgcctcctttctcaaaaagcatctgggaggaaggtgctgccatcaaagcatttaaacttgttgagagaggtgttttccaagaggaaggaataattcacttgctacagtcaccgtcctatgatgaacttacaaaccataagattccaggaacacgtaagatccaagataatctttctgacctccatgctcaggtggcagcaaaccagcggggaataacacttatcaaagaactgataaatcagtatggtttgatcactgttcaatcttatatgaatcatgtccaaaacaatgctgaagaagctgttagagaaatgcttaaggtagttgcatcgagagttgaaaaggagaatgggtcttgtgtcatcgaagatgaagattacatggatgatggttctgtgctccatttgaagctcacccttgattcaagtaaaggcgaagcaacctttgactttgaaggcaccagtcctgaggtgtatggtaactggaatgctcctgaagcagtaacagcggctgctgtgatatactgcttacggtgcttggtcgacgttgatatacctctaaatcaaggctgcctagctcctgtgaagatcctaattcctaaaggctctttcctttctccaagtgacaaagctgcagtggttggtggtaatgtattgacctctcagagagtgacggacgtagtcctaatggctttccaagcatgcgcctgctcccagggttgcatgaacaatttgacatttggagacgacaccttcggttactatgagaccattggaggcggttcaggagctggggcgagttgggatggtacaagtggtgttcagtgtcacatgacaaacacaaggatgactgacccagagatctttgagcagcgataccctgttcttttacatagatttagcatcagggagaacagtggaggttctggtttccacagaggtggtgatggccttgtgagagagattgaattttgccagcctgttgttgtgagcattctttcagagagaggggtgcatgctcccaggggactgaagggaggaagaaatggggcccgtggtgcaaactatctcgtcaagaaagatggtcgtagagtttaccttggagggaagaacactgttatggttaatgctggtgagattcttcagattctcactcctggtggtggtggttttggctctccttgatggctattcttgtggacgatcatctacctcgcttctgggtattgtcatttctacttctttagtcctacttttatccacaaataaaacatgcagaaggcagaaacttgc

SEQ ID NO: 17079 - DNA, 1914 bp, Oryza sativa
  ref <308>: DATABASE ACCESSION NUMBER: AK067543
  ref <309>: DATABASE ENTRY DATE: 2001-12-06
gaaacgaaatgcaagtgaactctcttttgcatagatacaaaattttagcaactttgtatcgatctggtgcaagacaacacaagccatggcggatcagcttgttcacctcccccaacagctcctggttctcttgcttttcatcgcccccttcttcttcttcttcctcatccgttccattcgtcgtcgcgatggcggcagcgtccggctcccaccatctccatgggctctcccggtgatcggccacctgcaccacctcatgggcgcgctcccgccacagcacgccatgcgcaacatcgcgctgcgccacgggccgctcgtgcggctccggctcggcggcctccaagtcatcctggcctcctcggtggacgccgcgcgcgaggtcatgaggacgcacgacctcgccttcgcgacgcgcccctccacccgagtaatgcagctggtcttccccgagggctcgcaggggatcgtcttcacgccctacggggatagctggaggaacctccgcaagatctgcaccgtcgagctgctcagcgccaagcgcgtccagtctttccggccgatccgcgaggaggaggtcggccggctgctccgggcggtggcggcggcctcgccggcgcggcgcgccgtgaaccttagcgagctcatttcggcctactcggccgactcgacgatgcgcgccctgatagggagccggttcaaggaccgggacaagttcttgatgctgctagagcgcggtgtgaagctattcgccacgccgagcttgccagatctttacccatcgtcgcgcctcgccgagctgatcagtagaaggcctcgccagatgaggcggcatcgcgacgaagtgtacgagttcttggacatcattatcaaggagcatcaagagaacagatcttcctccgatgaccaggaggacttggacttggttgacgtactcctgaggatccagagaaaaggtgacttcccactatccactgataacatcaagacaacaatcggagacttgttcaatgggggcagcgagacaaccgcaacgacactgaaatggattatggctgagctcatcaggaacccaagagtgatgcaaaaggcacaagacgaggtccgacaagtgcttggaaaacatcacaaagttacagaggaagcccttagaaatctgagttacctgcacttggtcatcaaggaggggctccggctgcaccctccaggacttccgttgctcctgcgagaaagccgaaccacaagccaggtcttaggatttcatgtgccccaaggaactatgatactcgttaacatgtgggctataagtagggaccctatgtactgggaccaagcagaagagttcatcccagagagattcgagcatgtcaacattgattactatggaaccgatgtcaagtacatgccgttcggagtaggtcgacggatatgtcctggaatagcttttggtctagtgaacttggagcttgtgctagcaagtctcttgtaccatttcaactgggagcttcctgatgagacggagcttgggaaccttgatatgaaggaggagatgggggcaatagcacgacggctccatgatctttcgcttgttccagtcattcgccatccattaccggtagatatgtaatagctatcagtcagtagcttgatgatttacatcttggagggctactctgtttacacaagtttgaaccaatgcagttaaataaataatttgcaaacttgctgcattcactgcccaattacaagcgttggtccaaatatacatgtttgcattagaaaacatgtattatcgttgttaaaacacttgtacttttatatttgtaacataccactataggtgtacccagtaaattatgtgtatgaaaatgtggcaataaataaagtcagcacctctccatgtgcatgccttatttt

SEQ ID NO: 17080 - DNA, 943 bp, Oryza sativa
  ref <308>: DATABASE ACCESSION NUMBER: AK067544
  ref <309>: DATABASE ENTRY DATE: 2001-12-06
ggcaccaaactcctcgtggtggtttcgcagctctcctgcgagcgaattctagggtttgggaggaaatccaatccctccaaatccggattcgttttggaagacgttttggaggaggtagcatgagctcggcgcaggatccgttctacatcgtccgggaggagatccaggactcgattgataagttgcaaactactttccatcgatgggagaaaacaccgtcaaacacaggagaacatgttcatttgacaaaggagcttcataccagctgtgaaagcattgagtggcaggtggatgagttggaaaagacaatcttagttgcatcaagagatccagcgtactatggactggacgaagttgagctttctagacgacggaactggattggttctgctcgtaatcaggttgctgcagtcaggagatctgttgaaaaggggaagagtaattcaactttctcggcgcaccaagacatgggcacaagcagaagtaaccactacactgcacaagacaatgatgacttcattgcttcagaatcagatagacagcttctacttatgaggcagcaggatgaggaacttgatgagcttagcgaaagtgttcaaaggattggtggtgtagggctaaccatacacgaagagctgtctggacaggaaaggatcttaaacgacctaagcttggagatggaaactacttcaaacagacttgacttcgtgcagaaaagagtggcgatggtcatgaaaaaggctggcataaaagggcagattatgctgatcctcttccttgtggttctgttcattatacttttcgtgttggtgttcttgacataacgcactagtgttccaagcctcgtgttttgcggctgtacctacctactgtaagctgtggagaacagaaaacaaatacacgagttgctcatatctttcaaatcctacctgattattgctcc

SEQ ID NO: 17081 - DNA, 1405 bp, Oryza sativa
  ref <308>: DATABASE ACCESSION NUMBER: AK067545
  ref <309>: DATABASE ENTRY DATE: 2001-12-06
gtgagcgcgctgcggccgtccaagaccatggccatcaccgaccaggccacggcgctgcggcaggctggcgtcccggtcatcggcctcgccgccggggagcccgacttcgacacgccgcacgtgattgctgaggctgggatgaatgcaattaaggatggttatacaaggtacactcctaatgctgggactttggagctgagaaaggctatctgcaataaactccaagaggaaaatgggatatcctacagtccagatcaggtgctggtgagcaatggagctaagcaatgcattacgcaagccgtacttgccgtttgctcacctggtgatgaggttttgataccagcaccatactgggtcagttatcctgagatggctacattggctggtgcaactccagtgatccttcctacaagcatatcagagaatttcttgctaaggccagagctgcttgcttcaaagatcaacgagaaatcgaggcttttgattctctgctctccttctaatccaactggatcagtatatccaaaggagctgcttgaagaaatagctgacatagtcaagaagtatcctaggcttcttgttttgtctgatgagatttatgagcatatcatctatcagccagcaaaacacacaagctttgcttcattgcctggaatgtgggatagaacattaactgtaaatggtttttctaaggcttttgcaatgacgggctggcgacttggataccttgcagccccaaaacattttgttgcagcctgtggaaagatccaaagccagtttacttcaggtgctagtagcatatcacagaaggcagggctcgctgctttgaaccttggctacgctggtggtgaagcagtctcaactatggtcaaagcattccaggaacgtcgtgattaccttgtaaaaagtttcaaggaactgccaggtgtgaagatatcagagcctcagggtgccttttatttgttcatcgacttctcctactatggatctgaagtagagggttttggcactatcaaggactctgagtccctctgcatgttcctcttggagaaagcacaggttgcacttgtcccgggcgatgcatttggggacgacaaatgcatccgcatgtcatatgctgcagcactatctacgcttcaaactgctatggagaaaatcaaagaagctgttgcgctgatcaaaccccgtgttgctgctaagtgaaaatgtgaggttatacaatggcagtggggagtgaccaaaggcgccttcaactgccacttcggtaccatttgaaatacaaacgatgtgtcattgtctgacaagtaagaatttttgttgtttgattgtgtctgctgtgataaagaacttgaatgtaactccgggaaaatggataatacttcttgatttctttttctaaacaagg

SEQ ID NO: 17082 - DNA, 3271 bp, Oryza sativa
  ref <308>: DATABASE ACCESSION NUMBER: AK067546
  ref <309>: DATABASE ENTRY DATE: 2001-12-06
gactccggtagtcggatgatccgctcgccgtccacttggtggtcaccacctctcgcctcaagcccgctcgtcctccgctcaccgccgacgcggaccagcacgagcgtgcggcggagcggcaaggggagagacgtggatcggcgctccggcggaggggacggcttgtcatcggcgccgcggccgagtggaccgcaagatacgcgccagtcaacgtgccgtctccgccgccgtaattgctcgtacatcttcctcttctcctcgcacatctttttgccatccaccgtaggccttatttggtttggagggaattgaggaaaaataattcaacaccacaatagaaaccacgaccactaagtgatccacaatggtcgagattgtgacgggcgcgatcagcaccctgctgccgaagctgggtgaggtcctcaggaaggagtaccagctgcataagaccgtcaggggagagatcatgttccttatggccgagctggagcgaatgcaggctgccatcctggagatctcagagtcagatgaacccaacaagctcgtcaagctctgggtgagagacgtcagagagctctcctacgacatcgaggacaccatcgacagcttcatggtccacttcgacaagcatcgcagctttaggggcttcatcgacagaagcctcaacctgttgaccaagttcaagattcgccataagatcggtgccaacatcagagacatcaagagccacatcaaggaggtgagtgagctgcgcgataagtacaaggttgatggtgttacagtagccaggcctgtcggtcaccaaactgtcgatagccttcgcctgcagtcagcactgtataagaatgtttcggagcttgttggcaccaagaagaagaccgatgatctagtcagtaggctgatggagatgcatgatgatgtagagtccaagcgaaacttgaaggttgtctccatcgttggttttggaggtttgggcaagacgactcttgctagtgttgtgtatcacaagcttaaattggagttcgattgtggggcttttgtttctatatctcttcatcctaacatggtgggggtattcaagaacatgctccgtcagctcgacgagaaaacgtacttgaacattaacggagaaacatgggaagaagtgcagcttattgatgaactaaggaaattccttcaaaacaagaggtacatcgttgttatcgatgatatatggagcaaatttgtgtggaaaacaatcaaatatgtgttggttgataatcaacttggaagcagaataattacaacaactcgagctgtagacgttgccgaacaagttggcggtgcttataagcttgagcctctttcacctgatgattcaataaagctattcaaccaaattatatttcactcggaagacaaatgtcatccttatcatttatccgaagtatctcaaaaaattttgaagaaatgtggtggtataccattagctatcattacgatagctagtatgttggctagtaaaaaaggtaatcaacatgaatactggtataaggtgtaccattccatgggttctgggcttgaggacagtcctgatttgaggaacatgagaagaatattatcaatcagttactatgacctccctccacatctgaagacttgtttgttgtatttaagttcctatccagaggattatctgagtactagggagaccttgatatggaaatgggtaggcgaaggtttcgttgagactaaacagggcagtagtttttatcaagtaggaggggaatacatttatgagctcatgaacaagggtatgatccaaccagcatgtgatattgttaacgattacccagagtattatcgtgtacatgacatggtgcttgatctcatcacgtccctatcaaatgaggagcatttcctaacaagattagatggacacccgtccttgtctctacaaaaaaagatccgccgactgtccatccaaacaaacgaggaagagtatgtcaagcagttggctacgatgagcttgtgccatttgaggtcactgactgtgtgtgggcaaggtctgagtagtctactgccaactctaccaagcatgtgcccattcttacgtgtactggatttcagtggttgtgacaaagttgagaatcaacattgtaaggatatctgcaagttgtttcaccttaggtatttgcggctatatggtacaagtataagcgagctcccaaaagagattgcaaatctgcagtttttacaggtcctggacatatctatcactaatatcaaagagctgccaccgacctttattcaactaaaacagctggtgtacctgcatttccccaatatgatgagattgccagacggtcttgggagtctaaacaggctgcaggaaattcctaatgttatcactatcgattctccaaccatgttgcacgatctaggttgtctttctaagctgaggcgcttaacaatttacttcgataaatgggatgagagctatgagaaacctttcatccagtgcctatccaacctagtaagccttgaactcctagaggtagatggaacactaggttccacatgtggcagtttatcgcctgggcctcaacggcttcaatccattgacatgtcattctgcactttaaccgcttttccaggatggatgtcctcactctgctccctctcctccctgcatctcatattattaacacttggagaagacgaactgcaagttcttgggagcataccacatctcaatgatctctatatatctatatcggtgaacaaagccatacatgacaaaaacaagaggttggttattgggaaaggctgtccattcctgtgtctaacacagttcagtttagcgagcagcagcatgtatgtgggatttgcgcaaggagccatgcagaaggtcagggatctgagtttatactttggagtaagtgagacaatgggtcaatttggagatttcgacttcggtctggagaacctctcttcgctcgagcatgtcgatgtttggatgcggtgttttggttccaagacaggggaggcggatgatgcagagattgcaattaagagatcgctccagttaaaccccaacaaccctacaatggagctggagaaggtataactatctattctgctccacacataatttcaagcaaattcatttgactgccttacaataatcttgcttggttttcttctctctttttttaatactgaaatattatcatcacatgtttgaactatctaccaaattgtgtacctatatattatgagatttatcgcg

SEQ ID NO: 17083 - DNA, 1599 bp, Oryza sativa
  ref <308>: DATABASE ACCESSION NUMBER: AK099004
  ref <309>: DATABASE ENTRY DATE: 2002-08-28
tggcgtcttccccacccacccccagtctccaatggccacctcccacctcctcgccgccgcctcctccaccgccgcctcctccgccaccttccgccctcccctcctcagcctccgctccccgccgccctcttctctccgcctcaaccgcaggcgccacttccaggtggtccgcgcggccgagaccgacaaagagacgaaggccaatgcgcccgagaaagctcccgcgggaggctccagcttcaaccagctgctcggcatcaagggcgccaagcaagagaacgacatatggaagattcgccttcaacttactaagccagtgacatggcctccgcttgtatggggagtgctttgtggagcagctgcctctggaaatttccactggacagttgaagatgttgcaaaatctattgtctgcatgataatgtctggtccatgtcttacaggatacacacagacaattaacgactggtatgatcgagatatagatgcgataaatgaaccttaccgtcctattccttcaggcgctatatcagaaaatgaggtcattactcaaatttgggcactgttgttagcagggcttggcctgggtgctctgttagatgtatgggcaggacatgattttcctattattttttatcttgctgttggtgggtccttgctttcttacatatattcagctccacctctgaagctcaagcagaatggatggattggaaactttgctcttggtgcgagctacattggcttgccctggtgggctggccaggcattatttggaacccttactcctgatattgttgtcctgacttctttgtatagcatagctgggctagggattgctattgtaaatgactttaagagtgttgagggagatagagctctggggcttcagtcactcccggttgcttttggtatggaaactgcaaagtggatatgtgtaggagcgattgacataactcaattatccgttgcaggctaccttttcagttcaggcaagccttattatgccctggcactgctaggactcacaattcctcaggtggtctttcagttccaatacttcctcaaggaccctgtgaagtatgacgtcaaataccaggcaagcgcgcaaccgttcttcgtcttgggccttctggtgaccgcccttgcaaccagccactgatgaaagcagcaatcgccctggactgtgattctgtgacagcgaagttttgggtggaagatgcagattgatggttctctgcaactgttggtggagctaggttcagcagctatgttcgcgagtgtattagcgctcttttggcggtgctgggtagtagaatgtagaatcgtttcttgttgattccctgaactgatccagatcaaacatcttctaaaggttctgcgatgcaatgctagctgcagacgggagatggtacagggggtcgttttgctactttgccgccgatgttgtagggtgtgtagacagactgtagatgaataatgtcagtaacacctgtggggggttcagtgctagtgggctgcaaaacttgagcactgcttcgatcaaattgtgtctttgattatgaaattatggaatccagcacaggcaggtaataattt

SEQ ID NO: 17084 - DNA, 2782 bp, Oryza sativa
  ref <308>: DATABASE ACCESSION NUMBER: AK067547
  ref <309>: DATABASE ENTRY DATE: 2001-12-06
gggtcgtcaagtttgaaggcaacatgatgcagcaagacagcaagaggaagaggtccgtgctgccggagacggctacgttggccccgggaagcaagaggaggaggaggaaatctgtaccatcccgtcatgcggccgcgatgctacctgacgagttgctgacggaggtgtgcctgcggttgcccgtcaaatccatccttcgcttccgggctgcctgccgctcctgggacgcaatgctgtcttccgaggaatttggtcaactctacgcagcgagagccgaggagatgtcgtcagctcctaagctgctattcgtctcacctacggcaaatttcaactccaccgcggtgtacaagtgctcaccatcgaagcccaccgatgacctgctgctcacgcttgatgatgttcgcggaaactatgtggaggtgacacccgcaccatgccatggtctctccctcctgtatgatggtattgccccagcttactatgttatgaatgcaaccacacgggcagtcacacggttgccgcctttccgagatgtggcttttgccactgctggtcttgggtgcgatgcccggacgaagaagtacaaggtagtgaggttttttgaagggaacttgtttgagaaggaatttttgaagtgtgagatatacacacttgggggcgatgaaggggatatttggaggcctgccgctggtggagtacctttccggttctacagttttgctcgttctgctatttccaatgcggtgatgaacaaactgcagccacttttcttcaatggatatctgcactggttgatcaacccattgcatcacgttaaactaccaagagcttctattttatcattttctctcactgatgaaaccttcagatggatccgatcaccaccctttgtggcatctggagtgcatttggtggagcttgatggtaatctgtgtatggtccgagaccttcgtgataggtcaactgctgtttgcaagttggaaatttggaagcttaaggactataactctggtggttggtctttggatcatcgaattgatttaacagggcagttgcctagggatttacttgagccacagatagtgaaagttatcggttccgctggtagttgcagatcaggtacgaagataatcatcgccacatccaagcacaaagtttgttcctatgatcctgtttctagaactctggaaaccattacctcaatctcggagacctgcacatcctatcaaaatgagaaatctgatattagattcagtttatttaaagaatgccttaccccagtgcataaaacaagggaagggattgccttcgcaactcccttgtctaaggctactaaggagatcctactccgactcccggctgaatcagtcttgaagttcaaaccagtctgtaagcaatggcttgggctgataaagagtgaaagatttatccgtgcatactttgcacacaagaacatggacaagaggccaaaaatcatgcttgtgggtaagggctctggaaaatcacttttcaactttgttcccttaagtaaatggcttcaagaggcatccaatcaaggcacactgtttcttgacacaaaggtggtttgctccaagccttgccgtggattgaatttgatgagcttcgtggaggaggactatctgttcaacccgtgtacaggttaccacagggtctactggaacagagagtggcatcagcaccaaccatggaaaatgcctacgggttgccgtgaacaagaagacaatccttttgcagttggcaataagaatgttggtttggggttcagccaggtgattcaggatcatgttgttgtggggattttctatgaccggaaagactacaactctcgtgagtattctttaacatgttctctatggagctgtggttctggatacttcgagcaactcccgcagccacctctgcctgtgaatgacatgccacctgtctctgtggatggagtgctgtactggatgagcgaaccaaggttgggtcagagttatgaacgagccattgtgtcttttgacattgccgctaagatatttgaagtcatcccttgcccttcaagcattgcaatgtgggaccccagaagtcgctgccatgcatttgtggtggagcttctaggaaagttgtgtgctgttctttcaaattcagttgcagatgagttagatatatggaagtgggatcatggtctatggactagagcatacacaatcaatttaaaattctggccagattactcacttgcaacgaatgttgtagtgcctatggcagttgaccttacagatggaaggattctgctgaatactgggaggaagcttggtttatataatccatttgatcaaacaattgaaaacttgcttgcacttgatcaggtgtcacttgccacacctaaagtgcagcaacagcgcactggaggtcatcttaagtgccacattaccagatgcgaagatgttcctaggaagttttctccgtggaaactatctatggctccatgtgagaactttgctacacctccaagtgcctcatcagggaagaatctgttgtcctccagacaccaatatgtgaaggcactaaatagtgtgagcccaaaggttatgcctgtggttcctatgttgtatgaggagagcctaacttattatccctttgctgcccgagcgagagtgttgtttagttgaagtggtacctttgtcaaatctaccatttcatgtgtcagataggtcctccatgtttggccataccatgtcaccaagtttttataatgtaatattttgatgtttatgcc

SEQ ID NO: 17085 - DNA, 1814 bp, Oryza sativa
  ref <308>: DATABASE ACCESSION NUMBER: AK067548
  ref <309>: DATABASE ENTRY DATE: 2001-12-06
gaatctctctctctctctctctcaatctctcatctccagccgcgctttctctctctctctagctcccagcctcgacttcacccaaaccctagccctattgcgcgcgggagacccgccggcgaggcgcgcgcacggagcgagccggggggcgggagggccagccgccgccgccgccgcctgcagcagcgaggatgccgtcggggtcggcgacgcagttccggtacacgcagacgccgtccaaggtgctccacctccggaacatgccgtgggagtgcaccgaggaggagctcgtcgagctctgcaagcccttcggcagggtcgtcaacaccatgtgcaacgtcggcgccaaccgcaaccaggccttcgtcgagttcgcagatcaaaaccaggcaatttcaatggtttcatattatgcttcttcttcagaacctgctcaagttcgtggcaaaactgtatatatccagtactcaaacagacaagaaattaccaacaataaaggaactggtgattcctctggcaatgttcttcttgtcacttttgaaggtgtccagcctaatgatattagcatagatgtcattcatttggtattttccgcatttgggtttgtccacaagatagcaacctttgagaaggctgctggtttccaggcacttatccaatatactgatgctccaactgcactagaagcaaaaaattcgttggatggaagaagcatcccgagatatttacttcctgaacatgtccccacctgtcacctgcgcataaccttttctgcgcacaaggatttgaatatcaagtttcaatcacatcgtagcagggattacacgaatccatatcttcctgtgaatccaacagcaatcgagggaatcgcacagcccactttaggccctgatgggaagataaaggagcctgagagcaatgtgcttttggcttcaatagagaacatgcagtatgctgtgacggtggatgttctacatactgtgttctctgcttttggtactgttcaaaagattgcaatgtttgagaagaatggtggaatgcaggccttaattcaatatccagacatcacaacggcagcagttgctaaacaagctttggaagggcactgcatatatgatggaggttactgtaagcttcatctgtcatactctcgtcatactgatctcaatgtaaaggcacatgatgagagaagcagagactacactgtttcatcagatcctagtgcacaaatgcaagctgcagcgcaagccccaggtcctagcactccaggagtggcatggcaaaacaccgcacccagtgcttccttttatggcagcactgcggcagcgactcctgttggacaagtgccagcttggaatccaaacatgcaggcaggtgcttttggatcggcatcgtctgcatacccaacccaaccaatgatgccaggatcagttccacactatccaggaattggatccagttccggagcactgccagtatcgttccaggcctcacatcagatgccacagtatggtgtacccccagctgctccacaccatgctccaccggctggccaaccaatgtatttcccgaaataatctatctttatccgatgtacaagcaattagagcaattgcaaatgttgcctgcaatactcgggtctgggtatcttctcttcaaattttgggttgtaactcgtctatgcagctattcatattgtaactcagtgagctccctgtcgcaaatgtgcctctgcgtcagtcgctgtctgtaaactgtccggcaattagaaattcccatccttagcatgcctggtattgttcagctcgaaactg

SEQ ID NO: 17086 - DNA, 3688 bp, Oryza sativa
  ref <308>: DATABASE ACCESSION NUMBER: AK067549
  ref <309>: DATABASE ENTRY DATE: 2001-12-06
gggatcgaaaaccattctccaatctccatggatgagctctccttcggaagcttgtgcatggtcgctatggccactctcgccctcgcgttggcgctcatggtcatgggagctcatcgccgcggcggcgagaagggagcaaccaccggagccaagaaccttcctccggggccatggaacctccccgtcatcggcagcctccaccacctcctcggcgcgtcgccgccacaccgcgcgctgctccgcctgtcgcggcggcacggcccgctgatgctggtgaggctcggcgaggtgcccaccgtgatcgtctctgggtcggacgccgccatggaggtgctcaaggcgcgcgacccggcgttcgccgaccgcgcccggagcacgacggtcgacgccgtcagcttcggcgggaagggcgtcatcttcgcgccctacggcgagcactggcgccatgcgcgcagggtctgcctcgcggagctcctcagcgcgcgccaggtgcgccgcctcgagtccatccgtcaggaggaggtgtcgcgcctcgtcgactccatcatcgccggcagcagcaacgccgccgccgtcgacatgacccgggcgctggcggcgctgacgaacgacgtgatcgcgagggcggtgttcggcggcaagtgcgcgcggcaggaggagtaccgccgggagctcggcgtgctgacgacgctggtggccgggtacagcatggtggacctgttcccgtcgtcgcgcgtggtgcggtggctgagccgccgcaccgagcgccgcctgaggaggagccacgcggagatggcgaggatcgtcggctcgatcatcgaggagcgcaaggagaagaaggggagtgacgccggcgtcggcgcgaaagacgaagacgatgatctgctcggcgtgctgctgagactgcaggaggaagacggcctcacctcccctctcacggcggaggtcatcgccgcccttgttaccgatatttttggagctgctactgataccacagcttccacacttgaatggattatggtggagcttatgaggaatccaagagcaatggataaggcacaacaggaagttcgaaacacgcttggccatgaaaaaggcaaattgattggcatcgacattagtgagctacactacttatgtatggtcatcaaggagaccttacggctgcatcccgcttctgcactaattctacgacagagcagggagaactgtcgtgttatgggctatgacataccacaagcgacacctgttctaataaacacattcgccgtagcaagggacccaaagtactgggacaatgcggaggagttcaagccagagagattcgagaatagcggcgcagatatcaggacatctatcgcacacttagggttcatcccattcggagctggatgcaggcaatgccctggagcgttgctcgcgaccaccacacttgagctcacattagcgaacctcctttaccactttgactgggcacttcctgatggggtgagccccaaatcactcgacatgagtgaggtgatggggatcactttgcataggaggtctagtctccatttgcatacaactttgaccaggtctggtttctttagccactctggtcgatagaggctccatgcatactggtgatccttttttttttgaaacattaaacggcaggagctctgccggatatattagaaggaataaaggttgccaatcattacaatcagcgagcaaagacaaaagcaaactaggggaaagggacaatcagatcgtcgattacagagatagatgataacgactaggaaagctccgcaaagcgttagccattagtcttttttgggagctctatgagatctatgttttcttttattaggtgtgctacttgcagctcggtctgagattgctgattgaaaattcgatggttgcgctccagccaaacatgccaccaagtggtgagtagtgcccctaccatccttttcttcgctcttttttcttgcactgaatggagcatagaatcccaccataccgagatatcttcattttgcggagagaaaagagattggttaaaacctaaccaattgcatagccgattccacacattccttgtgaaaatgcacccctttgccaaatgattcgcatcctcgaaagcttcagaacaaaggctgcagatccagtcgcaaggcaaatgtcttcttaacaaattctctgatgtgagagttttttgatgtaaaatgagccagccaaagaaacgttgttttggttcagcctgtgccttccaaagaggggagaaatttaggtttgtggttgttccggagaattgggcttcataggcactttttgttgtacactctccattcgcagtccacttccaaaagatgtcatctggcacatttgtgttgagcgtgacctcctgcaggtagcttccaagccgcaccagggcatctatctcctctatagatgtgatgggattaaggattgcaagccagtgattattttctaagctgagctttacgttgttgatctttatcttggaaagcctgaaaatctctagggcaatatttgttgggatatgcgtaggctacgatagcataaatcaaaattttctatcgcgtaaaccaggaaccatgcaagtattagatcatagattgttaccactcgacgcgctgcgcagcggaagaagacgctgagaagtcgaaggaactctcgcgaagtagcgcgcgtcgatgtagaggaagtagtcgatcgcaccggctcgaccttctcctcctcgtgcgttctcctcgccgtactcccacgccgatcagcaccgcaaactagcggcgcctctaccggtatccacatgtacagggacggaacgccacgcgcagatgtgctagcactcgcgcgcggctagggttttgctcggggagggaagtgacggctagggtttctcacgtgattcaatgcctctgccggtcacacccctcacgaatatataggattcatcactcgggcctccaaggcccgtagaactcctattcggatccctatccgaattaagcttataatggatctctatccaatccccttattccggcccattaagcgtgcgaccctgtaggttcatatatactcggttgtaacccgaaaactccttttcggtccacgcttcaacagcggcccctagcagaacgtattgacccaccgggcatacataaagatcatatcggctgaacctctagtgtacttgtatgaacccctttgcctcacgatatcgattaagctcaaggctagatatgtgccatcctctaatagctcaatcattcactcaaacctgttgatagattatataacttgtgattgactcctcaatcacctttggcatggccatgcacttccataatctacaacatcgaggggcccagagatatctttccataggaggggcaaatctcatcttgattattcgtatcccactacatatttcatagcatacccgaaaactacttttataactacccaattacggagtagcgtttagcagtccctaagtaatctactacacatgttgagaaccatgataatctcaggtctaaggattcaacaccaacactcaatgagatcactgatgacataacacatatggctcttgcagtgtctcatgttgggtctatccaacaacatgttcaccaacatgtgtccacattattaatttggtatctct

SEQ ID NO: 17087 - DNA, 4259 bp, Oryza sativa
  ref <308>: DATABASE ACCESSION NUMBER: AK067550
  ref <309>: DATABASE ENTRY DATE: 2001-12-06
taatttccacagttgtatatgacggacgacacactagcctgtggtcaactttgttcgtcgttgtgctccttctgctcccatcccgtccagagacgacggccggccagcctgaggtcgattcggacagctaaagcacgagcactgctatggccggccacgggcgtcggtgagcgatggcggcatcgacgattactctcatctgctggtttatatcctgtaagctccctctgctcctctttctcaactccggccgtctgctctccgccaatgtagcctactctttccttatcatatcagaataaacaaaactagtagtagtactctgtctaaatttgtactcccataatattttgaatattggaccaccttttattactaagctttcactttgaactacccctttacctatgttttcagtttggactagttaatatttcctttttgttgcactctagaccaccttctctcttcatctccttcaccctgtcttctcccaaactccgatcaccaaactcctccatcagttgtaggctttattttggcaatggctcttagcagcagtcgggcttggtgagtgaggcacactcatgtactcagtggtcgattagaggaagcgaagtaaggcatggcagtggctcttggtaatgatgaaggcagcagagagcaagaggccaataaaattattcttttgttgcctccccttggtgttaccttcgcttgattcctcttctatttccattcgaattatttctgcaaattttccaccagaccgatatcaggcgcgctgagacaggtgccaaaatcaagatcattggacgagctatccggctttacctccatcttcaccagcccttggtcgtgctaagctagcccatcacgatatcggcagcaataaagatagagctcaagcgtgtacaatgccggcaacgtgctcaagcatgacttctgccgctgctgtccgtagttgcaggagtggggaggtcaggattctcatgtgatcgatctccggcagtagagtgaagagaaagagggagggagctagaggaacaagaagcctaaattgaaacattttgggaaaaatacctagtccaaggtgaaaagcttagtttatccctagtccaagatgcaagactggttaaaaaatgtgtctcaaagtgcaatttactctaatatttttttatggagggagaatcccaccaataatactctttcagaaagtgttcggatttatttgaactggttgtgctgagttatttgtagcaactagaacaatgcctcttttttttcagttgcagcagatctcaaataaacattatacatactaaattctaaaagtagctattattgtttgaatcccccaaattcgaaatactgcatgcaaaatggaaaagattaaacagctatatcaatgaggattaatacacatagtagttatatagttcagtattgtcgctccattcctatcaaggcatcaaccccggagttgtttctcaaaattgatacctccatggacgactagaatgtcatgtttggctgaccaatttgagtaactcataggatgaaaatggttcccaaaataatgtagaagcatatatttgcaattagggataaataactgtcgctacctctgattccaactgtagatcatcttagagaagtactcacaagaattaagaaagtgtagaaataaataatgttgctgtccagcaataactacacaataaacaaagggcatttttaccaaactggaaatttcgtggtgttacaaaataggacatgaggcatatcaaattgaacagcaccgatatgagtagctgcaaactatcagttttccatatgctgatatacaaatgcttccaattggacaaattaacttcaagttatgcacttatgctatattgtaggttctttttgtctactctttctgcatcatttgaagtactttcagaatgtccagatttctaatgtttctgagatattattttaatatgaacaacactagtagcatatttctaatgaagaaacaaactggctttgaacacacaaatgcttgttacaggctagcagtgttggatgaaacaaatgatcttcttgcataatatctcttggattgattatcttgagtaaacactggtttcatacaggactgcagaaactgaattgagcattgtcgaaacttgaaacgcatgtaaagatggcagcgttgatccaactatggaatgattgggagttacaggtgctggtgcttttaagcttcatgttgcaagtgttcgtcttcttttccggtggtcttcgacagcgcagcaccaactcgtcattgaggattctggtttggttagcatatttggtggctgatttcattgcagtctatgcccttgggcaactatcacggcaaaaaacagatgcaagtgaagctgggcaacctcacaagtttgcattcttctggacgcctttccttctcattcatcttggtgggcaggacacaatcactgcgttctctgtcgaggacaatgaactgtggctcaggcatctgctcaatcttctagtccaagtttgcttggccttgtatgtgttttggaaatcagcagcaggcaatcagtttgtagtctcagccatctttgcttttatttcaggaatcatcaagtatggggagagaacatgggcactcaagagtgcgagccagaaatcccttagacgctcaaccgatggaggagtagtaggtcaatttcctgaactagaagactatcaagagttgggatacaaaactatggtcatgtttgctctgtctagctcaccagttgtgagaaacctacttgttggacgcaagattgatcaaatggaagaaagggtacgtcatgcattttcaggtcgactgtatagtcaagtttcagaaaacgcgcaacttgtgttcaagattctagagatcgagctgggaatgatgtatgacaacctctacactaaggcgagagtgattcgtacatggactggcgccatactccgattcatcacctgcatctccctgatggttgcatttgtgctctttctgacagggaacaagaagtggcaccatagcagagttgatgttgccataacctatgcattgttcattggagcactctgtttggaggtctgtgcgatcttcttcatggtgatgatgtcgccatggacatgggcatccttgcaatattggaagtaccataggctcgcagatgcagcttggtatgttttcaagagcctacagacggagtctatgtcatggtggtcgaattccttggggcaatacaatttcctcagttcctgcttctctgacaatgtgtttgggaaggtgatgagccttgttggagcaaaggaattttggaggaactttcggtactctcagcgtgtgggcgtcaaagcagagatgaagaagctcgtctttgaagccaagtgccttgccgagatcttcggtgcaagccagacatcaagtgtcgatgcggatccaaattcaggcgtcggttcagcactggacataatcctgcgggaacagttcgaggtggccatcctctcgctacacgtctacaccgacatattcttgcaccgatgcatgaatcccacaagtgctgatagctgcgacgctaccagggagagacggcatctgatggatgcgtgcaggacaatatctgagtacatgtgctacctattggtcgtccatcctgaaatgcttcctgtcagtggcagtgtgcgtgatgttctagataaggcttcagaaaccgttgccaaggtcagctctggagctgctgcaagcaagggcagagtcagtgtcgtcctggagaaactggctacagaccgtgacctgaatgacttgtctgatcccatcaccctcgctgggtttgtcttcaggggcaacaaggaagaggctgtgcattgtcatgaatcactgcaagttcttgcgcgcgcgtgggttggggttctcctctatgcagccggcaagtcccgtggcgagaaccatgcaaggcagctcagcatgggtggggagtttctcagttttgtgtggctgcacatggcgcattgttcactaggagacatgggcacatttgaggttgagctagttcgaccgagcgcggtgaatgagggcgggcgtaagatgtttgtatggggctatcagcgtcctcggtgaacacaccaccctcatttccctcctggtttttttgctcaggacacttcactcctactggccaattatggtcatgtctactatatatttcatgaaagtttgtgtg

SEQ ID NO: 17088 - DNA, 868 bp, Oryza sativa
  ref <308>: DATABASE ACCESSION NUMBER: AK067551
  ref <309>: DATABASE ENTRY DATE: 2001-12-06
gattcctatctctatccattactactctccagtgttcttttttccgtacccatggcggcggcggcggcggcggcgaagaggaagccggtgttcgtcaaggtggaccagctcaagcccggcacgggcggccacacgctcgtcgccaaggtgctcagctccaagaccgtggtccagaagggccgcgccgccgcgggagcgggcccggcggcgcgtcccacgaggatcgccgagtgcctcatcggcgacgagaccggctgcatcctgttcaccgcccgcaacgagcaggttgacctgatgaaggctgacagcactgttattatccgcaatgcaaaaattgatatgttcaaaggatcaatgaggcttgctgtggacaaatggggccgcattgaagtgactgaaccggcaagtttcaacgtaaaggaggataacaatctctcacttgtggagtatgaacttgtcaatgttgaagggtgagatcgtgttggtttcgttgttattcagaagttatgtgttccaagcctatttggtcaaattctaccttttgagttggctcaagaaagtgaaagatgaaggagattctgaggttaggttgtagcagttggtctgaactgcttcatgtcctcctatcgagcatttctatgtacggatgggtattagcctattaggtgctgcagcagttgtggttgtaagaacaaatgtgatgtgagatgatcagtcaatttgctgctgcattttgagcctctaaaaggatatgatttctaggagataaattgtctgcagtgcttctgattcgaaccgtagtaatcttatgtttgaacctctggtccatatgggcaaaaattgtttcttggatgctgagtgtttcccg

SEQ ID NO: 17089 - DNA, 2551 bp, Oryza sativa
  ref <308>: DATABASE ACCESSION NUMBER: AK067552
  ref <309>: DATABASE ENTRY DATE: 2001-12-06
gggtggtttacgtattcacgcggcggaagcttttctgttttcccccaaatttgcgcttccctccctcttctcgaaccttccgaccgccaccgttgtcgccatcgccgccggcgccgaattccgccgcgatctcgcctgctccccccagtggtaagagattcgatcggtctcgtagtaactccggctcgctcgggcaccttaggtgcgccggttcctgctcgattcgagctaccggctgccgactttgccggcggaacgtaatcggctgcgctgtcgcagtcggcggcgtgcttaaccgctcccggaattctgcttagctatggcgatgattcgatgtgccctccttcgtgctaggaaatcttgtgctgtgattttcaggcttcaactcgtttgatgcgtctatttttggaagttattagcagtagcagtgtgttcgtgtcctgcaattgacctagcctgcgcaatctgttgcttgctgctaaatgtgtgggttttttccccctagccattaaattcaaacaactagtagacaactcgttattgccgaagtacagtttggaatcatttgggtttgactgttcgttcaataaaagaaaaaaagaagggtttcagagtgtctgctagctttaaatttttgcacggtcagattaaggaaattttaattttacttgttggttgttttatttctcaacctcccattaattgctcccagttaaggtattttcagttggaacattagttatgatttgtacaatcacagatgggatttacagatgaaatagtacaagtagatgtgttagaaaggcacttgttggctggtttatcaccggatgattataagggaataagtgaggatgagatcctctatgatgcatcatttgaggcaactgaagacaagtttgtcaagtatcagattacttggtggattctgctgtcagtattgttgatcttagcttggggagtaggactcctcatgctgctttacttgccaatttggatatatgtgtgccggaaggacttccgctcaaggaagttgtgtttgactccacatgctattgtctataaggtaactaggcctgccacttttccttgttttggtgttttgaggaatgagaagcatgttgtccttcattcagtttctgatattgttgtcgaacaaggttatctccaatcactttttggtatatattcaatcagatttgagaacattggtgtccgaaagccttctagtgatgacataaagataactggaattagtcatccacatgatttcaggctgttcttgtccatcttttgaatacaagcaatctgaatctcagtagaaaagcttatgtacacgatgatcagcagagcacgagttctaaacctataactatgtcttcggtatgtctatttcttaatggtaccttttaatagtttaaactgtaaagatcctttgcatttagcaagccctggagctatgagatccaacctttctgaatgtgcgatagttataaaactaagaacaagcatatattttgtatatcgaggttctgtttgtataataccttaggaagtattgtattgtagatatatagcttctaacaacatacatggttttgctaagtcaagattgtatttccatattaccctattaaacttggctaatgttttcattttacagaccattttcactgatccccgtgttttgcatgatatatatacaacacattgaatttttcaggttcctcctcttggagatttgatacttgagaagcttgacgaagttgaaatctctgtgaagaaaatgcaaacactgctagaagatgttgaaagatccagaatgaagacttaatatgttttggtagcctggactatcttggagcgtatggtgacaaagttcttatttttggggatattttaagattgaaacaatatatggttggtgccctagtcgtggatatcagcatcacggtcatggttactgtggatagtgggattaaccatgggtttcattgggtccacaattaggccaacagatagcaacatcttctctggaacctcacccttgaccgttgacttgggcgtacgtgtgcactgcagggcaatgcggctgtgatgtgagccggtttaatttcctcttagcaatggtaggcccggatagacactggccccacctgtcagcgactcaatgtcaagcagtcaagccccaggtatagcttcatggattggagaatttggagcactgaagctaccctatcgttctcccagcttacatgtgctgcaaaacctctgaattcaacggtgatgactatgagataagttatagtgagttcatcgtcagatcatggaaatcatgttttaatctgtaaggctgatttttcttttgtcatatatttgctctagtgactctactgtatatatggtgattgaataggctagggtaggctaggcagtgattttccatgcatggtcaatgtagtggttggcaaaaacaattgaattgatggtcaatgtagtggttggcaaaaacaattgaattgatggaattgattttgggataagtaattat

SEQ ID NO: 17090 - DNA, 2629 bp, Oryza sativa
  ref <308>: DATABASE ACCESSION NUMBER: AK067553
  ref <309>: DATABASE ENTRY DATE: 2001-12-06
ctggaaatgaaacgatctggttgccttctccggttctccccaagcaaacacggactagggcctgcgccgcggcggcggcggcggcggcgctgcttttccccggcgcgccccgtccccggcagcggctcctccggcgtggtacctcccaagcgcttccgatcctcgacatgacactggcaccaaccggtctccatgacggcgacatccaacgccgccgccggcgcggccacgctgatgccgctgctgatccacctccttcgcggcgcctccgacctcgcctccgtgtccgccacccacgccaagctcctcaagctcggggcggcctcctcggtcgcctcctccaaccacctcctcgcggcgtacggccgctgcggctgcaccgccctcgcgcgccacctgttcgacggaatgcgcgaccggaacgtcgtctcctggacggccctcatgtccgggtacgccagcgccggccggccccgggcggccgtcgccctcctccgcgccatggcacgcagcggcgtgccacccaacgccttcaccttctctacagctgccagctcgtgcgcgcgcctggctgacgccggccttgggcggcaggtgcatgcccgcgctgaggtcgcggggtacgcgtgcgacagcgtcgtttccactgcgctcgtcgacatgtacggcaaggccggcagggtcggggacgcccgcgctgtgttcgacgcaatgcccgtgacggcgagaaacgcggtttcctgggcctcgatgctgtcggtgtatgcgcagaacgcgctcgggcatgacgctatccagctcttcgccgagctcagaaccaatggcgaagacatggcgcccaaccacttcatgctgtcaagcgtggtgaacgcgtgcgcgggcgtcgggcggcttggcatcggcaagtgcattcacggcatggtcctccaccatgggcacgaagacaatgacgtggttgcagtggctctggttgacatgtactccaaatgtggcatctacgagtactcaaagaaggtgttcgacaggatcaaccagccgtcggtcatcccctacacctccatcatcgtggcgacggcgaagtacggcctcggcaggtgcgcactcgctttgttcagtgacatggttggccgaggcgtgcagccaaacagtgtcacactgctcggcgtcctgcacgcttgcagccactcaggtctggtcgacaccggcctccagctcctccgttcaatgcgaagcgagtacggcattgatccatgtgccagccactacacttgtgctgtcgacatgctcggtcgtgcaggtcagctcgaggcggcattcgagctggccgacgaagcacaggtcaatggcaatgacgccctcatgctgtggagctcattgctgtcagcttgccggaaccacaagcgcctggacctagcaaccatggctgggcagaaggtatcagagttcacccaagatgtggccggcgcactggtggtcatgtcgaacgcatacgcttcagccggtcaagccgacgacgctgctgcggtgtggtcgaacatgaggcggcgcggcattcggaaggatcccgggtgcagctggatcgagataaaggacatctcctacgtgttctacgctggcatggtatcgcctgccggctcaagggccggtgaggtgatgctgctgttagatgaattggagggcaagatgagggagaagggttacaaggggagaattggcagtgccagagtccttgatgctgatgaagaagaggatggaaatcatcatcatcaggaaggcagaggtgtgatggttggagtgcacagtgagttgctggcattggggcttggattgctggtgatccccaaggggatggccattagggtgatgaagaacctgaggatgtgccgtgactgccatgaagcgtttaaggtcatcagtgccattgtggagagggagttcgttgtcagggatctcaacaggttccaccacttcaggatggggtcatgttcttgcaatgactactggtgattcaatcaaaggctagaatcagttactcccatcttgcaatgattactggtgattcaatcaaaggctagaatcagttactcccacagtcctaaaatataagaacctaaaaccggatgtgacatttcctagtataatgaatcttaagaggcactaaaaaatgtctcattcaattctaggttcttctattttgggacggatggagtagtaggaagaaaccaggtcatgttcttgcaatgactactggtgatgcaatcaaaggctaaatcggttggtagttgtgatctttttgacataaaaggaagacagccttgacagaatttctttgtgtagatgcagaactgaagtgacttctttcgttgcgagcctgtaggtaggtaccaaaggtccacagcattgcttgaaaatatagacacaaacgaacatggcctggggttggagttggccccaactttgttgaaactgggtttgttttatgatatgtctttgtgctctagtaataaatatttgatatttatgataaagtttgatcaaactcttaaattttgattatcaataatttctcaagtgatagtttttaataacatgtacatagagtactatcataaatatcataaacttattt

SEQ ID NO: 17091 - DNA, 1177 bp, Oryza sativa
  ref <308>: DATABASE ACCESSION NUMBER: AK067554
  ref <309>: DATABASE ENTRY DATE: 2001-12-06
ggttccccacttccgccccactgcgccccgcgccgccgccggcctggggctgccgcccggccgccgtcgtcgccgtggtgcggcctccccctgtcgccgccttcgtcctccgcctccccacccccctccctcgccacgccgtggcgtgagcctctctccgtcgccgccgtcattgaccgccttcctccgtcctcgccacgtccccctaagcaccaccaccacggcccttccctcaaatccgcctccgtcgccgacccatccgcgccgccgctcgccctcccgcacctcctcctccccagtgatgtctcctgcctccatccccacctcgtgcaaatcgggggaggtggacttcggcgtggaggaggtcggcggcgtggaggagttagcgaacctcgagtcagcacggaggcgaagcggagtttgtcggtggcggcggctgcagtacgaggccacgtcggcgtcgttcctgccgatgggtggtcgattcgacgagcgtgctgctaggtgagttgttctataaatctgacatagtttcagtggatttggccaccgctgacgatagccaccgacagctcgggttctctctgctatcaatgcttcttatttgtttcaggtataaaaacgacttggacttctatttcatggagtcatggttaggaataaggaatattctatgaatattccttattcccaaatttgaggactctagcatggacatcctaggagttcctacactggatattaactacgtcattcagatcccacagtaagctaattacgcccaacgatctaacacaattcctttctcagctaattatgcactcttttgtcaggaagagctgcattcctggttctgctgtaaccgagggttgatctgcctgatgttgatgtgctgttcagctgttgctgttatgaagtgggaatctctattaccaaatgatacctttcttattgttgcctcctctgatggcgcatttgagaaaatgactatgcaggatgtctgtgatctgatgttgtacgtgaaacttggtgttaagcaagaattaggatcctttgcagtaacacaacagaatttggcggattatgtagttgacctttttttatagatagggacaacggacaatgtagcagctgtgattgttccattgggatctcattatagctctaaagttacact

SEQ ID NO: 17092 - DNA, 3110 bp, Oryza sativa
  ref <308>: DATABASE ACCESSION NUMBER: AK067555
  ref <309>: DATABASE ENTRY DATE: 2001-12-06
gaatcgccgcgcctcctccgcatcggcgcgaccgcgcgtcaggatcccgatcacccacaaccatagcgcccgccgatcgcccatcgccgcctcgacgagtcgcctcgcgtcgatctccttggcgccaccaccgaccccgcgtcgatctcctccgcgcccccttctatggccagatccagatcggcgccgagcccccgccaccaacgacggcaccccggcaacctactcctcggccggcggcgcggatcgtcgccatcaccacagctcgctgatctcctccgacaacgcgatgccttcactcagccgctgctgccgccagggaggcgacgcccccaccgaaccacgccgggacactgacgcccacctcgctgatcccctcccatcctctgccgctcccctcgcgccaccgacgatctccgcctcgacgaccggctctgcgccgtcactcctcgcgatcccctcccgtcctcctctacggaaaccctgatatctccttgaccttctccttgccgccaccgatctgcgttgctgaatcaacgttgcacacctggccggtcatcaatctccgccgaccgctgctgttccccgccggaagctccaccgccgccccgcacagatcaacgtgttgctgtccccgacacctcaagctccaccgccacccctccgccgctgcccccttctccaccactccgccaccggcaaacattaaaaaaagaacaactgctttcaagggtggcacctcgccattgtttcagacaacagcttcgccggtgattgtccattcccgtatcacttcggacggttgcttctatccctcacaatctcattcactgaattcaaggcacaaccaaattcttcactgctcccttttttaacttcgctatgggatctgaagtttttagtttttttcataatgccgtttctattttggattgttcagagataaaccttacttgaattcagaagaatttagtttttagaaattaactttttagtttataggtttggagagatgaacctgacctgaattcagaagaaaaccaacttagaaaacatgcagttgcgtgttgctaagaaaacattacctgaatttagtttagaaaaccttacctgcatttagaaatccctaataaaacatgcatttgcgtgttgctaaattatgcttagcatcctaatacatactgaaaaatgggcaacatgatgatgctgttttaccacctcctgatattttttattttgcactgtgcattcagaactgatattttagtttcaactccctgtgtcaccttcaggcgtcatcggtgcagatcaagcattctagccattgtgatatgctctttcactaattttagtttctctctgatttttcttttaacaagatccagtgatttatttcaaaattgaaagcctcgaattatttgaatcttcaaatatgaagaaacatggacagtcgttctttctttagcaaggcacaagaaaattcagattctacataacctaggccatgacagggcatcacatttctgatttagttgtttgcatgctggttccaactgaaaaaaaaaaagatctaccttgtttacaatgatgatatgcaaaagttcaattcggtctgtcacattagtgataaaacaaatctgtctacttggtttgtgaggttgacacctggtgacaattctgattaaccttttctgattgagcacttgaagagataatacacaaaaaaagttttattttaaacagccaaagtgtatgtactcagtctcttcaatttcctagctgtactaaatcctgtattatggtatttggatggaatttgtgacttatattttgggttcaatattaattgtgcccattgcttgcgtggtcatctgctgaggagtacatgctgttcttgtgcatgtggatgagaagctgcgtggatggattcatgtggctgttggttgctccaacagttaaaactggtgcttgatgttggtatgggttcttgacaaaccacggcatgactaggtggcccgttgagcttgtctcggatctcagtagaattgtgttttctcaatttggtcctgtcacattcaaaaaataaaagatagttcagtctatgaatgcaccatggagttgatagtgaactgtactagattaggagtttgctatgacttagtttggttgattatgaggatttttattagtgattcttctctttcggaataaatacaaatcaacctagcatcttcctgtacatgggtttaactgtgtgacaggaaaatattattctccttcgcgaatcattcaaagttactgcatataacaatttctactgctcccagattagagcaatattggcaaaaattagagcaatgcaaactacaggcaaaaatcagagcataattgtccttcttcagttattaatgtgcaaaatttatttatgaacatgtttatatattgaatctttcttcagtggcctgtttgcattgagtatgaccagcaaacattggttttgggttttgtatattgtttactatggtaatccttctgaacttatggtttgaattttaggttcttttatcgaaggtgagcttctttgcctctcaaggatctgatgttgcgcaagataatgtgcttgggttatacaagcagaattgctgtcatatgcattcttttgcacatgaaagatcatccttttgcatttcatgtggcctgcaatgatttatttcgggtgtgctgctatacattgccgagtggaactcactccagctgtccagcgcctggtggcgtctgtcttcctcgccagtttacagctgtccttggggaagaccgagctgagctgcagtaggaagagcttcttgccagctgacctaggcaaattcgccaagctgcaggtaacacttcaaacaagtagatcagtcataaccgtctgtgcttcagagaaatggacaagttcagaatcgggaagactaatttagagagaacagagattttcagacttcagaacttagatgtgatcactgagcagagttctgtttttgctaggctgattacactgttctattaaaatggaagtttttgaattgtcaataatctcctacaagttcttctgtttaagggcgatt

SEQ ID NO: 17093 - DNA, 2627 bp, Oryza sativa
  ref <308>: DATABASE ACCESSION NUMBER: AK067556
  ref <309>: DATABASE ENTRY DATE: 2001-12-06
gacgccatctgaaccacgccacgccgaatcgtccgtcgtcctagatagtgcttcgctagctgtgggtgtgcatgccatggcgcgcgcagtgcacgaccgcctcccgttcctagccacgcccccgccggcgccggcgaggggcaggaacccgccgctcgctgagatgctccgcctcgtcggcgctgccaccgtcgactccgacgccgccgccgccgccgcggatgaggaggccaacgcgctgtcgttgccactgccgcgcggtggtgttactcctcctccgcctggcgggcggaccatccagttcaggctggcgttcaccagcctcacctacagcgtccgcgcggcgcggcgggcgaggcccggcggcggcgatggcggcggcgggtttcgcctgcctctgcagaaccggtgcgaccgcgtcaccgcggcggcgcccgacgcgcactcgtcccgcgcgagggtgctgctggacggcatcaccggggaggcgagggagggcgagatcctggcggtgatgggggccagtggctccggcaagtccacgctcatcgacgcgctcgccaaccgcatctcccgcgacgcgctcaagggctccgtcacgctcaacggcgagccgctcaccggcaacgtcatcaagtccatctccgcctacgtcatgcaggacgatcggctgttccccatgctcaccgtcgccgagacgctctccttcgccgccgagttccgcctcccgcgcgcgctgcccgccgccaagaagcgcacgcgcgtgctggagctcatagaacagctcggcctccgcgcggcggcggacaccatcatcggcgacgagggccaccgtggagtctcgggaggcgagcgccggagggtctccatcggcaccgacatcatccatgaccccatcctcctgttcctcgacgagcccacgtcggggctcgactccacctcggcgttcatggtcgtgcaggtgctccgcaacatcgccgagagcggcagcattgtcatcacttccatccaccagccgagccagcgcatcctcggccttcttgaccgcctcatcctcctctccggtggacgcaccgtcttcagtggacctccctccgccatcccggcctacttcgccgagttcgggtacccggtgcccgacgacgagaaacgcgccgagttcgcgctcgacctgatccgcgagttcgagtcgttgccggcgggaaccggacagctcgtcagcttcaacaagacgtggcaggtcatgccgcggcgaggcacaacccaaacgatgatccgtgggcgccaaccatgtcgctgaaggaggccatcagcgcgagcatctcgcgcgggaagctggtgtccggctcggacgtggccggcgaggcggcgtcgatgcacacctacgcgaacccgttctgggtggagatgaaggtgctgacgaagcggtcggcgatcaacacgcggcgcatgccggagctgttcctcatcaggctcggcgccgctggtgatcaccggcgcgatcctcgccaccgtgttctacaagctcgaccagtcgcccaagggcgcgcaggagcggctcggccttcttcgcccttcgccatgtccaccatgttctacacctgcgccgacgcgctcccggtgttcctgcacgagccgctacatcttcctccgggagaccgcctacggcgcgtaccgccgcacctcctacgtgctctccaacgccatcgtctccttcccgccgctcgtcgtgctctccctcgccttcgccttcaccacattcttcgccgtcggcctcgccggcggcgtgtccgggttcgccttctacaccctcgccatcctcgcctccttctgggccggcagcgggttcgtcacgttcctctccggcgtcataccgcacgtcatgatcggctacaccgtcgtcgtcgccatcctcgcctacttcctcctcttcagcggcttcttcatcaaccgggacaggataccggactactggatatggttccactacctctcactcgtcaagtacccgttcgagggcgtgctccagaacgagttcggccgcggcggcgagtgctacgtccgtggcacgcagatgttcgacaactcgccgctggccgtgctgccggacacggtgaagacgagggtgctggcgtccatcggcacggcgctcggcgtcaagatcggccccaacacctgcgtgatgaccgggcacaacgtgctccgggaggcggcggtgacgcagctcggcaagtgggagtgcctcctcgtcacggcggcgtggggcttcttcttccggctgctcttctacttcagcctcgtgctcggcagcaagaacaagaggaggtgatcgagccgtacggacgaggttgcacgcgcgcgcgcgcatttgcgcacgcgtttgaacgtccgggggcattaaacgcttggggagaaatagagagaaaatgatggcctagttaatttgaagctgtttaatttatgcaattgttaaggcggatatgatgtgatttcaatttggacccctttttgtttcctgtgatttgtagctaaataagtggcttatagtccactacacttttttttcttctttttctctttgtagtcgctgtgttaaagacttatatatgaaatgatgaagtgttttg

SEQ ID NO: 17094 - DNA, 1668 bp, Oryza sativa
  ref <308>: DATABASE ACCESSION NUMBER: AK067557
  ref <309>: DATABASE ENTRY DATE: 2001-12-06
gggtgccgcgccagaaaggggagaaacgcttcacgcgcgcggcgcaccctagcttgggccacgatgccatccgctaacgtgcgcggggcgcagcctagcgccgaccgcaggttaagtacgctggtgcgccacctactgccttcctccgcacgaacagcaaccaccaccagcacctcctcctccgccgccgacgccgactcctccctccaagctttccccaccatggcgtcgtcgtccgtcttcgctggcctcgcgcaggcgccggaggaccccatcctcggggtgacggtcgcgtacaacaaggatcccagccccgtgaaggtcaatctcggcgtcggcgcctaccggaccgaggaagggaagcccctggtgctgaatgtggtcaggcgcgctgagcagatgctgatcaacaacccgtcacgtgttaaggagtatttgccgatcactggactggccgatttcaataagctgagtgctaagcttatttttggtgctgacagtcctgccattcaagagaatagggtggctacagttcagtgcttgtcaggaactggttctttaagggtgggaggtgaatttcttgcaaggcattatcatgaacgcactatatacatcccacagccaacctgggggaatcaccccaaagtgttcactttagctggcctgactgttaggagttaccgctactatgatcctgcaacccgtggactggatttccaagggctgttagaagatctcggttcagctccttcaggtgcaattgtactgcttcatgcttgtgcccacaaccctactggagtagacccaactttggaccagtgggaacagatcaggcagttgatgagatcaaaagcattgctgccattctttgatagcgcttatcagggatttgcaagtggaagtcttgaccaagatgctcaatcagtgcgcatgtttgttgctgatggtggtgaattgctcatggctcagagctacgctaagaacatgggattgtatggagagcgtgtcggtgctttaagcatagtttgtggaagtgctgatgtagctgtcagggttgaaagtcaacttaagcttgtaattaggcctatgtattcaaaccctcctattcatggtgcatctatcgtggctaccatacttaaggacagtgcaatgttcaatgaatggactgtggagctgaagggcatggctgataggattattagcatgagtcaacagctttttgatgctctgaaaacgagagaaactcctggagactggagtcacatcattaagcagatcggaatgttcactttcactgggctcaacagtgatcaagtggctttcatgaggcaggaataccacatttacatgacatctgatgggaggatcagtatggctggtttgagcgggaggaccattccgcatcttgcagatgcaatccatgccgcagtcacaaaactgaagtgaatgatggtagcatagcagctccctccaagaataacatcttaaaaccatccgcagcagtgttctgaggattcagacagtgatgtttgctggctgagcacatcctggaagtttccttgtaatagactcgtgtgacttgcttttgggagcagttttgtaccagtggattcagaaaaagtggtgatttcgaatcacctaataagctccatcggtgatgcttttacc

SEQ ID NO: 17095 - DNA, 2553 bp, Oryza sativa
  ref <308>: DATABASE ACCESSION NUMBER: AK067558
  ref <309>: DATABASE ENTRY DATE: 2001-12-06
gagtggctcacgagcctctgtcttggtttgcacctgcaaatggaccgacgacgacgaccacggacgcctcttctgaccgcactgttgctcgtctcgctggctgcggcggcggcggcgagcggcgcgccctgctccggtctatcaagccgctcttcgtcggcggcgagttcggctacggcgatgcctggaacgagagcaccgactgctgcggctgggaaggcgtggtctgcggcggcggcggcggcggccaccacgtggtgtcgctgtctctggtccaggccggcatcgccggcgccgtcgacggcgcggcgttcgcggcgttcacggcgctgcaggagctggacctgtcgtggaatcgaatctctgccttctctcttccatctgcaggaggtgagcgtgcatttcagaagcttagcaagctctcgctttcgcacaacagtctaacaaatgaaggcgttgctgctctagttatcaaccgaactacactttcagagctgtaccttggcggaaaccagttacttacaacaagttggatatccaatttgacgtctcttagggtggttgatttatcccagaacttcttacacggatacaacggtatatgtaacctccatcaactagagtacctacaccttggtgtcaacatgctacatggaaccataaattcatgcttgggaaaactacaacaattgaagtacctgaacatggaaagaaactttctcatgggggagattgcaccgaacttacttatcaacttgaccaaactggagactatacacctgggggtgaacaatcttaccggcacattcatgctctcctggctagcaaacagctcaaacctcgttgatgttgtcctctcacacaactacaatctgaaaatcgaaaccgagcttgtgagatggacaccgttgttccagctggtatacttgaatttaagcaactgtgttatcaataggcgaagcaatggagttgtgccgacttttctgtcaacccagcttagcctatccgggatcgatctctcgcattgttcgctccaaggcaggattccaccctggctgttctacaatctatctgattttgtcttgctcaatggcaatagaatggatgtcattgatatggatgggcttggtggtaacatacctcaccggtgcaggtgcttgatttgtcagagaacaaaatatcgatgtcgatcccgaccaactttggaagcatttttcagtttttggactactgtgacatgtcctccaacaggttgtacggtgggattccatcattggcagaggcaacatcattggaggtgcttgacttgtcatctaacaacctcaatgaggaaatattgccaacattaatagggaatttgtcaattctaacatctcttctactctccaataatgacctgacagggcctatgccacctttccattggaatttgggtagtttgaagcacctcagccttgagaacaaccgattctcgggatggctatctccattgctgtcgaacagcagtaatctcaagacactcaatgtgagaaacaaccatctatcaggaatcatcccggatggcctcctgagcttccaacagcttggtgtgatcctccttggagggaatgattttcatggtccaataccattggacctttgcttcaacaactatctccactttgttgatctctccaacaatcaattctctggggagataccaaattgcttctacaatgatttctggacagatttgccaatgtacttcaacgatgacccattctcaggcaatatcacagagcgcatgtctgtcgacttcacgacgaaaggcgagaaccttacctacatgggagagcctctagtgctcatgacgggcattgatctgtccatgaatcaattgtcaggcgccatccctccgccattaggtttcctgaggcagctcaagtctctaaacttatcacataaccaacttgttggcccgataccagagacattcatgtatatgcaggatatggagagccttgacctctcatacaaccacctcaatggcagcctgcctatgcagctggcaaatctctccttcctgtgctcgttcaatgtcgcctacaacaacctctctggtgagatacccttccaacaacagcttgggacattcgatgaatcggcattcgaggggaatgacaatctctgtggtggaatcatcaacaaaaactgctcatcagtgctgcatcagaatcaaggagtgttcgacgccattgacacgtcacttgttttctggtcctacgtttttgggtgttttgcacttggattttggggcaccgtggcattgctgatatgggatgaagtgtgcaggaggagactgtgtgacttgatggatgctctaatgtttaagctgggttgggaatttgtgccttgaatcctgatatgtctagctaagagtctaggagacatggaaagacagagcaatcccttctttttttttgcacgagatgcacatgctgtcacatcctgattttcgtttcaggatttataaattatttaataaattaataatagaatttatattaaatgttc

SEQ ID NO: 17096 - DNA, 2255 bp, Oryza sativa
  ref <308>: DATABASE ACCESSION NUMBER: AK067559
  ref <309>: DATABASE ENTRY DATE: 2001-12-06
gaggaggggtaaatagttaaatttccctttcggaccctcgtcactcatcgtcgtttgcccggcgccgcccggccgccgccgatccccatccattccgctagcgagcaggggcgccgtcgttcgtcctgctgcttccgccgcatccatccctggtgagcacatcctccgccaccgccgcctgcgccgatccccatccatcccgcgagcgagcaggggcgcccctcgttcgtcccgctgcttccgccgcatccgttgcgcacatcctctttcccatatctctctctacccacgcacttttttctttatcgaatttgcgttaaccctagcttctgttctggaaatttgccttaaccttgatactgataacagtttgtttgttcccaaaaagtttcccatgttagacccgcccatggaccggttctagcgttggtatggagagcttccgtgatgatcagcgcgctggtcctcaatccgagcaacactctgatcatgtgtctgattctgctgaggatgcaatatctgatgaggtgctgcatctgctgatgttgctacagcatgtgaaatgtgatatgttatgctgctgtaccttttttttcgcccgcaaatttcattaacaccacttcaggttggcaggacatgcacttatgtcttcaatgaaattagagagattccaaatttctttttttttctcttggcaccagaccactttataagatgtacaacaagaagtttgttttatttttggtcttttttctaacaaatgtatttggcatctattaacaaaagtttgttttaactactaatagtgtatttccacttgtagcagtggcgtatgagtgcttgctgaacatgtgcctttatatattaacaggatgttcttgcaccaacaagactgtcattagcttgtgctgcttcaaaagaaagagagaaggaaaacaaaatggtggtgccagatgaatcaaccatctgggatgaagttctggaagaagccgatgagctagcctatgtgcacaaagttcctcctagtatatcattcctatctgctggaacaggcaaaaggagaaaaggtgaacacaggctcaaattctcaatacgtggatccagttctgtttcactgaatgtgaagactgaaaacccatacattggggagcaagaagtttcatcagtaatgccaacaaacagagctcctgaaaccatgatggctgagcagttggaaaatatcaaggaggaaactgaagatttgccctcagagtttgcttgttcaaccaagaaagcaaatgtttcaatttctgaacttcttgacagtttacaggatagaagtgcctcctctgctgggacaccatttttgttgcatcaacacaccagacctaaggaagaaaagccaaaggtccctacttctgtgaagagaacacttgcacttctaggtcagaggaatcttgagaccgagaatcccttggagcatgtaattggtgaaacatctagcgaggaggaagacgatgctcaaaacaacctggctttgatcaacaaagatgtcaaggggcaaactatggctgacatatttcaacaagtatttaatgcaacaagcatggactgttttacactgcccgtgagatcatatggatctggttattatggaaggatgcaacaaattctgcagatggagaaagataggcatgctgagttcctaagacagtataacagagagcaagattatttaggcgatccaaagggggttacagttcagattttgtcaaggtctctggaaggaaagctaacaatctgccgctgcttgttcatggagaagagcaatttggccacaacaggggaagtgtcaacagatcttgacatggataatagcagcgtgaaaaggaccatcatcttcagtcccaagatatgtgacaacgtggatcttctagcaggaaacattattcacatcttcccaccatggaaagaagttaaggtgaaagaagagacggtgattctttgcacctacttctcgcatcgtggagtttgatactacttgagatgcttcttttttagatgaatttatcatgagtaagaggaagcaacgattatgcatgaccgtgtcctgtgtatgttggcgctcccgagtcccgagtcactgcacgacctgctgacctgatagtttagaagttagaaccctcctgatgaccacatgatgtagccgagtttgtacacagcgtactttgacacaaccagtatataatgctaatacatcattgccttttttatcc

SEQ ID NO: 17097 - DNA, 2739 bp, Oryza sativa
  ref <308>: DATABASE ACCESSION NUMBER: AK067560
  ref <309>: DATABASE ENTRY DATE: 2001-12-06
gagataatcgcaggctcgcagtgctcgtgcgacgacagagaggcgaggaacagagagaggggggaaagcgaaacgtacaaattcaaaatcactccccaatttcccccgaataattccaccgtcgcctaaagccagtttcatcgggaacgcctcgaattttccgatccctaggcgggcgggcgggggaggtggagtgcccgcggcgcggcgcggcggtggttagggtttggggctcgtcggcgtcggcgagggcggaggggggggggatggatccggagcagacgttcctgcgggtgcacgcgcggctgtccgggatgctgtcgcagctgctcacgccgcggatccgcctcgcgctcgagtacctctacctcgccggcgccgtcgcgctcttctgcctgctcgtcgtcatgcacaccaacttcgtgcagcagcctggctgttcaagcgagttttctgggattgaatttggtgaagcgcaacttgtccaaatcaagataatcagtggtggactatgggtcagcaaaggtgcatcctacattatggatcttcagaacctggggcgttcagctgagaaaattctagaggttaatggtgataggttcaatattttggcatctaagttttggtcaacttgggttggtcctggagctagaaggagcaaaattatgttcagaacttggaagggagacaaggaatttgaaccacaaccagagaatgcagctgacacagctattaccgcaaccacttcaggagtatcggattcgaagacaactgtggagggttctgcataccatccattatccgcaaaagaatcatttaaagcagcagttatgtatttattcagaaagtggtactttcgtgttgtctcgttctggaggaatataaaacaactttcagataatacttttcaattaatgttcagatcaaactggaatgacttcctccataccatcaagggtattcaattaccaagcgtggatcatcttgtttcaacaatagtacagtggtttgagagacgaagcaaagcatttgaacctacctatttatatggtgtggagaagggatatttcttgctttcagaaggggccaaagttcgtcatggtgttcggactataaatatcacaatttctgctcgaaatccttgctttggaaataggtggcaacagcttttaataaacagcattgttggctatgacactatacttacaaacagcttagtgaactcccctggtcatggctatttatacaactttcaaacaaaggagctttatgatctcagttacggacatgaaccaccagcaggtccaacaagatttggagattattttgtgacgaaatgtggtgtacttttaatgtcactctttgtttttttcacaaccaccatgtctgtttcatttaccctgagagagacgcaatcccgcatgcttaggttcacagtgcagcttcaacatcatgcacgccaccaactccccacatttcaactgatatttgtccatgttatcgaatcattggtttttgttccgataatgattgggatcctcttttttctatttgagttctatgatgatcagttgcttgcatttctagttttgactcttgtatggttgtgtgagctatttacgatgatcagtgtgaggacatctatatcaatgcagttcttcccgcgctttttcttgctgtatttcttggttttccacatttacttcttctcgtacacatatggcttctcctacctggccttttctgccaccgcggcgttcatgcaacatctaattttatatttttggaaccgcttcgaggtgccagcccttcagagattcattagaagccgagctcaccttcaccaacaaacgggtgttcagatcacatcctcaaccatctatacatcagcattacatatagcaagggtaaatatgagggaccctggcgcaatgaatgagggccttggtgctgctcgtgaagcagatgccctgctggttccggatgagcctaacaggaaccaacaagagggtcaaccaattgaaaatgcagagttagtggccaacaatcctctgcactatcaagatcaaaaccctcagcaacctggcaatgctccggcaggctctggctccttgaatccatttggttcccttttattgtggttgctaggaggcggagcttctgatggcatagtatctttcttctctatgtttagagatgtccgtgatcatggtcaagattacactgatccacctcgaaatgaaaatggtcaggtaacatagaaaatataggaaggaaaacagaagggaattgcagacgaagaacactggtggagggcggttgggcgaaagttgcctatgttattaagcaagctgatatgttgcctgctccaccatcaaaggataatgacgaatatgcattgcagacttgtgtcggctgaacataccgcgttaagctgcagaatctgttaatttcttttctttttcgttgttgagtaaggttgctgaattgtacctactcatgacatgtgtacattccctaccgtctgaatgggcaagcccggcctattcttgtacagaaatgttcttcagctcatctcattttgctttttctgttgaaatcttttgtaccctatataggttggaactgcaacatgcagtattgcaggcttgcgctgcgctcctgtgtgttctacaaaagaattgtgtagcttgtcaatgcaattttgtgctgacaaattatattcgatttggatttgtt

SEQ ID NO: 17098 - DNA, 1526 bp, Oryza sativa
  ref <308>: DATABASE ACCESSION NUMBER: AK067561
  ref <309>: DATABASE ENTRY DATE: 2001-12-06
gtagtgctttacttaccagctgcctgttttttcttctctttccttgaaaaaaaaaaccatctttatttttgttaattagggaaaagaaagagtgcatgtgaagtcaggagtaggagaggttggaaaaaaatagggggaaaaaaaggagatatatattgatgaaggatagttgagatataagcaagaatttgtgagaggctagtaggttcccaaatccctagccctaatctcctcacgtgctcgtgagctctcatcggtggatacgaatttccgcggctttgtgttagagtttttggtgatacaagaagaagcgcgggcggccgaggaagtacggccccgacgggtccatgtcgctggggttggtgacctcgccgacggccgccgcgtcgacgccggtggcgcagggcgtcccagggccgttctcgccgacgcagccgaagccgccggcgagcttcttgtcgtcggggtggccggacggggtgaagaagcgtggccggcccaagggttctaccaacaagccgcgcatcgacgccgtcggatcggcgggagttggatttacaccacacgttattacagttctagctggagaggatgtgtctgcaaagattatgtcgtttgctcagcatggaaatcgtgcggtttgtgttctttcagcaaatggtgccatatcaaatgtaacacttcgccaaactgctacttcaggtggaacagtaacatatgagggccgattcgagatactatcgctgtctggctctttccttctaaccgaccatggaggccagcgtagtcgaactgggggactcagtgtttcactggctggtcctgatggtcgtctgttgggaggcggtgttgccggacttctcatagcagctactccagtccagattgtggttggaagcttcaattctgaagggaaaaaggagccaaagcagcatgctcattcagaacccgcatccgcgccatcgaaagccgtgccgacggccgggatgggacccaacagcccaccttcaagaggcacattgagtgaatcctcaggtggagctggaagcccattgcatccaggcattgctcctcccagcagcaacagccagccgccattcttgtctagcatgccatggaaatgaaatgagaccttttcatccttcaccaaacctggactctgaatctctgatagactttgtcgatgaactgcatcttctgccagaaagtagtagcaaccgttgccacacgttttctctaactagctcctatgatgtagtgtaaatctgaagtttaattaggggagaatttgtagctggtaagtgtagctgtcgtgtaggtttcaccctggatttattatgtattaggtaggtagtggtatcttgagagacatatgatcatgttatcctaatgtcctatatgcaatgttatcaaagattattgttattattatggcctctagttacatcaaattttctcatgggttcatgcatttcaatggatgaaaaaaaaaagaaatagaaaaaggcttgcctagaatgaattgc

SEQ ID NO: 17099 - DNA, 2074 bp, Oryza sativa
  ref <308>: DATABASE ACCESSION NUMBER: AK067562
  ref <309>: DATABASE ENTRY DATE: 2001-12-06
gggctcctcccccattccccaaccaaaccccttccccttctcccctcactctgctcccctcgaaacctagggttagggtttcggcccccctcctccccaccggcttccgaatccacccgcctccgcctccccctcccgccatggccgccggctccatcgtggtggacttcccctccatgggcgccgcctgctgcttctccagcctcgagtccctcctccgcgactccacctcccgcttcctcgccgccgtctccgccgcgcccgacccggacctcaccaacttccgctccctcttctcccgggtgctcaacacctacccggacccgccgctggaggccgtctggttcttctccgcgctctccttccacgacaaccccggcgacctccgcagcctcctccacctcctctccgccttcaccgcctcctcccgctccgccgccaagccgctcgccctcctcgcccccgtcgtctccgagctctaccactccgccaagccccggagggaggccgaggccctggtcgaggccgtcctcagctacatcagcatctgcagcagccgcgccgcccccgccgccggcgatggcgccggcgccggcgccgacgccgggagcctgctaccggccttcggcgagctggtgaaggtgtggagcgtgcgccactcgagggacaggtgcccgttccaggtgctcttccctcttgtcggggaggacgccaggcgggagctcatgagggaaggctgcagcgtcgccttcctcgccggggcggtggttgccgaggcgttcctgctcaggctctgcctcaaggtgcagggcgcggcaggcgcgtcacgcgccgagctgcagaaggagctcaggatctgggcagtgagctccatctcggtcttccagaaccagcaattcttcggggttctgctgaacatgctcgtgaatcctccgctacctgtttattcactactgagtgctgatgatgaaatcttggtgagagatgtcctttatgatgctctgattttggtggattattctttcattaacaaaggagcaggagttgatcaagctgatagctcccttttgcccctttatgtgtcaagattgcttatcactcatgatgccatcaatgacgccaggagcaaaggtgatcaaggaagggcgatgtctttcatgaatgccttcttcacttcaaacatccccacttattttgccaagtgcgctactagtcaagttggcttcaaccaactcagcaaaccagctgctatcacacctcaagctcttctcaagtggcttgtagatctggaagataagggcttcaaagtatttggagagaatgtttccaggattagggagaggctgatgtatgacgaggtcaagaatggttaccagagcaggatgactcactcagatgctgaccttttcttcattgacaagcagagcggtggggaggttatggacacaagagctggtgaggatgaagaagctgttgagatggaaacagcagacaatgcttttatggctgctgctcagtctatgaaggcgatggctaatggcatgaggaaaaggaaggattgcggggctgaagacgcaaatgtggtcaagtttgtgaagtacaaggttgaagacagctcagtgaaggattacttcttgtcggcaaataatggtatgagcagtggtagtgaggtagagaatccacagtctgatgatgagatggaagaaactgattgatggatagagaggaaaccatccgctaatgcttacttgggagagtcttttggcgagtctggagttgggacgattgctgttgcttcaggttccccttctgtaggatgtcatgcagcttctgtctggatgatgaatgaagcgggattctaggataataatctgcaacgcagagcccgaccccagccaggcttaccgatatagtagtaactgcttagctaacttagactcgatgcatgatgctacaaactatatatcatgttctcttctatatgcaatagagactttaaaatgtagatctactttaaagacttctgtaagagaagagtcccttttatgttatcccgcggaacatcttttaagtt

SEQ ID NO: 17100 - DNA, 1613 bp, Oryza sativa
  ref <308>: DATABASE ACCESSION NUMBER: AK067563
  ref <309>: DATABASE ENTRY DATE: 2001-12-06
gtactccccattccgtccgtgcctccccctaaccccaacccgcctccagcttcgcgccgcctccaaacccccacagtccgccgccggcggccatgctcctccaccaccgcctcctacctcgcctcctcctttccccctcgaccccggtcaccaccaccctgctcgtccaccgcacctccctcttcccgacccgccgcatcctctcgccctgctgctccgcgctctcccaagtggcggcggcgccggaaaccgtcgaccactccgacggcgacgagccccagggggatgtgcaggttcagctacctctcgaccggctcttcgtgccgcccgggggcgagcgtgtccgcgggggacgccgaggcggtgaccgcgcgggtcctcaagggctccaacatcgtgctgggcccgtacgcgcgcggcgacgcgaacgtgatcgccgcggacttcgtgaagagcagcgtccgccccgatgactgccccagggacgggctaccggagttcgcccttgttggccggtccaacgtcggcaagtcgtcgctgctcaactcgctcgtccggcgcaagcgcctcgcgctcacttccaagaagcctgggaagacacaatgtatcaaccatttcaaagtaaacgacagttggtaccttgttgatttgcctggttatgggtatgctgctgcaccacaagaagctcgcacgaattgggatgaatttactagaaattacttcctcggcagggagaatttggtatcagtttttctcctagtagatgcaagtattccagctaagaagattgatcttgactatgctagctggcttggtcaaaacaaggtccccatgacgctagtgttcacaaaatgtgacaaacgcaagaagaagaaaaacggtggcaaaagaccggaagaaaatgtagaaaacttccagagcttgatccgtgaatattttgaggcagcacccccttggatcatgacgagcagtgtcaccaatcaaggccgagacgagatacttctgcacatgtctcagctcaggaactattggctcaagcattaagatgaaataaaaatactaatactagaactcaagcagcagcaacgcatgcaaaccctgttgctcattgatgcctcggcaattcagcacctttgcaatcaggccttcaccaactgacttgccttttgagctgttgattgtaaactattgcctctgtacatgattactcaatcaacagattggagaattggggaatacaaacaagctgctacatcaactaccctaggttcaagacctttcaaggaacggtttctgtgatgggcagaatgcatggaacaggccacattattgggatccatcatacaatggtttcttttatcacatgcttaatcaagtgcgtgctggcacaagtccgcctggagaatggagatagaaaaatgctcaggtaattgcaggctagtttgatagtactagtaaactgttcttattagtaggatcccatgctgatgtgtgtttcgtttgttaggcctctctcctttcttaggtttgcccttcccatctgtcctcagttctgtcttactgctaacaaaatacttaacacctgtatgtttgtctttataaggtcagatctt

SEQ ID NO: 17101 - DNA, 3583 bp, Oryza sativa
  ref <308>: DATABASE ACCESSION NUMBER: AK067564
  ref <309>: DATABASE ENTRY DATE: 2001-12-06
gagtggagctttgagctttgctaatcttggggcgttgagggagcttgagctcgctgctaatggcggagagcgatggcggcgaggctagcccgagcggtggcggcggcggagaggggagccccgatccccggcggccaccggctcggccgcagctcaccaagtcgcgcaccatctccggctccgccgcgtccgcgttcgacagatggggcaccagcaacagcagcagcagcatcctagttcgccgctcctccacagcgccgctcccgccgggcgcggcgccgcgggggctgctcaccgtggccgtggacgagccctcctacgcggcgcccaacggcggggcggccatgctcgaccgcgactggtgctacccgtcgttcctcggcccgcacgcctcgcggccgcggccgccgcggtcgcagcagcagacgccgacgacgacggctgctgctgctgccgacagccggagccctacccccgccgcgccgccgcagacggcgtcggtctcgcagcgggaggaggagaagagcctcgcttccgtggtgaagcggccgatgctgctggatgagaggagatcgctctcgccgccgccgccgcagcagcgcgccccgcgatttgatctctccccgtatcttgtactaatgctggttgtaactgtcataagtttttccttggctatatggcagtggatgaaagctaccgtactccaggaaaagatcagatcatgctgtagtgttagtactgtggactgtaagacaactactgaggcgttcaagattaacggacagcatggttctgattttatcaactccgcggactggaatttagcttcctgcagcagaatgcttgtttttgcgatacctgtattcttggttaagtacattgatcagcttcgacgaaggaacacagattccattaggctaagaagcaccgaggaagaagtgcctctgaagaagaggattgcttataaggttgatgtgttcttctcaggacacccgtacgcaaagcttcttgcgctcctgttagccacaataatcctcattgcttctggcgggattgcgctttatgttgtcagcggcagtggattcctggaggctctttggctttcatggacttttgtggcagattcaggaaaccatgctgatcaggttggcctgggcccaaggattgtgtccgtgtcgattagctctgggggtatgctggtgtttgccacaatgcttgggcttgtgtcagatgcaatatcagagaaggtagattcctggcgcaagggaaaaagtgaggtgatagaggtcaaccatatactaatcctcggatggagcgacaagttgggctctctcctgaagcagctagctatagcaaacaagagtattggtggtggtgtcgttgttgttctggcagaaagagacaaggaagaaatggagatggacattgggaagctagagtttgactttatgggaacatctgtaatatgtagaagtggcagtcctctaattctagctgatttgaagaaggtttctgtttctaaagcacgtgctattattgttttagcatccgatgaaaatgcagaccaaagtgatgcacgggctttacgtgtggtcctgagcctgactggagttaaagagggtttaaggggacatgttgttgtagagatgagtgaccttgacaacgagcctttggtgaaactggttggaggtgaactaattgaaacagttgttgcccatgatgtgattggacgtttgatgatacaatgtgcactccaaccaggcctggcacagatatgggaggatattttggggtttgaaaacgcagagttctacattaaaagatggccagaattagatggcatgcgatttggggatgtcttaatctcatttcctgacgctgttccatgtggagtaaagattgcttcaaaagctggaaaaatcttaatgaatcctgataatgattatgttttgcaagaaggtgatgaggtccttgttatagcagaagatgacgatacttatgttcctgcctctctaccacaggtgcgaaagggttttctacctaatatcccaacccctcctaaatacccagagaaaattttgttctgcggttggcgacgtgacattcatgacatgataatggttctagaagcattttctcgctccaggttctgaattatggatgtttaacgaggtgccagagaaggagagggagagaaaactgactgacggtggtatggatatttatggactaacaaacattaaacttgtacataaagaagggaatgccgtcatcaggcggcacttagaaagtttgcctctggagacattcgattctattttaattcttgcagatgagtcagtggaggattccatcgtacattctgattcacgttctttagctacacttcttctaattcgcgacattcagtctaaacgtcttccatcaaaggaactaaaatcacctctgcgttacaatggcttctgtcacagctcctggattcgggagatgcagcacgcatcagataaatcaataattatcagtgaaattctggattccagaaccagaaaccttgtatctgtctccaaaatcagcgactatgttctatcaaatgaacttgtcagcatggcattagcaatggtagcagaggacaaacaaatcaacagagttcttgaagaactttttgccgaggagggcaacgagatgtgcatacgttcagctgagttttacctctatgagcaagaggaattgagtttctttgatataatggtcagggctcgtgaaagagacgaggttgtcattggctaccgccttgccaacgatgaccaggcaatcattaatccagaacagaagtctgagattaggaagtggtcgctagacgatgtttttgttgtgatctcaaaagcgggcaatgcaacatattttgtgaagaccacggtgatgcggtctaacccagttgtgtattcttctacattttaatttgactaattctgctcctccgtttgctgttatttttcgatttaaattagtgggtccaggctccagcaactctaatatagatggcctaaatttgccattggcctgtctggttgcctggatactctcatccaaggttcatatgaatgctcacccccaggcttgtatgaggtcatcctggatagagctggcatggctaaaggaatggttgcctggatactctcatccaaggttcatatgaatgctctacccccaggcttgtatgagggtctctacccccaggcttgtatgagggctaaaggaatggttgcctggatactctcatccaaggttcatatgaatgctctacccccaggcttgtatgaggtcatcctgatagagctggcccccaggcttatatgaatgctctacccccaggcttgtatgaggtcatcctgatagagctggcccccaggcttgtatgaggtcatcctggatagagctggcatggctaaaggaatgcaaaattgcaaattgctatgtttggctgttgcttgtggaattgcagtttgttggacagatgtatagggccagttttggaggcaatggcaaagctgcggtattccaataatatactgtacaattgctg

SEQ ID NO: 17102 - DNA, 3720 bp, Oryza sativa
  ref <308>: DATABASE ACCESSION NUMBER: AK067565
  ref <309>: DATABASE ENTRY DATE: 2001-12-06
gagtagtagtagtatccgagaaagctgcgagcttttcttccccgattcgagctgcacgcgcgggaaggaggaaggtaatgcgggtcgccaatggcggatgatgcagaccagcaacctgcaactgggcgagctgctgatcaatgaaaagcagcatacggtggtaattaagaaatcaggggtttcagctctgatctgttgaacagttgatggttatggatcgaacgagttggctctggaggcgcaagccgtcagacaagagccccggaggcgccgagaacaccgtgtctgtgtcgtcacattctgagcactactctgatgatcaggaggttctgaggcctgtctcaaacaatgcttcaccacatcttggccaatcacctggaatgccttcaagggttagggatgatgggacccaagagattggagtcacaaaaccctcgaatgagaagttagcattgggatttaaactaaatgattcttctccacggcatggtcaatcatcagagccacagtcatcttcaaatgtcagagatgaagatgtaaaggagaacttgaagagtttgaatgataaacttgctgctgcatttttgacaattaatgctaaagaggaattggtgaggcagcacgctaaagtcacagaagaggctgttttgggttgggaacaagctgaatctgaagttgctgccctaaagaagctacttgaagcttcagcccagaagaatggttccctcgaggttcaagtcagccacttagctgaaaaaaatgcttctctcgaggttcaagtcagccgcttagatgaggctctgaaggaatgtgtcaggcagctgcacctagcacaggaagatcaagcggagaaagtccatgatgtagttaccaagtcccaggagttggagtctgagaactcaaagctccaaaaccgcatcactgaactgaagaagcagctggaaaccacgaaactagaagcctccaacatgtctatagatcatgatctgcaagagaagtttcaggcaattaagaaagagaacatggatctcaagtccaagcttcttgtacagtccaaggacctgaagatactatcattggaaagagacttgagcaatcaagcagcggaaacagcaagcaagcaacatttggaaaacgtgaaaaaaattgcaaggcttgaggcagaatgccgcagattacatcatctaactcgcaaagcaacattaattaatgattctaggcctctggcaaacaatacttgtgtggagtcacttactgatagccaatctgacagtgctgaacgcatggctgctgttgataatgaactgcggaattccgactcatgggcatctgctctggtagctgagtttgatcagttcaagaatggaaatgctgatgagaaaaatcttgtgaacaatcctgttgtgattgatctaatggatgatttccttgagatggagaggttagctgcattgcctgaatcagatcgcacaagctctaccttcgatatggaaacagattctgataaagctgtgaccagaaacagctcctctaaacttgaaactgaagagttgaggaatcaggtggctgatttgcatgcacaggttgagaagattgaaagtgagaaaaaggagcttgagatggcactaatggaggcaagaaatcaacttgacatctcctgcaatgcactagtggcagcaaagaacaggctagttgaaatgcaaatggagttggacttggcaaatgactccaagcatgatgctttgagggattttgagggattgaactcagagaagaaggctttggagtttcaactggagcctaaatctgtacgagtggaggagttacttcaggtggtggcttcattggaagaaaacacagataaaaaggaattggagtcacaattagaactgctgtctgcggaagccaaagagcttcgtctgactgtaacatcattattagagaagattgaagctgaaaggtctctttccgtgcagcatcaagcagaagcagtggctgcatgtaatgcgaaagaatcgttggaggaacagctatattcagcaaacactgaagtagagagattgcatgtcattgtcaaagaactggaggatgaggtagaaaaagagaagatgaggcaggaagaactcgtggcagaattagaaatgaagatggaaacagctgtcgaggctattaaagaatcattggaggcacaactatgtgcagcaaacactgaagtagagagactgaatagcatagttcaggcactagagaacgatatagaaaaagagaaggcgctgcataaagaactgacagcacagttagaggtgaagtttgaagaagagaaagctcgttctgttcagactgttaaggaatcaatggaggcacagctatgctcatcaaacaccgaagtactaaaactgcgtgacattgttaaagcactagaaaatgaggtagaaaaggagaaggcactgcatgaagatctttcagcacagttggaggcgaagatcgaagcagagagaactttttctgtggaggctattaaagaatcatttcagtcagaactccagtcagtgaactcagaagttgtggagctgcgcggtatggtgactgcacttgagcatgaggtggtaaaggagaaaacattttctgcagagctccaaatgcagctagaagctctggaggcaataaaaagggtgttggagtctgagattgagtctgcacatcaggataacagaaagctcaatgataaggtgaagtcttttgaagcaaaactgaaaaaacaggtgtcttcagcggtggacttcacagccaaggaagaagccatgcagtcagagagaagggccatgaagcaacaacttgaagcagcaaagatggaagttggaaagctgacaaacaaggtgagcttgctccaaggggaggtgttacaggagagattgttatcagaagagttcgaacaagaataccacaagctggaggctcggctgtcaagggatagccgggacgcgaagctctggcgactcgcaaattcaaatgggggtctgaaggccaagcaggagaaggaacttgcaaatgctgctgggaagctcgcagaatgccagaagaccatagcttctctcggccgtcagttgaaatcattgaccgacatcgacaatacgattgtggagcctgagagactggaacccagagaaatcagagaaatgccgctcgattttagaaatagtgatgctgactttgcagtatttgcagatgagttatatgattttgatcttccaaaggtcaacagcagctgcttttcgccgttaccgtcgatccagccctcttcgccaccttcagaaatgtcagtatttgcagggggcctgtcttcacttagtagtttcagaagcaaaagaagaaagtaaagagctggtgaaaacaaactgtccagatgctactaacagttcatggatgctctcatctgtaggtagatcagtgtacatttacagaaactgattgtagattctgtgtgctgaattccgttccagcaagctcagtttttttttcacagccttcttgatgagatttttactgtatcagtgttggctgttttggtgccagaaaaaatgggaagaaaaatgtaaactcagtatcagtgtgagactgcagaagtgcagatacattgtggtgtatttgtgttgtgcggcttatacttgctgtgtgaattgtgatctccatattaccaatcatacttattctgcctgattg

SEQ ID NO: 17103 - DNA, 3434 bp, Oryza sativa
  ref <308>: DATABASE ACCESSION NUMBER: AK067566
  ref <309>: DATABASE ENTRY DATE: 2001-12-06
gattaacaagcggcgagcgctcgagctgggtgcgcgagcggttggcggcgacggccggcggccggcggcgaggtcgagcgaggaggcgggccggcgaggcgcgcggtactttgtgcctcgaaacgagtgggcctttattttttttttggttctgtttcggctcgtcgcggatttcgcacggtttgcttcgttcttggtgattttcttgaagcgtcgtcttctccaatcgatcgcttcctgtagcttctccacccttcttctgtggtggatacagatttgttcttggaagcggctgggatttcggttaacgatgccattggtttctattctaacatatgctttctcttgtctcttgtgtctcttgtgtgttcagattgggcttgttggtgtcggatttgattgtggtttcgtggctgtgatgacaatcaaacctcgtttctcgatgctgagacttgatttgttcaaggaccagaactgtgctgaccttaatttgtgcgtgtctgagccaccccaaacacaccatgtccgaatcgatttctgcgaaagttagtatgtctgcacgatgccactcgatgctactactagtatttaggtgtctttattagctttttcctcttctatgtttattggctgtttcttgcatttgcgttgttgtagtgtggctgtgaggactaactactttgtttctcgatgctgacttgattcaatcaatcaaggaccaaaaaaatttgatgacctttgtgcgtgtctgagccactgcaactcagttttttcagtcttcgcttgtgtgaagatatcatcttgccttccgtgttttgagcctgaacgataaagaagagatgtttcttggtgctgattcgactcattttaggatggaattttgacgaggctcatgcgtgtctgaagtctgaaccattgtaaaacttggatgtagttgttgttttaggtgtctgaagtctgaaccattgtaaaacttggacgtagttgttgttttttttcctaaaaaaagagaacttttttctctcgttttttctctgctgtatttgaatttgttcattttttccagctgttgtacacttgtacttcatattgggatactgaatgttaggtgcgatcaatgtagtagtgcttgcatgtttgacaaactcatggacattaactcaagttatctaaaacattgagatccttggaatagttatgctggaactattgcatggaaattttacaactcgctatatgctagaagcgaatccccgtagttcattttcctcaatcagcccagtagatttctagctaatggtatctgataaggggcaaattgttttttcaaggatacagctgaattcataagaactgaaaatcgcaattagctggtattacattgcagaagcttgagaacagaaagaagggaataacatgcatgggtaacgccaatactaaagctatcccatggtgagctcattaacgacttgatctccatttcctgaagattcacattgcatgatcctcgaggttcagtaaccaaccatatggccttgcttctggtttcatgattgaatcgtcaggatttttggagtttgtcaagatctcacctagaggtccaccttgaggcatctcccaagaacttgagatgctatcctcttgcatttgtgccatattaggtgcatggcagctgacgcgtgggtcctctggcgaggaatagaaagttgatggaactgtcatgacattggaatctttgcttttctgaaactccattttctcgtccttaggcaagctgaaattctgaaggactgactgaaggcatccacgatcatgcatcttggtgaaaggaatgcttttgttgttctgctggttgctgctctcccaaggcttcaacatggtatttgaagaaatcgattcactgtctcctgctgtattgaacttctccggtttgttctgttgcttcaactgagagaacagggacaatgttggctgttgattcgttaaatttagcagtgggccattgttttcttcagcagctttgtttcctttctctttgttcgccattgtcctgcaaatgtgtacaggtcttcaaattaaatgattattactttctattaaaactgaaataatctagttgttttcctttgtccctgactatattgcagcatttgtattccattctttataagagatttttttccaccagaaccacaacgattaccttctatcatgaaaatgtaccagaaaatcttaaaccatcaataggatatgcaaaaatggtggaaaaaaatactgtgattcagtctgtagcactaaaatacttgcacgttgagaatattaaaccaagtttaaggatgtattaacctgttcaaactatctgtccaatagctgatactgcgtggcttcatttcattaacttttgccttcttgaagctgccctgcccgacagaagatggcaatgagccagcacacggtgtctctttcacagtctttctactttggttttccacaggctctcttgaacggtggcggtttctgttgatgtgcctctcacaatacttgtggtcggccatggcctcctttgaacaccgccatttcttgccatctgttcgacggcatcttccaggttctgggtcagagtctgcatttgggaagccttgatagagaggcctccagctcactgcagtacaataagtgaacagaaaaaaacactgtccatcatgagttgcagagaaatacacagatcaatggccttacatacatacatgcacacatgatctttgcttctaacctattgcaagttaataacatggaagtgtgtatgtatgtggtgatgagcaaggccagacctgatggcaatgtgtgagcagccttggcgaatctgagcatcttctgttcatcaagaaagggggaagggtatgatgcagcagcagcctgggtgaagctaccagcagcagctctcttgatgaggctcagatcaccctccttggtggatggcactgtgagtccttgcaagcccaacacctctccaagctccatggcagcagcagagaagtcagcaaacatcttggaaggacaggaggaggggagaggaggaagaagaagaagaggagggggtgagcattgctggggacagtcacagtgaggctgaggttgagagtgaggagggtgtagtgtgtgctttctagtaggaggcaggaagtgtgtggtgatatattatgggatggtggctctttgggagactagaggtagggctaggtggtggcccttaaatagcaggagtcctttcattcttttagtggagtaactttttttgctgtcatttctttattttatttttattttattgattttttgggctcaatgtttctgtgaagtgatactgctgggtactgatggggaggagtaattggttcataaaaaggtagtagtagcagcagcatgtttattct

SEQ ID NO: 17104 - DNA, 1950 bp, Oryza sativa
  ref <308>: DATABASE ACCESSION NUMBER: AK067567
  ref <309>: DATABASE ENTRY DATE: 2001-12-06
gcagctcacgcaaaaaccccccgaaacctcgaaaccctagatcgccatatggcctcctccgccgccgccgccttctaccgcgacagggaggacgcggcgccgccgtcgtccggccccgggggaggcggcgccatggcggcgtacgacccgagctacgtgccggactcggtgaagacgttcgtgtcgcacctctaccgccacatccgcgaccgcaacgtgtacgagacgcaccagatgtacgagggcgggttcacccgcctctccgaccgccacttccgcgacacgccgtggccgccggcggaggccgtggcggcgcactgcgacggcgaccacgtcttcctcctcctctaccgggagctctggttccgccacgcccacgcccgcgtccagggcctcaccccggcgcagcgcgccgagtcgtgggacaactactgctccctcttcagcgtcgtcctccagggcgtcgtcaacatgcagctccccaaccagtggctctgggacatggtcgacgagttcgtctaccagttccagagcttctgccagtaccgcgccaagctcaagaacaagacccacgaggagatcgccctcctcaagcagtacgaccaggcatggagtgtttatggggttcttaattacttgaaagcactggtggagaagtcaatgattggagagatcctggagagggagaaggtagggcttgaacagttcacggcaactgatgggtatgactatgagggcgggagcaatgtgttgaagatgctggggtactacagcatgattgggctgctcagggtgcattgccttcttggggattaccatactgggctcaagtgcttggctccaatagatataagccagcagggtgtctacaccactgtgattggaagccacatttccactatttatcactatgggtttgccagcctcatgatgcgcaggtatattgatggtatacgtgaattcaacaaaattctgttgtatatcctgaagtgtaagcaataccaccagaattccccccagtatgaccagctacttaagaagaatgagcagatgtatgcactattggcgatctgcctctcattgtgtccacaggacaagctcatagatgaaaacgttggcactcagctgaaggaaaagtatggggacaaaatgacaaagatgcataggtatgatgatgaggcatatgctatttatgatgaactcttttcctatgcctgccccaagttcattactgcgtcgcctccagttctacgagagccatacacaaactacaaccaggatgcttatcgtcttcagttgaaactatttctttatgaagtgaaacaacaacagttgctctctggtattcgaagctatctcaagttgtattcaacgataacaattggtaaacttgccaaatacatggatgtggatgaggttacactaaggacaattcttatgacatacaagcacaaaatgcattcaatcgacagtgacggaaaggtcatatccagtgcagactttgacttctatattgatgaggacattattcatgttgttgaatccaagttaaccaagaaccatggtgattactttttgagacagattttgaagtttgaggagatgattacgcagctggataaagtacaatttgactgaacctgctatcatcagggctgaagctctcctttgagttacagtgggacgcgctgttggtgatggatagtaatgataaatttttgtgccatccttttttgatacattgttgacatgagttaaatcctcgctaaaaagtactctaggtgctaactatcgcatccacttgtcatggcatgttctggtttgaagaatgccaactttaaattgttcttgtcttatcgtcaaccgtgccattacctaccgtaacgttgcaaagttgtagctgtattcctatgtttcggacttgcagagtgcggaatgtcgttgcttcct

SEQ ID NO: 17105 - DNA, 2347 bp, Oryza sativa
  ref <308>: DATABASE ACCESSION NUMBER: AK067568
  ref <309>: DATABASE ENTRY DATE: 2001-12-06
ggctcgttctttcctcctccccccagttcgtctctctcccacccccctcaccggcgctcttcccccgcggcagcagcccggccggccgccggcgagcccttctctcgcgagccgccctcccctggacgaggatgcgttgacagcgcctccccctccgttcttccccacagaagcgtcctcctcctcctactcctactactgggctcgtggactggtggtccccccccctccgaccaccgcctccctccccggcgacgaccatccatggagctccaccgctctttctcctcctcctcctcctgccgcagtggtaaagttactcaacagtgaggatttctaaagctcaacagaactagatgatacttgcataatgtggccctcagatatttggaaggcgcatgcagggtcatcacagtcagagggatcagcactggatatggagagaaacggatgcaaccataactgttgcccatctcctctccaaccaattgcatcaggtggtcagcactctgaaagcagcgctgcatatttttcttggccaacatctactctaatgcacgggtctgccgaaggccgcgctaattactttgggaacctacagaagggtgtgttacctggacatcttggccgcttgccaacagggcaaagggccaccaccttgcttgatttgatgattataagagcattccacagcaagatcctacgtcgctttagtcttggtacagcaataggctttcgaatcaagaagggtacattgactgatactcctgccatccttgtttttgttgctcggaaggtgcacaggaagtggctcagccctacacagtgccttccggctcaccttgagggaccggggggagtgtggtgtgatgtcgatgttgttgaattctcttactatggggcaccagcaccaactccaaaggaacaattgtatgacgagcttgttgatggtctgcgtggtagtgatccatctatcggctctggttcacaggtagctagccttgaaacatatggtacattgggtgccattgtgaagagtcgaactggtaataagcaagtaggcttcctgacaaacaggcatgttgcggttgacctggattaccctaaccagaagatgttccatcccttgcccccgaatcttgggcctggtgtatacctaggtgctgttgagcgagcaacatcatttatcacagatgatgtttggtatggtatctatgcgggaacaaatccagagacatttgtcagagctgatggtgcatttataccgtttgctgatgattatgacataactagtgttaatacctcagtcaaaggagttggagtcataggtgatgtaaaggcaatcgatctacaatccccaattagcagtctcatcggaagacaggttgtcaaagttggaagaagctctggtttgacgacagggaccgttgtggcatacgctcttgaatacaatgatgagaagggcatatgcttcttcacagactttcttgttgttggggagaaccaacaaacatttgatcttgaaggggatagtggaagccttataatcttaacaggaaaagatggcgaaaagccacagcccatagggattatatggggtggcacagccaatcgggggaggttgaagctcaaaagtggtcagggtcctgagaactggacaagtggggttgatctcggacggcttctggatctattggagcttgatctaatcactacaagtgaaggactacaagaggccctagaggaacaacgaattattctagctgctgctgcagcagcagctaattcaactgctggggaatcgtcacctgttgctggtcctcaagaaaatgagaaagttgacaagatttacgagcctcttggaatcaacatccaacagcttccaagagacaattcagccacctccacaggacccgatgagttccatgtcgacacggtggaaggcgtcaccaacgtcgaggagcgccaattcctcattggcatgtctccagcacgcgaaggccaagaagccaatggcgacctgaacaaccttgcggagctagagaattcacctgaagacatttgcttctccctgcatctgggcgagagggagcccaagcgactccgctccgattcgtcgctggacatagacttgcagaaatgaaatgaagctgtgtgctgctgttccatcaccacccagctctgtataacctagtgaaggcagttccattctatgaacccaatagaaataaatatgggctaggtatttgtttccggaaactatctagataggtatccggataatttctatcgttttcacaggatacaagccttactgtatttgtttctgtttttaaaaaattttccg

SEQ ID NO: 17106 - DNA, 3178 bp, Oryza sativa
  ref <308>: DATABASE ACCESSION NUMBER: AK067569
  ref <309>: DATABASE ENTRY DATE: 2001-12-06
gtccatttcgctcgcctccctcgagtcgctcggtctcatggcgcccaatctcgatggcggcgggtagtgttagccaccgccgcgcactctccaccttcagctcgcacctccacctccctcccccctccccaaccacccgtgttgcctctccctcttcaccaggccatcgccgccgggcatgcgcacgggtgcaaggcgatggtagaggcgcttcacccgtgtgtgttcacgccggcggcagccgtattggctcccaacctgggaccaagggaaattgatggagaatgccaaggatttagggtatttagggttttctccatcgagattgctatcctaattgcattttggtattttgcttagagttctttctcctctcatctattttttgttggctgcattccttctacaatggtgcgtgctcatctcgagctatttaagcgatttccaatttgttgatctgttcgttttggggacttaaagattactgatcctaccgttgcttgcagaccgacacctaaattaaatagttgatagattaaatctatttggatgttatcccaggcttcatggacaacaacgtcgcctcgaggaaataagcctcctccgtccctccatatgtatttcctcctctgcactgtactgctttgcttttcctcatgcttgctgtgatgtggatgtgttgctgctgaccaatactatcttattattgcagttttctttttttgttcatgccgttgcattgcctctgaatcttactttttttgcggggcctctgaatcttacttacttttcagtgctatatgcagattcagttacaggacacatagtccctggagatgaaacaaggtatttagtgcatattacattagcatttaggatttacatagcatcattcacacctgcttagcataagttccagataatattttattatcccctttgatgtttaagatggttgcctcttcagtatcacatctagatccatagcaatttcatttctatcgttttacttctccatgcagggaaaatagactgcaccaagcataagttaatgtacattcagcataagagagttaaggccactacctagctagagaaaccgaaggtggggctctttgttgccaacataagaccaacaaaatttggatgactgctttcgattttggtgcagtagttttggttagcgaccattgtatcatgttttcttacagtaaagtcccacattagtaggtggataggtgcttccgcgagggctgtgaatgttctttacttctgattaaagtgaagtggtatatttgtgtaggtgatgacaaaagctacaattattcagcgccgtcattctctcctgcaggtgatgtattatgcagttaactgttcgctgtaattttacagtgtcactgctcccactctgcttttgaaaacaatatgtcaataatggattacataaggaaatgtttattgcatctgtcagttaacattacttatggtgttagggaccttttgattcataggagtggcaaagaattttataggattcaaattccaacggatttttcttcctatgtttccctttgacttacaggattatgttcctatgcttcacttttataggaaaaatactaagtggtataacctctttgtaaattttcctttgtttttcctatggcactatcaaagggctcctattatcttttcctatgttttttattcctgtaggattaaagaagcacatcacttttattcctgggtttttcctatttgtgtgctttgatcaaaggggctttaagatgctatgcagctatgccataagccacccttccttgtgttatgacctactacttcctactagtagtacatttttggtatcgctatgccataagccacccttccttgtgttatgacctactacttcctactagtagtacatttttggtatccatatggatattttcttcatgatggttgtctctacttaaagctatgcattattcagacatgaagattaagtgaaaaacaagccactcccaacttaacttttgtttgatggatatgctagatagaaacctaggtgtattttcttggtctcttaggtcgttgtgtcacacaatgttgtttgttgatgagctccctatatatattgttaggtcaattatgttacacaacaagtttttttgcgctaatgtgagattactaggctgacagtccttagatatagatttggtttggttatggtgacagtttggttttggatgattggactttgttttatttttccacaagcccagcaatatgatattaagtaatgttatttaatatgcgaagattagtggccattccgaaacgcatgccgaaacgacatattttccaaaactgaattgtcctcctatgagttacattcaatttctcttccttaaacgtggggttttatgtgtgctcagtgactacccccatagcatacttgctgatccatatgtatcgttgctaaacagtactatgtatagtggtttaattttaatggtcgtaaatcttggtttcccagtaagtagctagctagcatgattttgtccctttttttgtttcaatcatagtttactcttttaacgggcaacttgtttataaacaaacaactcacggggtgttggtcttatgtcattctagagtacttttcggagtttaataatatgacacaaaggctttccaaacgatggcgatgcctatggataatcattttcctgctgctcttacatatttctatatattatatattcttttatttacttatttattttgactgagaagagccggagactgcgctatatttcaatatatatattcttcttttatgtttaatccatttagtttgatgctcccactcttcagtcggtgctgctttataatgaaattattatgtgcattatatcgtccaacataagcataaccatttcatgtttgcaggaccaaagcgccattcatactgctgtgcttttgttgtggattgaactagcaggagagaagaatgcacatgaacttataaatggaacatttcctgtagccaccagtttgatctcactagaaaaaggcagctactttatttgtcctatatattagtgtattgttttttaatcaatgtaaatgatcacttacggagtacatgtatgcattaatcacctaatcgtcc

SEQ ID NO: 17107 - DNA, 2325 bp, Oryza sativa
  ref <308>: DATABASE ACCESSION NUMBER: AK067570
  ref <309>: DATABASE ENTRY DATE: 2001-12-06
ggtcgccgcgcgccaacccgccacaaaaccctacgcctccgctcatccctatccccactcgccggagatggccgccggcgacctcctcctccgcacccagagcggcctccccgtgctcgcaagggccttccccagctgcctctgcctccgcgtccctgcccgccgccgccggggcgctcctcccctgaccgccgccaaggtcgacgtcgccgacgccgtcggccgccgtgtcaggtcgggcggcgcggccgtaccgaagcggcgtcgtagccgtagggacgcggaggaggaggaggaggagggcctcgcgttctcgagggtggtcacgggcaggggaagaggcgtccgcgaggagggcgtggcggaaggggaggctccggaattcgatgcggcgaagagcggtgacgagtcgggaggcgtggatggctcgtacctcagcgacacaaggtttgatcaatgcactatttctccgttgtcactgaaagccgtcaaagatgctgggtatgaaaggatgacccaggtgcaggaggcaactctgccagtaatccttcaaggtaaagatgttcttgcaaaagcaaagacaggaactgggaaaactgttgcctttttgcttccagccattgaagttctctccgcattacctaattctcggagggatcaactacgtccatctataaatttgctggtgatgtgccctactagggagcttgcaatccaagtggctgttgaggccaagaaacttctcaagtatcaccgctcgctgggggtgcaagttgtaatcggtggcacacgattaacccaagagcaacgaagcatgcaagctaacccatgccagattcttgttgctacacctggaaggcttaaagaccatgttgagaacacacctggtttttctacccgactaaaaggtgtgaaggttcttgttcttgatgaagctgatcgcctgctggatatgggattcagaagagacattgagagaataattgcttccgttcctaaagagcgacagacattgctattttctgctactgtgccagaggaggtccgccaaatttctcatattgcaatgaagaagaattataagttcattaacactgttaaggatggtgatgaggagacacatgcacaggtgagtcagatgttcatgatcgcgccactagatctgcacttctctatcttatatgatgtattgaagaagcatgttgcagaggatgcagactacaaagtgattatattctgcactactgcgatggttaccaaacttgtcgctgaaattctttcccaactgagactgaatataagagagattcattccagaaagtcacaatctgccagaactaaggtctcagatgaattcaggaagtcaaggggtctgatattggttagttctgatgtatctgcccgcggcgtggattatcctgatgtcacccttgtcatacaggttggggtgccagctgatagacagcaatatatacatagacttggtagaactggacggaagggaaaggaagggcaaggcctattactgttggctccatgggagaagtactttcttagtagcattaaggatttgtcaatatcagaggctacggtaccttctgttgattcaagcactcagacaatagtcaaagacgcagtccggaaagttgagatgaggagcaaggagtgtgcctatcaagcatggttaggatactacaactctaacaagaccattggccgagaaaaatccagacttgttaagctcgcagaagagttcagccaaagcatggagctttcagttccgccagctatacccaagcaaattcttcgaaagatgggacttaacaatgttcctgggctgagatctacataaccctgatgcctgaaattaaggtccttgtgcactttgtgctaaaagcgtagagcacactatcgacatttgatccatcactgtgctctctgctgcgtttatggtaaacttcaggcgtgatgtacctcactgctgcagatatttgagctttgcagctcggtgggttgatattggtcagaagtttggacgatcaacactatgtatgatcacagatcacttctctcggaggttcaggagttctaagttcaactattcaagcatgactaggagtctttctggtcctctacaaatacaggttcaaaaacagacagtgattctacagaagctcatatagtgcaacacacgaagatttttatttttaccttgttctgatccattttgagatggatttacttgagacactagatgatcagatcgtttattaaacccatgcttatatattatttatcagatagtagcatttttttgctaccacc

SEQ ID NO: 17108 - DNA, 1884 bp, Oryza sativa
  ref <308>: DATABASE ACCESSION NUMBER: AK067571
  ref <309>: DATABASE ENTRY DATE: 2001-12-06
ggcttgtttcctattttcctcttcccctcgcatcgcagcacagcggtaggcatttcgcttccattgcttctcctcctcctccgccgccgccgccgctgctgctcgtcttccctctcccgacccgccacccgcctcctcgccggtttgattttttttttctttttgttcacccggccgggcggggcgagcttgcgctctcttttcttccttcctttttcttggattctatttcggctttggttgttcggtcggggggggggggggggcgcaagaatcggagtaggaggtcatggtggttagggaaaagcaaggtggccggatggggaaggggaaggggaaggggaaggagaaggagtgcgacattaactgcttcgggaggagcttcttccgtgtgcttctcaccctgcaatctctggagcggatgaaaatcccatcatcattcaaccaatgccttcagaatcaacctactgggatggtttctctggttgatcgaagtggaaataaatggagtgcagagctgacttcagactctgagggattcttctttgtgcatggatggaaagaatttgtcagagataactcaattcagtgtggtcaatttttagtattcacttatgataaacggtcacaattctcagtgacagtctttgaaccttcaggcattgacaagatatcaactttctctgctcacccttccaaaaatgtgatcattaaaacagaaagtgatgaagggggcatggtcaccgcagctatcacaacagagaaaatggctcccgccctgaaggaaaataatggaatcacaggaaagagaactagagatgtagattaccttatggaagatagggtggttgtatttaagaagtcatctgaggctaatgtttgcgaaagttctaggagaaaacgtgcaggagcttccgctggcaagtccaaggtaacatcgacaagccataacagtaccagaggttcatcatgcagctcagatgaagataattcttctagcaagtcaccaaatccaccattcctgatgcgctttctgtctggtgaggtgtctcggcgtggtagatgtgtttcaaagggtcaaagacaactaacagtaatatcacagaggcgtccggtaactgaagcagagaaggaccatgctcttcaaagggcaagagagtttaaatctaagaatccttttgccgtgcaaataatgatggagtcatatgtctatgttggatttttcatgaatatcccatgtgaatttgtccgtgagtgtcttccccataccaacaaaaggatcacactctgggatccacaagggaaggcttgggaagttaactatgtctactacagtgatcgttctgttggttctttcagtggtggctggggcaaatttgctgttggcaacaatctggagaagtttgatgtgtgtgtcttcgagcttgtccagaaggataacataaaagtgcacatctacagagttgtcccagaaattactccgcacaaactccgttctgacccgaagtaacattgctatgtcggcatgttggaggcttcaattccattgatctgaggctgtagttggcagttaaaaaactatttatatgttggtttctataaaaaaaaacaaaataagtgcctagttcataagtgaactattgttccggttgggttgttgaatgactagtttagacctggttgtattggttaaggagtgtactattgttgcggacgtgcagccattgtaatgctaaaatgtaacttgcatttttttttgtggctgtataatatttttactgttatgtttcatgatatatgtcatagatagttgatttcattcagattatcatcaaagtatactggcctgagatctgaaaaccagatggtgtgatatgcttcacc

SEQ ID NO: 17109 - DNA, 3158 bp, Oryza sativa
  ref <308>: DATABASE ACCESSION NUMBER: AK067572
  ref <309>: DATABASE ENTRY DATE: 2001-12-06
gactgtccgtcgtgcagcgtttcttgcttggttgaatcgggtggttttgggggggatggcggggaaggtggagaagatggcgtcgatcgacgcgcagctgcggatgctggcgccggcgaagctgtcggaggacgacaagctggtggagtacgacgccctcctcctcgaccgcttcctcgacatcctccaggacctccacggcgacgacctccgcgagctggtccaagaatgctatgagatcgctgctgagtatgaagggaagcatgactcccaaaagctcgatgaacttggcaacatgttgacaagcttggatcctggtgactccattgtgatggccaaagctttctcccacatgcttaatttggctaacttggccgaggaggtccagattgcatacaggaggagaatcaagctcaagaagggtgactttgctgatgagaactcggcactgacagaatctgacattgaagaaacttttaagaggcttgttgttgacctgaagaaatcaccagcagaggtctttgatgcccttaagagtcagactgttgacctggttttgactgcacatccaacacagtcagtgaggaggtcactgcttcaaaaacactcaaggataaggaattgtttggttcaactatactcaaaggatatcacaccagatgataaacaggagcttgatgaggctgtccagagggagattcaagcagcctttagaactgatgagatccgaagaacccagccaactcctcaagatgaaatgagggctggtatgagttactttcatgagacaatctggaaaggtgttccgaagttcttacgccgtctggacactgccttgaagaacatcggaattgatgagcgtgttccttataatgcacctctcattcagttctcttcttggatgggaggagaccgtgatggaaatccaagagtgacaccagaagtcacaagggatgtatgcttgcttgctagaatgatggcttcaaatttatactgctcgcaaattgaggatctcatgtttgagctgtctatgtggcgatgcaatgatgagcttcgggcacgagcagatgagctgcatctctcctcaaagaaagatgcaaagcactatatagaattctggaagaaggttccgcccagtgagccataccgagttgttctaggtgatgtgagagacaagctgtacaacacacgtgaacgagcacgccagttattatccagcggatattctgacattcctgaagaaaccactctcaccagtgttgaacagttcttagagcctctggagctatgttacaggtcactctgcgattgcggtgaccgtgtaattgctgatgggacccttctggacttcttgcgccaggtgtctacctttgggctgtgccttgtgaggcttgacattaggcaagaatctgacaggcacaccgatgtcctcgatgccatcaccacatacctgggaataggatcataccgtgagtggtccgaggaacgccgtcaggactggctcttgtctgaactcaatgggaagcgcccattgtttggcccagaccttcccaagaccgatgagattgctgacgttctagacacgttccgcgtgatagctgagcttcccgctgacaattttggggcctatatcatttccatggcgacagctccgtcagacgtgcttgctgttgagctcctccaacgtgaatgccatgtgaagacaccacttagagttgtcccactgtttgagaagttggctgatcttgaatctgccccagcagcagtggccagactgttctccatagattggtacagagaaaggataaatggcaaacaggaggtcatgattggctattcggactcgggtaaggacgccggtcgtctctcggcagcttggcagctgtacaagtctcaggaggagctcatcaacgttgccaaggagtttggggtgaagttgacaatgttccatgggcgcggtgggactgtcggaagaggcggaggtcccactcatcttgccatcttgtctcagccaccagacacaatccatggatctctccgggtcactgtccagggtgaagtcattgagcagtcctttggtgaggagcacctttgcttcaggacactgcagcgtttcacggctgccactctggagcatggcatgcatccaccaattgcgccgaaaccagaatggcgtgctctgcttgatgagatggctgtggtggctacaaaggaataccggtccatcgtcttccaggaaccacgctttgtcgagtatttccgccttgcaacaccagagatggagtatggaaggatgaatataggaagcaggccatccaagagaaagccgagtggtggcatcgggtcactccgtgccatcccatggatcttcgcgtggacgcaaactcgcttccaccttcctgtctggcttggcttcggttctgccttcaagcacatcctggagaaggacatcaggaacctccacatgctccaggagatgtacaatgagtggccgttcttcagagtcacgatcgatctggttgagatggttttcgccaagggtgaccctggcatcgccgcattgtacgacaagctccttgtctccgaggagctatggcctctgggagagaaactgagggccaactgtgaagaaaccaaacagcttctccttcaggttgctggacacaaggatcttctcgaaggtgatctctacctgaagcagcgccttcgcctccgcaatgcctacatcaccaccctgaatgtctgccaggcttacacgatgaagcgaatccgcgacccggactaccatgtcacgctgcgcccccacatgtccaaggagatcatggactggtctaagccggctgcggagctggtgaagctgaacccgaccagtgagtatgcgccggggctggaggacaccctcatcctgaccatgaagggaattgctgctggaatgcagaacaccggctaagcgaactatcaactatgaagtgcctgaattcacaccgttttatatggactcttatcttgatttcggtcatttgctctcggccatttaattttgccgatgcagaggctcgtgcagtttctaatttctttcggaagatattttcaataatggagttgtacaagaacatcaattaatcaaaataaagtggatattatgttcattatcgttt

SEQ ID NO: 17110 - DNA, 1570 bp, Oryza sativa
  ref <308>: DATABASE ACCESSION NUMBER: AK099005
  ref <309>: DATABASE ENTRY DATE: 2002-08-28
gatttcgtccctacctgctcctcaccagatccttccgccgccgccgccgccatgtggaggggcggcgcgaccgccgcctccgccgcgagggctctccgctcgcgcctgatccccgacacgtcccaccacccggccacggctctagctcccatcgcatcgccgcgctcctcctcctcctcctcctcctcgtctgcccccaccatcgccgccgctgtgcccgccgtcgcggaggctacggcggccgcggccgctgtttcgaggcaagctggatccgtctccgacgcgctgaggcactacgggaggtgctacttcgagctctccaaagcccgcctaagtgcccttgttgtggcaacatctggggctggttatgtgctcggaagtggcaacatggtagacatagctggactttgttgcacctgcgctggtaccatgatggttgcagcatctgcaaatactctcaaccaggtgtttgagataaagaatgacgctaaaatgaaaagaaccatgcgacggcccctaccatcagggcgcattagtcctgcacatgctgccatgtgggctactagtgttggagttgctggaacagctttgttggcttggaaggctaatggcttggcggctgggctcgcagcttctaatcttattctgtatgcatttgtatacacaccattgaagcaaatacaccctgtaaatacatgggttggagcagttgttggtgccataccaccacttctagggtgggcagcagcttcgtctgaactgtcactgaatgctatgattctccctgctgcattgtactattggcaaataccacattttatggcccttgcatacttatgtcggaatgattaccttgctggagggtaccgaatgttttcttttgctgatcctactggtaaaagaactgcatgggtatcactcagaaattgtctatacatgctgcccttgggattttttgcatacaactggggtctcacatctgagtggttcagtcttgaagcatcacttctaactttgggccttacaattggagctctatcatttgtgctggagccaacccccaaaactgcaaggagaatgttctatggtagccttttgtatcttcctgcttttatggctggacttctgttgcatcggctgcctaatgagcaaaaggagcataatgtcactcagacgagtgaaatcaccggaattctttatggtgctgaacagcaggatgaagaacgagctagacagaagcgtgaggaccgaaaaccttctcgtattcactcgcgccctccggttgcctatgcttctgtggccccttttcctttcttaccagtacctatatatgtctctacccaaggtcatgagctatgaaagatattacatggactaggcttgtggacgcaatgttggtccatatttttttggcttccaaaggaaattttcctgatcaagtactttgtccttgatgttgatatgattcgaaaataatgaacaagaaatttagctcttgggctcacctgactgtaaaaattgatgtccatttacatttgatgtcttgagtaacatgaatgcacatactttc

SEQ ID NO: 17111 - DNA, 2676 bp, Oryza sativa
  ref <308>: DATABASE ACCESSION NUMBER: AK067573
  ref <309>: DATABASE ENTRY DATE: 2001-12-06
gattcctcattccttctctttttttctcgctttgtttctcccgtcgtctgatccaccaccgcaacgcacgcacgcacgcgcgcctcctcctccctccgcggcggcgaccaccgcgcgcgacgccatcgccgccacctagggttagggttccggcgacccccacccccggcgatcgcgcgagggatccatccgtcctctcctccatgtccaccgaccagcctcacctcccgccccccgcgcccccgcccggcgccgcggcggcggatccccccgagtccacccccgcgccgcctccgccgccgccgctcgagccacccgaggtgatgcacaagacgagggccgtcgacttcctcggccgccgcaccccaatcgtctaccagaacgacaacgggccgtgccctctcctcgccatctgtaacgtgatgctgctgaagaatgtgatcagcttgaacccggacgcgggcgaggtgtcgcagcagaagttgctctcgctcgtcgccgagcgcctcatcgactccaacagcaatgtgcagggtaaggacgaggagtatgtgcgcaaccgggagcagaacatctcggatgcgattgaccttttgccgcgcctcgcgaccggcattgatgtgaatgtgatgttcaggaagatcgatgactttgagttcacccgagaacgtgccatatttgaccttctggatatcccgctgtaccatgggtggatagtagatccccaggatactgacactgctacttccattggatcaaagtcttacaatgctcttgcatctgggcttgctgaatttaagtcgggggaatcaacaaaagagaatagacatgtacaggaggaagaaactgttgattttgctgctgcaactactgcagcactaggggttccttctcctagtgtttctcgaggtatatcatttgatgaaaatacactcactgacccagttgagttgcacataagacgaggcgatcgtgaggaagaagaggaactaaggagagtccttagtctatcaaaagctgaaaatgctaatgctgttgatggatctggttcctttgacacttcacagtctcattcatcctcaaatatggaggagacagcacacactgagagcttccaattagaggcagtcgaggcgatggattcaacaaataaggaggaacatggcaacagccatgctttgagcgatggcccctatgttacaggacaccacaaatgctgctcctaatattaatgaagttgggatggaggaatcccaacaggttttgacgtctaatgaactagaagacgatgggaaaaggaatatcttgccagagcactctgatataaccattcaaccttcagagtctgtgcttgactgttcctctcatgagtcttctgctcccaaccaagctgctcctgcccttgggcaagttgataaagaatcctgtgaagaacaagctcccttgcaaattcatggtcaggcttctgacactgagaaaattcatggtcaggcttctgacactgagattagctctgagctaacaactgcagctagtcaagataccccaaatcatgctactaaagagctggatggggaagatggcaatagtcctgagcctatcatcttaaaccttcaggaaagtgagccaatatatcaaggagaagagcacatacttagcactggaaacttggcatatgaaaatcaggagccggtttatgagggagaggtggttcttgctgaacaagctgacaagactgagaaaagtagtgaggacatgcaagatgggcctgcagaacatcaatgggaactaatagataatttccttcagaacactgctagccagctaactgtctatggtttattttgtctacaagagggtcttaatgaaagagagctgtgcgtcttcttccgtaataatcatttcaacacaatgttcaagtacaatggaagcctatatctcttagccactgatcagggttttttcagccaaagtgatttagtatggcaaaagttggatgaggtgaatggagatggagtttttctgaccagcaatttcacaccatttaaggctgaaaacccgagaaatgattcttggaatgaacagcaggctatgacaagtaccgctgactatcttgctcaatttgacaatactaccctgcagcactcgtctggaaactctgatctagagctagctatagcacttcaacaacaggagtttgagcggcaacaacctcaacgacaccagtcgtcaacacagcagcaggagccggtgccccagcagcaacagcagacacccaatcaatcacatggcacaggtcggccaggattagttgttggtccaacaacggcaaggaggccacctgctccacagccgacgacgccgaagaaagagaagtgcatcgtgatgtaaagatacaacatatcggagacgggacaggagaaaggaaaagggagggggacaaggagcatcacatagtatactgtaaagaatcttcttgtctactcttcttctttagtgccgcggcatagcagcagcctgttgttttttttagccacttttcccaatcttgagcgctcttcattttgcgtgttttttcttccctggtgtaaataaccttcaaagaagtcataaaacgtaaacagatgctgtcaaatgatagccctccaacgcgatgtgattggttcatcgtatagt

SEQ ID NO: 17112 - DNA, 1727 bp, Oryza sativa
  ref <308>: DATABASE ACCESSION NUMBER: AK067574
  ref <309>: DATABASE ENTRY DATE: 2001-12-06
ttggctatgtttcactttctgggcagtttattgactctgagtggaagatacatcgaagaatgctaaacttcatgatggtgtcttctcctcattcagagaatgcacttagtgaagctattagtgcaagcctttcggactggaatatgaaggacaaactgttcaccatcacattggacaatgattgctcatcacatgatatatacagtgcaaatctgagggattatctctccaacaagaacaacctcatgctcaagggccaactgtttgttgtaaggtgttatgcccatatcctgaatgcagttgctcaggatgcattgcttcaatccatggtgtcatctacaatatccgtgaaagcatcaagttcataaaagcttctcctacccgtgaggagaagtttgcagagattgctctgcagctagagatcccaagtaccaagaccctttgtctggatgttacgactcagtggaacactacctatctcatgctgctggctgccttggattataagcaggccttttctactctagagacaagtgatgacaactacaacgaggcaccgtccgctgaggactggaaaaaagttgaggctgcctgcaattacttgaagctattgtatgactcagcacatagcatcatggctgcagcaaatccaacttcaaatctctttttccatgaggcatggaaacttcaactagagctgtcaaatgctacagggcatgaagaccctgttttcagcagcattgccaaggatatgcacgagaggtttgacaagtactggaaagattgcaaccttgtgttagctattgctgttgtgatggatccacgcttcaagatgaagcttgttgagttcagctactcgaaaatttatggtgttgaagctgcgaagtatgttaaggtggtggatgacgctgttcatgagctttacaaggagtatgttgcacagcccctccccttgacgccggcctatgttgagcaaggggaaggtaataatgcacctgctagcgagaatagtactcaaacaactgctccttcgaccggcgatggacttgtggactttgatatgtacctttctgagatagctacaagccagccaacaaaatctgaactggaacagtaccttgatgagtccctcactccgcgcatccaggaattcgacattctgaactggtggaagctcaacactctcaagttccctactctctcaaagatggcccgggatatcttggccattccgatgtcgatggtgagcagcggcaactctattttctctgctggaacaggaactcgcatgcttgatgactacagaagctcattgcgtccagaaattgtggaggcgctcttctgcgccaaagactggcttcagtattcaccagctaccccggaggcgccgagtaccgcgctggtcaaggtggatgcaccataggatcgccgtgattcccccccttttgtgaagcaacagcatgtaccaatggtacctatttgtgaagttaactgctaggcgtattttaggcagggactatgaactgattgtgatctgagcttatcctcctagggtgtaatttgttgtatcgaactctgttaactcgttcatgttgttatgtacgctttgtctgtagtatgccatcagagttgtacctgatattgcatgtagtgtgcgcgctggctgcataatatttatcagctggtgccttatgtttgtacttcccctcattataatccattgtagc

SEQ ID NO: 17113 - DNA, 3355 bp, Oryza sativa
  ref <308>: DATABASE ACCESSION NUMBER: AK067575
  ref <309>: DATABASE ENTRY DATE: 2001-12-06
gcctgtcaccgaggcggcgagcggagcgaagcgccggtggccggcggcgcagcgacccgcggaggagcgaggcggacgtgcggcggcgcatcgagaggagcaggtggctgcggaggcgcgaccggcatagggagccccgctggagaggggtcagcggcgcgggtgcgtgtcatccgtcggccgcgtctccatctcggatcgccggagagggaggaggggtgggggtggtacaggaggagagagacgggcacctaggaggagcttcaccggtttctatcaagtaagcttgttgtatgagtgaggttacagaacacaatgtccagcaatagcgggggtagcgcgaaggagaaagatcctgaaaatgctccggagcttgtggcactgccgttggtccggaccctgaggcctgttcatgcagtgattgatcctgccgctgacccgagatcagcacagctgtcttggccgggccatgtagtcctcctgcctccatatgcaacatggcctcatcatgtgccgaccctgccaccagcggtgaatcctgcaaatccacaacaaaacgtggatgtggcggcggctgatgttagtcctgacgttggttgttgtgatgagaagatgttgccaaaggtagatatgctgtttgatggcgaaaaagaggcatacgatttctacaatgcgtatgcagagatggtgggcttctttgtccggagatcaacactctggacaacgtcaaagaacataatcactaggagaacttttgtctgctcgagagaaggttttcgggagaagaagaggggcaccaaagaagcaaagtgcccgcggcctgaaacaagaattgggtgccctgcgagcatgaccattagacttaataccaacggcaagtaccgtttgacagagtttgtaccaaaccataaccatcaacttgcaacagcatctacaatgcatatgctgaaggctaagaaaatcaggcttaaagcacgggctgcgagagaaaatctggttgatgatactgtgaggacgccaggatttgggagtgaagatgaggcatatgaattttacagcatgtatgctgggaaaattggtttcaatgtgagaagggcaagcatgactatgaatgctgaaaatgtcatcacaagaaggatgtttgtttgttcaaaagaaggtttccgtgagaagaaaagaggggcaaaaagagtaaagaagcctcgcccagagacccgaactggttgtccagcgtgtatggtcattagacttacatctaatggcaaatatcatgtaacagaatttgttaccttccataatcaccagcttggtgcaacagtaccttctgatcttgtggcaacatcacaaagtacagaaactggtcaagatgatggactggatttggttgatggttcagctgatgctaatatccacaggcaaaatcttataattggaaatatcatggcaacatctctagaaggtagaagtaacaaaagattcaagtgtacaaaggttcctcactatggtgatgtaggtgctactctagagtacctgcaaaagatgcaacatgataacccttcattcttctttgcagtaaaatctgatgatgatgggaacttgacaaactttctatggtcagattcaaagtctatcatggattttgtccactttggtgatgtggtatgtcttgattcaacgtatgcattgcagggctatggtaggccacttgctttatttacgggtgtgaatcatcacaagcaaactgttatctttgctgctgcattgctttatgacgaaagtgtggaggctttcagatggttgtttgatacttttaagatggcaatgaatggaactcagcccaaaacattgttaactgatagatctgatgcaataagtgaaggtgttgcagcaagttggcctgcgacagcccatcgttattgtgtctggcaaatttaccaaaacgctcttcagcagttgagtcaagcatttcatgggtcaaaaaccttagattactgcttccagaaatgcctatttgactctgaagatgagcctgagtttttgacagcatggagagaaatgttggaaaagtatgacctagaagataatcaatggctagcagatttgttctctcttaaggagaaatgggcactaccatatggccgcgaggcattttgtgctgatatgaaaagtgtccagcagaaggagagcttgggcactgagcttaagaaacacttatccctagaatttgaccttttgagtttcttcaagcagtttgaaagagtattgtgtgaccgccgatcaacagaattgcaggctgatgtggatgctagtcagagtataaagaagccaccacctatgcgagtgttaaggcaagcttccaatatatatacacctgctgcctttaaaatgttcgagagggagtttgagttatacatggattgcatgttatacaactgtggtgagatgggcacaatttctgagtatagggtagtcattgaggacaatccaaaagatcattttgttaaatttgattcgcttaattccatggtaaactgtagctgtaaagggtttgaattcgtaggcattccatgccgccatatgctaaaggtacttgacaccaggaatatcaaggacattcctcctcaatacttcttgaaaaggtggagaaaggatgctaaatcaggatctccaaactgtagttattcattcccacttgatggtgatcctcagttggttcaaacaaaacgttataacttgctgtgtcggatgttcagcatagcagcagctagggctgcaacctctatagaaacttttgcatatatggaaaaccaatcaagcatatttatggaccaagtagaacaagctcttcaaacaaggcccccagacatcgctgccatgattggggctcattgtgatcaaacacaaaatccaattgacaatatcgtcgcaggaggtctacacagccatactaatttcatcaatggccctgctgatggttccctaacctttccatttacattgggtgctggtgtgttggattaccgctagatagtgactaatttcttacaagtactagccacaaggagctgcgaattctgtacagtgatcttttcgtggaaatgcattttatatatcaccagaaaattccaggttatgtccctctgctgacccacttcctcatccaggtgattacatggtaatattgtgcatcttgctggctggcaatttgacaatgcttacacattataccgtagagctgagaatagtgatggctagcccatccattgtacatgtaattttcagataaagtttagagaatgatgaaaagtttccatcggtgtatttactgaaacaatattagaaaatccatttggtc

SEQ ID NO: 17114 - DNA, 2356 bp, Oryza sativa
  ref <308>: DATABASE ACCESSION NUMBER: AK067576
  ref <309>: DATABASE ENTRY DATE: 2001-12-06
aggttgggttgggttgggttgggttgggtccgtccgatgaatgtgaagaaatccaagactgacgagacgacagggccggtgcggtgcgacggcggtcggcttcggcttcttcgtttccatcgccggcggcggcgcctccttcccttcccttcccttctatgcgcggcctcctccgccgtgtctacctccgcctcccccctttccctcctgccacctctctttattattggtcaagaacaagacctgcagctgcagggcccaaccaccccatccctaggcgcatgtcgacgtcctctactgccgcggcggtcgttgccgagggctccgccgctcgccgcttctggatcgccgccgcctcgagggaggccgccttcgccgcctacacgcccttcctcgtctccctcgccgccggggccctccgcctggattccttccgccaatacatcgcccaggatgcctacttcctccacgccttcgcccgcgcctatgagatggccgaggagtgcgccgatgacgacgacgacaaggccaccatcgtcgtcctcaggaaggccatcctccgcgagctcaacctccacgcttccgtccttcaggaatggggagtcgatcccaacaaagaaatccctccaatcccagccacaactaagtacactgatttcttacttgcaacttccactggaaaggttgatggtgggaaaggttctgataaaatggtcacaccattcgagaagacgaaaattgctgcatacactgttggggctatgaccccatgcatgaggctttatgcgtatctgggcaaagaacttgcagttttcttgaaacaggatgaaaatcacccatacaagaaatggattgagacttatgcatccagtgattttgagaataacgcactccaaatagaagagttgcttgataaactaagtgtctctctaactggcgaggagcttgagattattgggaagctctaccagcaagctatgaggctggaagttgagttcttctctgctcagccagtagaccaacctgttgtagctccactctcaagatattgtggtccgaaagataagctcttgatattttgtgattttgatttgacatgcactgttgttgattcatctgccattttggcggagattgcaatcttgtcacaccaaaaggctagtcaaggtggggctgatagttcccttgatcgtacaaaatcagcggacttgagaaattcatggaacatgctctcaaatcaatacatggaagagtatgagcaatgcatagcaagcttgcttcctccagaagaagcaaggtcactagactatgatcaactgtataaaggtttggaggtgctatcgcagtttgagaaacttgcaaactctagggtggttgattctggtgtcctgaggggaatgaatttagatgacatccgaaaagctggagagaggcttattctgcaagatggatgcaaaattttttttcaaaagattggcaaaacaagggagaacctcaatttagatgtccatattctttcctattgctggtgcgcagatcttataaggtcagctttttcatcagttggttgtctagacgggctgaacatacattcaaatgagtttgcttttgagggatctgtttcaactggtcatattaacagacaaatggagtctcctctggacaaagctgaaaagttcaagagcatcaaaagcgacgtgggtagtacagggacattattgtcagtctatattggggactcggttggagatttgctttgcttgttggaggcagatattggtattgttgttggatcaagcacaaccttgcggagagtgggcaaacagtttggtgtttcatttgttcctctgttcactgggttggtagagaagcagaggcgaatagaaaaggaagaatcatccatcttcaaggcacggtctggaattctttatacggtttctagctggtcggaggtacaggctttcaccctgggaaatgatttcagctgattgctggtggccttgtgaatcgttttccttggcaaacaagtgtacaagactggtgccaattgatggacttgatacgagtaaaactcgatgtggccattttattaaagccgcatgcgtgccgactctcttcctgtacgaatgaattgaataccttgtgttgtgcgatggttttgtatgatcaatgtgtcattgattacacaatcgatggaccccttttcattcgggggtcatttcatatatatatttttactttaatttccggagtgtttcctggcattgcaacatagtgatgcacccgagtgtaactgtagagatggtgtttgtagcaataaaaagttgattgctggagtggtcatccatattatgcg

SEQ ID NO: 17115 - DNA, 3280 bp, Oryza sativa
  ref <308>: DATABASE ACCESSION NUMBER: AK067577
  ref <309>: DATABASE ENTRY DATE: 2001-12-06
gactccgctactttttccaaccgtcgccccacgcgaaccccgacgccgcgccccccttccccagcctccgcatccgattcccatggcgtgcttggcggcgggcgccgaggcggcccctctcctcttccggcggcggctagcgccgtccccagtcgccgcgcgccgccgccttctcgtgtcgtgccgagctcgccgccgcggtctcaggactgctgcagaacttcctcggaagagtacaagtaatgataaacaccataatagggtgaatatgcagagagatgaagcatctgtttccagtgataaagaacggcaagagaaatatggagatgaaaatggtatatcaaaccttcaattggaagatttgatacaaatgatacaaaacactgagaagaatataatgcttctgaatcaagctcgtcttcaagcattggaacatgttgaaacagttcttaaagaaaaagaagacttacagaggaagttgaaaattttggagacgagattgtcagaaacagatgcacggcttaagctttcagctgaagggcagttcggtactgagattaatgactctctaccagtactggaattagatgatataaaggaagagaatatgctactgaaggatgacatacaatttctgaaaacaatgcttattgaggttgctgagacagagaacagtatattcacattagagaaggagcgtgctcttttagatgcttcgcttagggagctggagtctagatttatagatgcccaagcagatatgttgaagtctgatcctaggcagtatgatgcatggtgggagaaagtagaaaatttgggggacttgcttgagactgcaacaaacaaagtagagaatgctgctatggttctgggacgcaatcatgatttggaagataaggtcgacaaactagaggcatcgttggctgaagcaaatatatcaaagttctcttgttattttgttgatcttttgcaggaaaagataaaatcagtagaagagcgcttccaagtatgtaatcatgaaatgcattctcaaattgaactctatgagaattcaatagcggaatttcacgatattcttagcaagctagtggaggaaactgagaaacgatcactagagcattcagcaagtagcatgccttcagaattgtggagtaggatatctcttctgattgatggttggttgctcgagaagagaatatcctacaatgatgcaaatacattacgggaaatggtcaggaaaagggatagttgtcttcgggaagcatacttgtcatgcagaggtatgaaagatagggaaattgtggacaattttctaaagatcacattgccagggactagttctggcttgcacatcatccacatagcagcagagatggctcctgttgcaaaggttggtggtttggcggatgtgatatctggtcttggcaaggcacttcagaaaaagggccacctagtagagattattcttccaaaatatgactgcatgcagaatgaccaagttaataaccttaaggttttagatgttgttgtacaatcctactttgaaggaaatttgttcaacaacaaaatatggactgggactgttgaaggccttccagtctattttatcgagccacaacatccagcaaaattcttttggagggcacaatactatggagaacacgatgactttaaacgttttgcatacttcagccgtgcagcactggaattactttaccaatcgcagaagaaaattgacatcatccattgccatgactggcagactgcatttgtggcacctctttattgggaagcatatgcaaatctgggcttcaactcagctagaatttgcttcacctgccataattttgaatatcaaggagctgctcctgctcaagatttagcatgctgtggccttgatgttcagcaacttgatagggaagacaggatgcgggacaattcacatggcagaataaatgttgtcaagggtgcaattgtgtattccaacattgtgacaactgtatcaccaacatatgcactagaggtgcgatcagagggtggacgtggactacaagattcactcaaattacattccaggaaatttgttgggatacttaatggaatcgacacagacacatggaatccttcaacagatagacatctcaaggttcaatataatgctaatgatctccagggtaaggcagcaaacaaagcagctctcagaaagcagctaaacttatcttctacaaatgcttctcaaccactggttgggtgtattacaaggctagttcctcaaaagggtgtacatctcatcaggcatgcaatatacaaaacagctgagctaggaggacagtttgttcttctgggctcaagtccagtaccacacattcaaagagagtttgagggtattgcagaccattttcagaacaataacaatatccgactgcttttgaagtatgatgattctttatcccattggatttatgcagcatctgacatgttcattgttccatccatgtttgagccatgtggcctcacacagatgattgccatgagatatggttctgtgccgattgttcggaaaaccggtggattgaatgacagtgtcttcgatttcgacgacgaaacgatacctaaggagctgcggaatggctttacgtttgtgcatcctgatgaaaaggctctaagtggtgcaatggagagagcgttcaactactacaatagaaagcctgaggtctggaaacagctggtgcagaaggacatgaggatagatttcagctgggcctcttcagcttcccagtacgaagatatctatcaaagagcagtggctcgagcgagggcagcagcatgaactctggcggtttagtgagacctgagcctttctctgacgcggcgcttgatgccacaggcacagattctgccttctgaagaagccgcaccatgcacctctctgatgtgcgaacatggcttcatctgcagcttcgattcttggaatggaacccaagatatttaaagacatgatccgtcagactcatgcaggaagccgagatgttccatagtgcagttatggaatggtcgaagaactaaaatcttggcacccattgtcgtgtcccagtgacagtgtggactatacagttatataacttatagtacgtgattgctcagtcgtgaaatttcactagcctcgatatatttatcatgcgctacggtgaaatgataagttttgttctttgtatcacttgcagtgtgctttgttatttgtgcaaagtcgtgtgtgttgtctatagaatattctttcgtc

SEQ ID NO: 17116 - DNA, 2869 bp, Oryza sativa
  ref <308>: DATABASE ACCESSION NUMBER: AK067578
  ref <309>: DATABASE ENTRY DATE: 2001-12-06
gaggcagacaggcaggccagagcggcgtgagtgagctatacaggaaggcagttagcccgtggccagcctaagaaggtgatagcatgggacttaatgggaaatggaggaaggccatgccatacatggcgatggtcttcctacagttcggcttcgccgggctgttcctcatctccgtcgcgtcgctacggcaaggcatgagccactacgtgctcgtcgtataccggaatgccgtcgccgccgtcgtcatggcaccattcgcgctctggttcgagaggaaaacaaggcccaaaatgacgctttctgtgtttttcaagattatggctctgggactactcgagcctgtgcttgaccaaaacttcttctatatgggagccaagaacacgtcggcgagcttctcatcagcactcaccaacatattacctgctgtaacgtttgtaaatgccatcatactgaggatggagagaataagcatcaaggaacgacgaagtcaggcaaaaatagcgggcacactgataacagtggggggagctatgcttatgatactcttcaagggccctgtcatcaattttccgtggaccaagaatgccaatcacaacatctctgatagtagtgaccacaataatggccactggcttatgggtatctttatgattttgctaagctgcttttgctggtctgccttcttcattctacaatcatacacactgaggggttacccagcagagctttctctaaccacactgatatgcgccatgggtgtagcacagagtggggcggtcgccctagtcatggagcgtgatatcaaggcctggttaattggctttgatatgaggctttttacagctgtctactctggcataatgtgttctggagtggcttattatgtgcaaggtatggttataaaggagaggggtcccgtatttgtcactgcctttagccctctttgcatgattatagtgactattttgggatctttcattctttgtgaggttgttaccttgggaagggtgattggtgcaataattattgttgtgggcctgtatgctctcatttggggcaagaacaaggaccatggcaatcaagttgatcaagatgacaattttgagaagcagaaaacttttgagctaccattgtccacgactaatgttaacgaagcacgtagtcctaatcatatttaactgtcaagttgacagcatcgacaacgaaagcttcaggcaattaatttactacatggtgacttcaatgtatctcttgatattctcggtttcatttccttggtaatggatgtatctggtcaattcaacaaagtctaccaaaatgttcttgtctaatttatgttcaacttataacttattgattatcacacgtcctacatatgtagtggaagggttttcaggtgcgagttctatgcgtgtaccatgcaaattagtcccctaatcagttgttaacactccacagaataaggcccccaaccatctcatgtctcttgagaacagaatgggctaacactgccggttcgtgagggtggtttccttgttgacaggaaacactatcgactttttaggttttcggttccacgtaaaaacttttcaccctgtcatattgaatgtttagacacatgcatggtatattaaatatagaaaaaaactagttacacagattgcgtgtaaattacgagatgaattttttaagcctaattgcttcatgatttgacaatatggcgctatagtaaatatttgctaatgactgattaattagacttaataaattcgtctcgcagtttacaggcggaatctgtaatttgttttattattagtctacgtttaatatttcaaatatgtgtctgtatatccgatgtgacacgctaaaacttttcaacgctaaaattttccaccgctaaaactaggagcgttttacagtccccccccaccccccccccccccgcacacacttatacgagcagtagtgtggtaggatcatatctgaccgttgattgtcgtgggcattttagcccttttcttaattttggcggcagggtatttcggtaaatcgcgttcccggtgttttctctgttcgttactcccgagtcccgacccgcattcctctgttcgccgccgccatctccctcctcgtattgttcacgcgaggacgccgccgcgctgctcctccaccagagcggtgaaaagccgccgttgtccccctccactgttgtccaccttaggcatcaaagtcccggcgccgacgaactgtgcggcacctggcgctttgctgcccctcgccggcctcttcgcttcccccgcccccgccggacacctcgctgccccaggccaagattctcggtgatctccccgccggccgcctgccctccttgtgcatggagtcaccgaccctcgtctgatttggattcggattcgtcggcacctctccatttgattcagaggagtggaggcgacagtagaagtttccatactggaattcgtcagtggttttgatatatctgtcatctgtgatcttcctatgctcgaggaccatggagaacttcagcttttcaatggcattattggtgagccatgcagctagagggtttgtgatggctgtttgctttgattcagtgatgcattagaaattgaagttgtccatgcactgactgaagaacatcaattcagatacttgaagctactgaactcaataatgcctcttgctttgtttcattgtggataattgttctcctattagaacagtagagtttgagatattatatcatttatatgcaatgcaatgtgtttcatgtcatctcaagttcccatctgcatatttcctaaaatcttgggagcagttgacatatagctgaaattttgagtcttgtacg

SEQ ID NO: 17117 - DNA, 1405 bp, Oryza sativa
  ref <308>: DATABASE ACCESSION NUMBER: AK067579
  ref <309>: DATABASE ENTRY DATE: 2001-12-06
acagatacctttctcggccttttggctaagatcaagtgtagtatctgttcttatcagtttaatatctgatatgtgggccacgtgcccacttcgatattaaatttattttttgtgggggagggtccactacagtggcttgccactgggatcccttgcgtgtcgcccaggcgttgcactacagcctgggcccggcgcaccccaaccaaatcaagcttaaattttaattaaaaatgtatttgaatccgttagaaatctatttcttctgattaagttaaaatcttaatttaaaatttagtgtttatattacttgaacaaaaaatcattgttgttaagaatggaatggttaaaaatgtgaaattaatcagaggtttccgcaaaatatccatgatttggattactagtgttcttttgcaaaattcccctcgttccatcagcgcaggaggccgccaatccgtgaccaagaaaaggctacacccaaaatgaaaatgctactacttgtacattagaactagattagcttatctaataaaggagtgttacactttaatctcttcacctagctgtagaattttacattttccctgcggtttataacaccatctcttccctgtaaaatgcatgcagcaacgagaacacagcagcttgatgattcaggaagcagcgtatgtgacagatgatgccttgtgcctccgcctgttgctcatcttcccgccaccatccgacgaccactgagactgcgaatgagagctcttcttcgtcttcctcctctccgctcctccctgcgctcccccgagcatggcgatcctcccgatccctcgcgatatcgacgccagcagcgcccggccgtgctccccgccgccacggccatcccgcatcccctgcctcatcaccccctgctcccgctccagctccgtcagccgcacccgcatccgcgcgatctccagcttcagctcccggttctcccgccgcagcgacgcgtagttgtcgcgctgcggcgacacgcacgagctcgccaccccgctgccgccggtcatcatcatccgctgcgacagcgacccgccgcagccgtcgccgccgagggaggtggtgtggggggtagttgacgacaccgtggatttgaggcggagctgctcgaagtagaggacgcgcaccaccgtctggatggggaggcggtcgttctgcgccgcgtggctcgacgcgtcctgcgacagcttctggcagtcgatcagcttgcacaccttcttgcactccgactccatcagagatggatgagcctgttgtttatcacaattcagttcgtcacacacacacagcacaaagctgtacatcatcagacactacacagattgcaaatggttctaatgatcacattaaacagtgcaagtattcatgtcacattttcatc

SEQ ID NO: 17118 - DNA, 2629 bp, Oryza sativa
  ref <308>: DATABASE ACCESSION NUMBER: AK067580
  ref <309>: DATABASE ENTRY DATE: 2001-12-06
ttgtgtatgatacgaccaacgagagcccgatcagtatgtacggtgatgatactgggagtggcatgtgccatgtcagcgtgctcaactttggtgatccgtcgagaaagcatgagatgcattgcaggtttgaaaaaaagccaccatggccatggctggcaataacgtcatcgtttggaactcttgtgattgctttactgactggtcacatatttcaagctactgtccatcggattgctaaagttgaagatgatttccacaagatgagcgaactcaagaagcgtgcagaagatgcagacgtcgcaaagtcacagttcttggctactgtttcacatgagatcagaactccaatgaatggtgttctagggatgctccaaatgctcatggatactgatttggacacgacgcagcaggactatgttagaactgcccaagctagtggaaaagctttggtctctctcatcaatgaggttcttgatcaggcaaagattgagtctggtaaacttgagctcgagacggtgccctttgatcttagaacagtttgtgacgacattttatctctgttttgtgggaaagctcaggagaaaggactggagttagcagtgtatgtctcggatcaagttccacagatacttattggcgatcctggcaggataagacaaatcattacgaatcttgtcgggaactccataaagttcacagagagagggcatatatacctgacagttcatgtagttgaagaggtcatgagttgtttggaggtagagacaggaattcagaacacaaacactttaagtggctatccagtagccaacagaagatgtagctgggagagcattcggcttttcaacagagaattacactcatctgagaagtcttttgcgcccatcgcatctgattcaataagcttggttatatctgttgaagatactggcgtcggcatcccatttgaagcccaatcccgtgtgttcacccctttcatgcaggtaggtccatccattgcccgcatccatgggggcactggcattggattaagcatcagcaagtgcttggttggtctcatgaagggagaaatcggttttgcaagtaagccccatgttggttctactttcaccttcaccgcggtgcttatgagggcacactgcaaaggaaatgacatcaaatcatcagaatttaaagggatcaatgcattggttgttgatcataggccagtccgtgcaaaggttaccaagtatcacttgcaaagacttggagttaagaccgaactgacagctgagctaaatcagttcatttctaaattaaactctggatcactgactgcaaagctagtgctaatagacaaggaaacctggcttaaggaatcccattgcacgcctcttctggttaacaaattgaggaataatgacaagccagactctcctaagttatttcttttggggagctctgcaagttctcccaagggcggttcagatacatccagggaacataacttgaatgtaataatgaagccgcttcgtgcaagcatgcttcaggtctcactacgacgagcactaggtggggtcgataaggtgcactgcaggaatggagtagttggcaattcaacattgggcagccttcttcacaagaagcaaatcattgttgtcgacgacaatatcgttaacctgaaggtggctgctggtgctcttaagaagtatggtgccgaagttacttgtgcagacaggggaaaaaagcaatcacattgctaaaacccccgcacaattttgatgcttgtttcatggacatacagatgccagaaatggatgggtttgaagccactagaaggattagagtgatggaaagagatctaaatgagcgaatagaacgcggagaggcgccaccagaatgtgctagtattcagaggtggcgaactcctatattggcgatgacggcagatgttatacaggcaacacacgaggagtgcctgaaaagcgaaatggatggctatgtctccaagccatttgaaggggagcagctgtacagcgaagtagcgcggtttttccaaaatcatgaccaagttgaataggaaggtttatatggaatgtaaattggtggaggatgttgccacgcaccgatcacatgccatggcacagaattttgtccaagatgctgtgttcccaagagaatgaagcacaaaaggtgtcgagatggaaccgcccatgttctgatctgtagtacaccatctgacctagaggcaaaattaactgcgcaattacatgagaacaagatacatgtgcagcaaaggtactcaaacaatttcttgaagtcaaggcgtgtgaaaatggcagctgcatattcactaactgcagaagaagcagaagtcgttctcgtagatgccctctgcctttgtaatataaacgtagggagagaaaatttttcctgtcttctttttttttcctcgggaattttacggtgtacatattaggtgttggtgatatgtgcaggcaattccttggtatatttggatgtgtttttttttttctgcaaggtttgtggaagctgtaaatgacacaattcaaaggtgaagcctttggtttcttccattgacatttttgacaagaatattgatgccgtcggctctcggctgttcttttgc

SEQ ID NO: 17119 - DNA, 2176 bp, Oryza sativa
  ref <308>: DATABASE ACCESSION NUMBER: AK067581
  ref <309>: DATABASE ENTRY DATE: 2001-12-06
gtcattctcgctcgcacaacctcgcgcttttcgccttaaccccgccgccccactccccccacctccccgcctcgtcgccgcccgccttgccgggaccctagctccgtcggacgcgtccgggggtggtgatcgcggcgcgcccgcccgattgggcgcttctcgcggatcggaggcatgtcgtcgggaggaggccgtccgccggcggcgcagcacatcgtgcggtcggtgcggcagcggttcgtgccgctgccgccgccgctggcgcgggcgcccttcgcggcggcccccggcgattaccaccgcttcgcggcggcgtcccggggcggcgagatcgaggaggggattgtcatcaggaggacacccctgaaaagaaaaactccatgtggagaaagtgaggctgctgagtcaagtgaacgtatgatgactagccctgggtttactgaaggagttggcagcccacttatgaccccagtttctggaaaaacttctaggacaaccaaatcaatggctaaattcaataaagctggacctcagacgcctatatccaatgctggttcacctggaaatccatccactcctgccagttctcgctatgacaattcattaggactattgaccagaaaattcattaatttgctcaagcagactcaagatggcattctagatttgaatgatgctgcaaagatattagatgttcggaaacggcgcatatatgacataacaaatgtactggaaggaacaggtttgatagaaaagaagcttaagaacagaatccgttggaggggttcggatgactcaggaactaaccttgatagtgatatttcatgtctcaagaccgaagttgaaaacctttacatccaggagcaagctttagatagaagtataagtgaaatacgggaaaagatggaggagttaactgaagacgaaagcaaccataggtggctatttgttactgaagatgacatcaagggactgccctgctttcagaatgaagcattaatcgcaataaaaggacctcgtggtactacagttgaagttccagatcctgacgaggctggtgattatctccaacggagatatagaatattattaaggagtacaatgggcccaatagatatttacttggttaggtaacacttcattcttctcttgaagcttttgcctcaaaagaaattatctgatgaacacccttactatattatcagtcaatataagaaaatggaggagctaggtgaaactgcaacacctccaaggcatgcaagtgttgtagagcctccctccatagcaacagaagctggacatagcagcaagcagaccatgccgttgaatgttcagcaggatatccaggaaactccggagcttaatgcttcacgtgcttttggaaggatgaagaagattactccttcagatgttgatactgatgctgattactggcttctcaccgatgatgatatcagcattactcatatgtggacaacagcatgtatccttgatgaaatatagtcattgggttttttttttctcatatactataagagcttacaagttgcactgtgcattgaactttgaagtactttaacatgataaccagcagaaatgcagtgggatcagattgacaccaacgacttcttagctgaagaaataagtgacaccccatgtgcactcaaccagccgtctgctgcagccagtgaacctacaggcgtgggcttcaaccatggataaccagtaaggtttactgctagaccagatctactggtgtcgattgaggttattcggtatgacttaattcctccggtggtttccatgggagtctgcatcctttcccagagaacaggaagtgcaggcgcagcgtgaagatgtacatactgagatagtcagatagccatttttttctggattggcggtatggatctgaaaacatatttgcttatcactccacttatgatttgattaccctcctgttccaatggtgatcgatatgattgtacatagaggcgttgcttcgttgtgttatttttatagctcactcaggttctttctcccagcttaagctacttggtagggtcagtctgtaaatagttcgactagggtgtacagcatatgagcaaccattgttctatgcaagtttcatgcagaaaatgttttaaaaaaaggcttctgaatgttctggctgtgt

SEQ ID NO: 17120 - DNA, 1677 bp, Oryza sativa
  ref <308>: DATABASE ACCESSION NUMBER: AK099006
  ref <309>: DATABASE ENTRY DATE: 2002-08-28
gccccgcatttcgtcgaacacctaccgcgatgccgccgacgccgccgcctctcctcctcccggcgccacgctgcccacgctctaccgccgtgctggcggcgtaccgcttcgccgcgtccgcatcctcctcttccggaggaggaggaggaggtagcagcagcggcgcgcgcacggcgaggccgcccccggccccgcggcggcggcgcggcaagcccgggttctcgcggcagtccgccatcaagaagagcttccaccaggagcaggtggtgttctccacgcctgttccccccgacccatccgtcgccgtcgtaggcggcggcgcatccggcctcgcctgcgccgcctccctcgccgcccgcggcgtccgcgccgtcgtcttcgacacggggatgcacgggctaggagggaggatggcgacgagagctatcgccgccgccggcgaccagcagcagcagcagcagctggtgttcgaccacgcggcgcagttcttcaccgcgagcgacgagaggttcaagagggtggtcgacgagtggatggacaagggcttggtccgcgagtggggaggcttgatcggtgagctcgacgccggcggccatttcaggcctatgccttcctcctcgccgccgcggtacatcggcgtcgacgggatgcggccgcttgcagatgcgattctgcctgagagtgacctaattgaagttgtccggccgtgttggataagcaagcttgagccgttcaatggcctgtggcgcttgtttgagaatgagaagccacatggtcaatatgatgcaattgtgatagcacataatgggaaatgtgccaatcgtctgctctctacatcaggtctaccactgctgacaagacaaatgaagagattacagctaagttctgtctgggcgctcctcgcggcatttcaagatcctctaccaattccacaaactgattcttatggaacatttgaaggagcatttgtgaaagatgttgattctctctcttggatggccaacaatactcagaaacttttccccttgcagactggcagacccgagtgctggacatttttcagcactgctgcttatggaaaaagaaacaaagttccgcaggaaaacattccaaagatcacggcggaaaaggtgaaggaagacatgcttagaggtgtagagcttgctttagggctatcaagaggatctcttcagcaaccattttacacgagagtacaattgtggggtgcagctctaccaatgaacactccaggagtcccatgcatatttgatccccaagggagagcaggcatctgtggtgactggctaacaggttcaagcatagaagcggctgtgttaagcggaatgtctcttgcaaaccatatcgctgactactttgcaagcagtggtgaacaaccagaggagtttgcaattggtttgcatgagaacttgagccaggttgaaggtcatgatattggtcagttcccaggtttagagagtcagaaaccgcatgtagctgaagctcagctaacaccgagcacatgatttttcttttgttagttctgtactggtaatttctgtagcatgtaaatgatgagctgattcttttgttgcacagaacgtgtatgttgtaaaccgcaaaaatgtatatcaaccatgtatatgtagaaatttttgaagctcttcgaatgtttcatcc

SEQ ID NO: 17121 - DNA, 4062 bp, Oryza sativa
  ref <308>: DATABASE ACCESSION NUMBER: AK067582
  ref <309>: DATABASE ENTRY DATE: 2001-12-06
gagaactcaacccctcattcactttcgcccacccatctcctctccacacgaaaatcacgtgcgtgacgcgccgctcgcccgagtgtcgaacacctggtgtgcgagggctgcgccgccgccacaaaacatctcggccggagttggtggcagggtgaagtgtggtgtgcctgtgttgccgccatcgctgttgtgggcaaccgggagacgctggacgccgagaagcacgcgtcgaacacctttgatcgccgccgacgtcgcatgcctctgcattgccccgtgccgcaccgcgcatcgctgttttttttgctgtcacaccaccccacggtaaaccctcatgcctcgtgcatcacctagtgacctagaagccggcggctccctcgattggaggcgtgcaccgccgcattcttgccggcacggtcggcgtcgcaccgccaccgagctccccgtgggcagacgtaattccaatgcaacctaggctatattttcgcgaaactagcatcactaggaaccctagatcgtgaaatcagagtcggatgcgcttgttttggccgccatgctcgctgcgtgcagtcatagcctgcgcctggtggccgccacgtctcgtcgtcaccggcggcgagtcaccggcggtgtgccgccgctttcctcgcttctcgtgcacactccgtacaaatgtcacgaaaaattctagaaaaattggacacatatttccaatattattgcacctaagtgtgaaatgttatctttaaattcattatattttagcgtaacaaaaaatacaaattatgacagattttaccaaaaaagacaaaaattattttaccaaaaaaatgtcagatttttcttttttttttttgttatcactaaaatataataaattggaaaatgagactttgcggataggtgttatactactagaagtaaatatctagtttttttatagattttttcgtgaatattacatgtttccccaatttaaatgttaaatttacttatattttgaaactaggcaatagtaagggagtgtttagatctaggggtgcaaagttttggcatgtcatatcgggtattatatagggtgtcgtatggggtgtttgggcactaataaaaaaactatttacagaatctgacggtaaacagtgagatgaatttattaatcctaattaatctgtcattacaaatgtttactgtagcaccacattgtcaaatcatggagcaattaggcttaaaagatttcacgtaaattagtcccaatctatgcaattagttattttttaagcatatatttaatacttcatacaggtgtttaaatgttcgatgtgacgaggtcaacaaattttaggtgggatctagggggtgtttagatccaggaatataaagttttggtacgtcacatagggtgtcacatgaggtgtttggacactaataaaaaaaataattacagaatccatcagtaaaccgcgacattgtcaaatcatgaatcaattagcattaaaagatttgtctcgtaaatttgttaccatttgtaccaataattattttttatttatatttaatacgtgctaaaacctacaatgtgaggtgaggcggtgagcgctcgggcctgccgacctggggggtggtcacaccgcagcgctcgatcggttgtggagccgcggatacgcgcgtctgctcgtgtcctgagaatataggtcggcgcgcagccgcgcctgtcatatcttgcctccactggttcttttcgctgcttcgtgtttggccgcccacacctcgcggatttgcgtaagcaatgacgtcaatatatattcattgaaagcagcaaaatggggtccacgcgtgaaatggtgcctatcagaccacctgcaccgctgaaagctctggccattcattgctctcgtacgtgggttagtactcctaccagcactactttccagcccataattccgcgtggtgtgtcccaccagagaggacaaccatcgtgatttgtgagttcacgataataacttcttttccttttttttttaaatccatctaccttaaaatataaaagtatttaatatactttctccgttatgaaatataagaaattttacgtgggtatatcatatcctactgctacgaatctagacatagagtatatccaaatttatagaactagtatatattatatccacccaaaatcccttatatttcgggacgaaaggagtattacatggttaatttttcgcacaacgtaatcattagtattattcaaaaatttaaataataaatacttttattctattatgttttttatcaaataaaatataatcttaacttacactttatatattcacataaaacttttaaataagttaaatggtcaaaagttatatgaaaaatccatgaagtcatacatagtaccccctctgtgccattttaacgcaatcatgagtttttttttttctaattttaattatccattttatttaaaatttttatgaaaaaaatttaaaaaaataaaaattactaactataaaagaatcaaagaagacagatgatcaaagttggacatgaaaattcatggctacaattaaaatgagatggaagaagtatcggaggtttgagtcttgcattgtttatgcctttcttttaacgaatccgcgagcagccaatttcactgaatagagaagggagaaaacttgttcttaggagaaagaaaactaatcagtaagtgggaccgctaatttcaaatttagaatttaattttctaattaactttggccttttcattcttattgaagcctcatgatttgactaaactaattgcattagaatcaatttctcttcgtttcctataaagattaattatttcgtctcttacgtgtttactctttcgtccttaaaaaaatgacatattctacgacgaatcaaaataaataaatgttacatatcatattatatttgtttctataggacagagggaataaccggtaaatcttcattgaagacgtcaatccaccactgcttaaaaaacaattttcatgtaaagggacctctttacatcgaagacggactataataacttataactgatcgtgtatgtcaaaatcatcctccattttcgtgtgcggctacttaagaggatcgcatggaaaaatcggttttcgcgtgcaggcctcttgaatggacggcacgcgaaaatggacctatttttccaggccacacgcaaaagtacaattctctcttctcgctctcactcactttaaatttttcacctcttctccctattgtttccactcatctctctctttctctcctctcctctccatttctttctcttctctgctctcctcttctcctctcctctcctctccacgtgggagtgggcgggaggcggcgtggcggcgggcaacgaggtggtgaggcagcgaccggcctcggggaggttggcgacgaggcggcgaggctcggcggccggggcggtggggagatcatcagcagttcggcggcgctcagcttcgcctacgatctgctgacgggcgagtagaaggtcgtgcacctccccgtctccagctggaagaggatgctcgccatggtggaggtgctcacggacggcggcggtcggcgtgctcatgtcggctggtgcgcgactgcggccgcacgcggaaggcggcgtggggcgacggtgactgtcacccgcccggatccggcggtggcggccggcacgatggcggcgggcggtagggaggaggcatggtggtggcggaaccggtgacggcgatgggaacgacaaccacgggagagggcagatctggcgtggacgacggcggcgacgacttctaggttttgggttcagtggttttgggttcagttttttttaattatttttgggtgcgggtgacataagcactgcacaacaaaattagatttttgtgtgcgggtgcgccatccgtatgaaaaatagcgatttttgcagacatctgggtgtgtgtgggtagcccatccacacgtgaaatccccttttggctgcatggaaaaatcgttttcgcattagtgcactagcctcttgattctttcgtctgg

SEQ ID NO: 17122 - DNA, 2522 bp, Oryza sativa
  ref <308>: DATABASE ACCESSION NUMBER: AK067583
  ref <309>: DATABASE ENTRY DATE: 2001-12-06
gacctgccacgtctctctctccctcgttgagcagcagaggcgccgcctatcgccgccgccgccgcccgcgaccaggagattcggaggcgatggggcgggaggcggcggcggaggcggaggagcagctgctgcgccggagcctgcgcctcttcgccgccggggagcgctccttccgcatggaccgcctctcgccggacgccgacgccctccgcgccgccgtcgccgacgtgctcccccgcttcctcggcagctacaccgacgacatcctcgcggaatacattgtcattctagtctgtaatgggaaacaccagtaccaagcacgtgatgacttggaggccttccttggtgatgatagtgcaaaatttgtttcatggctttggggttacctcagtaaaaaggctttaacattggctgacaattctagcatccagcatggtctgacaaatgagatccggaaccgtagtaccaagaaaaatcttcaggttgcaaatgcgctatccgaggatactttcattgtcaattcagatatctcatcacctcaagagcatcatactcttcagaagcatgactcaactgaaggacaaaatgtggcccgacgccacattagctcgacggttactgttactcctgaaaagttggttgacgatcaatgttattgggagggccaacatcagaagaaagatcagagatcatcaagtggcagaaatttctccacactgaagtctggtgtagctgtaaggacagcacaagcattgccacaagatgaactccgccatgaagtgtgcattggaagaaatgcttctgcaagacggtttcctttggctgtaagaagtgatgatgtgctagatccagaatctattaaaaaacgtggcaatgtttgggataggctaggaaagcctgccataaaggatcgtatttgtgctacagaagatgatgacatgcatgttcaaaatggactacataagaaggcgaagttaatggtcactgagcatgagctaagatgccgtatgaactcaagtacagaaggagatttatttgatatagcaaattccagaagatttcccagaagctatcaagatgtcaacacagtacaagcacatgagcacacagagaagtccaatagaagcaggttgattggtcggataaattttggtgatattgagcgtaatcagcttcaagttagagatgttattcgccaaaagtccagtccaaatttgccagcaagaagtgttccactacaaagtcagaatgaattcatatctgaagtgaagagctcagtaacagcagtctctgagtcagcatgccatgtgagtaaatcaacaaaaggacaagtaccaggatctagcaaattgggtcaactagctacacggagaaatttagagactgaagttttgcaaagtcagcaagttagcagcccagcgcaatctaagacaggatcttctgtacatgaagatggtggaaattgctgtaacaagcctatgaaaaatgaaatgctggatgtgaaactaaagctcaaacaagtggaactggatgtgctcaagcttcgttccaagcaggcacagataaacaatgtgaagcaaggtttcctatcatcaggtccccatgctaatctagatgaggatgctgactccagaactgttctcgtgacaaatgtacattttgcagcaacaaaggaagcattgtcagggcattttatgaagtgcggcactgtgcttaagataaatatattgacagatgcaatttctgggcaccctaaaggggctgcatttgttactttcactgacaaggaatctgttgagaaggcagtatcattgagtgggtcatcatttttctcaagagttctaacagtaatgcgcaaagccgaagcacctccaggttttctggcatctgttcaaccgatcgggaggcctctacagtcatggaactcaccacccatccagaaaggggtgagtccaaggcagatccctggttatcacctccaatggaaacgtgagcaatctgtgctggagaaatcccctgccagttgccctactaactgaagaaaaccacaacaaatggtctagaagaaaataggcctactctacattggcctggcagtggactgtacttgcaaatgtacaaagtttttgctggagaaaaatggccatgtttggcatctgttactatgcccacaaaatacaggtttcttccatacaaggtattgagggcttcaattgcggcgagatacgtgacatggggagagattgctggcaacgccaaatgaatctgttgatcagtttccgattggacacgttgtagcgtatgcctgaaaactgttttctgaacttcacttgagtctcttcatatctctactgtcacccttgtcaaatgtaagcagggcgggtattctgatgataacatgaaatgaaatcacagttctgaaacatttacaaacatttctaaaagcagtatatgtagtatggagtaacatataggtaaaagtacattgtgttaaggtatatgaaaaattaatgcttccacct

SEQ ID NO: 17123 - DNA, 1258 bp, Oryza sativa
  ref <308>: DATABASE ACCESSION NUMBER: AK067584
  ref <309>: DATABASE ENTRY DATE: 2001-12-06
gagtcgcggcgcgagcacaccactgacctctgcggcggcggcgaggagaggagaggggagaagccgaggaggaggcagcggggagagaggatgccgcggccggaggtgcaggcgccgccggagatattctacaacgagtcggaggcccgcaagtacaccacctcctctcgcatcatcgaaatccagtcgaggattaccgagagggcgctcgagttgcttgcgctacccaacgatggcgtccccaagttgcttctcgacatcgggtgcggttctggacttagtggcgagacattgacagagcagggccatcactggattggttatgatatttcgaagtccatgcttgatgttgctctggagcgtgaagcggagggtgatctccttcttgcagatatgggccagggtttaggcttgcggcctggagttattgatggagcaatcagtatttcagcagttcagtggttatgcaatgctgacaagtcttgtcacaacccaagattgcggttaaaggctttctttggatcattatatagatgcctagcaaggggagcaagagccgttttgcaattttatgctgataatgtgaagcagagtgaaatgatcgtgactgctgccatgcgtgctggatttgcaggtggagtggttgttgactggcctcacagttcaaaagcaaagaaatcctaccttgtcctcacttgtggaccaccttctctaaattcatcgcttccgaagggtaaaggtcaagatggtgccatgtgtagtgatgatgatgagagcgatgatggaagtggtgatgaagatgaagcccaaacagtcggcatatatgaaagaaataggccaaagaagaggcagaagacgaagaagaacggcaagggcaaggcttggctcttgaacaaaaaggagcagctgagaaggcgaggacgggaggtgcccgcggacaccaaatacacagggcggaagcggaaaagctacttctagtttcaaatgattcttggaatgcctgtgcaccattttgccgtttgtcatactagtagctcattattagtagtacgagaaaggttcagttgaagagttgggtgaatgcgctctctctctctacaccatagagccgttcatgttctgtaaccttctagcaattctgagttttgacaaatgctgtgcaaatctatgtcctacttttgaaggatccagtattgtatgtttgttgcttaaaattttacatgggttttggcaaaaaaaaaatgcacggtttgatttg

SEQ ID NO: 17124 - DNA, 1920 bp, Oryza sativa
  ref <308>: DATABASE ACCESSION NUMBER: AK067585
  ref <309>: DATABASE ENTRY DATE: 2001-12-06
gtccgcgtagtttctcttcttcttgcagagagagattatcctctttccccttccaccgccactgcgccgcaattcgccttcgctgcgggcatctgcagcagcagaatcatgggctgaaatcgaaccactgcgcgacaagggtgccaaggataactttattgtgctgctgaaggaagacatcttattgacctgctagttctgtagatgatttttggagtgctataaatatcgaggcgcgagttcggactgcaagatacaacacaagagtgagaaaagaaaggctttagctgagttacaggatggaacaaggtcagggagatagatactggtgccaccactgcgaggaagtgatcgaacctgtggagcctgatatgaagtgtcctagctgtgacagcgggttcgtggaagagatggggtctgcaggctttgagccatcgaccaacttgaggtctgatcgtatctccctctgggcaccactgctgctcgggatgatgggaggctcatcgcggcgagcaaggcggctccgaaggcagatcatggaggatgatgacgacgacgatgacgatgaggatgatgaagatgattcagaccatgagcttgaagacttgtttaggaggcagaggaggggctcatctcttgtaaggctgctccagaccctccgggatgacttgaggggcttggatgacattggcagggatagtgacagagacagggaaagggagagaagggagagggagaggctgagggagcgggagagggagagggagaggatgagagagagggagagagaacggaggagagaaaggacagaaagcttgatactgatcaactccaacaatgaggccattattctccaaggaacatttggacctgatgacaaccaggatgactcgagcaatacaagttctggtgtttcacttggtgactactttcttggtcctggattagatatcctcttgcagcatttggcggaaagtgatcttaatcgttctggtacaccacctgccaagaaggaagctgtagaagcattgccaactgtgaacatccaggaagtgttaggctgttctgtctgtcttgaggatttcgaaatggggacagaagcgaaggagatgccttgtcaacataagttccactcccagtgcatacttccatggctggagctacacagttcttgcccaatctgtaggtttcagttgcctaccgaggagtcgaaaaacccatgtgaatcagccggtggaattgtgtcagtgaacgatgatggagatgatgctggtacaagtagtgacgtagatagtgctaaccaacctggtagtcctatattctctgctttgagtgcacttttctcaaatccatcatcctcatcctcatcctcatctgatgataatgcaccacactcttctgagagctgaagccagcgctgggcctgggcttgcaatatgtcaatggagttctgaaatgggactcctgagaggccggcatctttatatctcgtggtttctgtacatattttaaagtttaatccgctagacaagctattcgcgtttcctttatggaacctgtgtggtttgtaatcagtttggtgcctgttatgtctaattatgtaaaataaaatttagcctcaagcatgtttacctactctcaaaaacttgatcggggccagagaactgctgatctggttagcagcttgaccaatgcaaggctacttcagtactatatatggggatatccaacattggcatttcgcactgctttgtcaattaaagaaccctgttagaacaaagctgcagaacagttacagtgcgaagcaactttgtcatctgcatacttgtggaatttaggagttgctgatctaaactatgattagggtgatcacatctgcatttatccacatatctgacattgtgtacttcagtttccatc

SEQ ID NO: 17125 - DNA, 1478 bp, Oryza sativa
  ref <308>: DATABASE ACCESSION NUMBER: AK067586
  ref <309>: DATABASE ENTRY DATE: 2001-12-06
actttttcctcccccttccgaaacgacgaaaagcaaccgccgaggcggaagcggggagaggagaattcgccgccgccgccccccgatcggtggaagaacaactaacaactagattgatccatccctgcgccgccgcctccgcctgccgtgggggctctctccgctgtggatgatagggaggctcgacgatgggagggaagaaggccaagacggttgagaggaatgaccaccgcctgctctgcagtgacgtgctcacggaggtcttccacaggctgccggcgcgcaccctcgcgtcgtgcaggcttgtctgcaagtcatggatgtcggagctcaccgatccccatttcgtccacgagcacctcaagaggagccagcagaagctcctgctctttgcgaacgacaaggcgaacgataggtccctcgcgatggtgctcgccgacgacacgggggctacctaccagctgaccaggcccatggcttcgaggagcctctttgtgcacaattcttgcaatggcctgctctgcctaggtgacagcacaggagccgtgcagttgctcaacccgacgaccggcgaatcggctactctgccgatgccgatgtataccgcagggagcagccagttctcgtcgtgtaattggcactgcttggggttttgcccgtctacgaaggagcacaaagtggtacatttctacctgggagctcattttgattctttcaatgtgtgctgcgagatattcactattggagataaatcctggagacagattgggagtttccatggagcaccgacagatagaggggtgcatgtgaatggagcagtgtactatctgacaaagttccgttacattgcttcgtcacgtatcaattgtttgaatcttgagagcgaaaattttgatgtgatgatgcttcccccacgcaagtcgtatggagggcattgctctttggcggagcttgagggaaagctatgcttgctagttgtggagggtggacatgataatccacctcgtacaatggacatattgatgcttgatagtggtgataagacaacctggacgcacagataccacatctcattgccatggttgatgccttcatgttattttactccaaaacacactttgttccatgagggaaaaatttgggttcagttgttggctcggaacctctactgttatgatccaagttcaagctccactgaactgaagatggcatgtccagaatctgagtttccttttagcacacatactttcattgaaagcatagttcctctgcgcaaagattacttcatcaagcagatacagtgataatggtgttcatcacttgttttccagatgttccgcagttcacagaattacaaaattgtgcccctttttccttttccgttgatgaattttagctggtcaatgacttagagtggcctattttaccgtgaattgtaattagctaaaataaatgcagtattgaaacctccttacagc

SEQ ID NO: 17126 - DNA, 2020 bp, Oryza sativa
  ref <308>: DATABASE ACCESSION NUMBER: AK067587
  ref <309>: DATABASE ENTRY DATE: 2001-12-06
ggctcgctgtctcatcactctgtaaccgataaggctgccgccattgctgctgctgctgctgcttccgccgcgtcgccttctccggcgatggaggcggcggcggcgattggaggggcgcggtccccgctctccttctcctccagcctctgcaatgcaaaagtatcctgtggtttagctcttcacaatgtgaagatcaagagcagtcgaaggcttgaggtggtttgccatggaatgttgacaaccagaaagttcatgcagaagaagaagaaagaggaggtatataaggatgctgctgatgaagcagagcagaagaattggaggatgatgatgagggagatagaagagtcaggatcagctgtctccattctgaagactcagcgaagcaagaaagaaccactgccaagggatgctgttcttggaactcttatgcggttcaaacagctcaagaaatggaacctggtcagcgagattcttgaatggctacgcacacaacattggtggaacttcagtgagatggactttttgatgcttgttacggcctatggaaaattaggagattttagcagagcggagagggtcctgaagtatatgaacaagaaaggttacaaaccaagcgtgatatctcagactgcactgatggaagcatatggaagagccaagcagtatcgtaaggctgaagcagtgtttcgcaggatgcaaacatcaggccctgagccatcagctgtgacatatcaaatcattttgaaatcttttgttgagggtgacaaatacaaggaagctgaagctatttttgaggaccttcttaatgagaaaagagcttcttttaagcctgaccagaagatgtttcatatgatgatttatatgtacaagaaagctggcgactatgcccaggctcggaaactatttgctcagatgtcagagagaggaatccctctatcaacagtcacctttaatagtttgatgtcatttgaaacaaattacaaggaagtttcaagtatttatgatcagatgcaaagaactgcgctaaaaccagatgttgtgagctactccctgctcatcaaagcttatggaaaagctagaagggaagaagaagcattagcagtttttgaagagatgcttgatgcaggagtcaggccaacacgcaagtcgtataacattttgattgatgcatttgcaatatctggattggtagaagaagctcatacagttttcaaggccatgagaagacacagggttgagcctgatctctgttcttacacaacaatggtcttagcttatgtgaatgcttctgacatggatggggctgagaaattcttccgccggattaaagaggacggtttgaagccaaatgttgttgtttatggaactttgatgaagggctactcgaaattaaataatgttgagagagtaatgagagtgtacgagagaatgcggatgcagggtgttgaacccaatcagactatttatactaccatcatggatgtgcatggaaggaactctgattttggaaatgctgtcatctggttcaaagaaatggaggctcgtgggtacccagcagacaagaaagcaaagaatatccttctttctcttgccaaaactcctgaagaacaagaagaagcgaatgaattgacagggaattgtgcaattcagctggaagcaaaacccgatggaacaacatatggtttagaaataaatggtactggaaatgagtataaacatggacaaaatgatgctgggcatgacagtttgttagatggcgcatgcaccacaagtaatcgaaatggtaaagtcgaggctgggaaaggtcattttgaggaggttaatgacgatgatgatgatgatgatgacgatgattacgatgaagagttaaattttgtttctttcaaagataagcgagaactaaattttgccacttgatgttttgattaatgtatatctttatattccaaacttgtgatggcatttcctatacaaaggtatccatgctgtttgtgaaatgtcaaatatagctatttttatg

SEQ ID NO: 17127 - DNA, 1179 bp, Oryza sativa
  ref <308>: DATABASE ACCESSION NUMBER: AK067588
  ref <309>: DATABASE ENTRY DATE: 2001-12-06
gagtcttctccaattattcgcccatctctctctctcttcttcctcctctcctccatgaaagctagggaaattaactaagggcagtggtgcaccacaagttggtgaagctgccagcatgatctgatgatgatgatgatccacctctctcatctgtgttcttgattaattacggatcaatcgatcaggtcatgctgtagtttcatctgctggttgggagcacagcaaaaaaaaaccctaactttgtagccggatttgcatggattaatctgctaggtagctcatcagattctttgagagtttgccttgctcttctgcagatgaagacgtaatctttgaacagatgggattctcaactctcaaggtgaggtagtcatcaatccaatccatatacctgctcaaattcagttttaattaaagactagctgcttctatggagttaattagggatccttttttatagatctctcttgatctgtttcttagtctgttctttcttaataaggcatatatacctcttggatttggattttcttgaaaattaaggtagtttatgagttggatgtgttgtgttatctgcccagccttaatttaactgtgcttcctaaaaattcgtttgatttgatggtagcatctgaattgtgaactcatctttggagcttggactttagaccaggtgccttaattccttaacataagatttggtccatattgtttatggagcttcttatcaagaaatactcttttgattagggagtccccttgtcactttcttcagttgtgcaggtacatatgacatatctgtattaaactgatgacattcataaccaactgtccaagtagggattcatatctttctactaattgcagaatgttttcttggctgaaggaagtttaatctaactgttcaagttagttgcttggttagctgatagtgatccctgtgttttctagttgttgatactgcatatacatatatctgtgacatatggctagttcttgtttgttgtgtgtagataagatacatacaagattctgatctctgcagcaaaagaaacaaagcttccttttttctcttgttttatcccctaatatatctcttcttttgcagttctagctagcaatttcactgtaaaacatgtgtattaccgatcaatactggcatatatctgaacttgatgc

SEQ ID NO: 17128 - DNA, 1612 bp, Oryza sativa
  ref <308>: DATABASE ACCESSION NUMBER: AK067589
  ref <309>: DATABASE ENTRY DATE: 2001-12-06
gaatccccgtcatctccaagagccttcacccattgcgctcctcttcgcctctggtaagcagcagcagcagcatccgcaggagcagccatggcttgctccacccacctcctgtcccagagcctctacccgctcaaccgcgctaacccggcagccgcgcgcgggcacctccggttccaggcttctcccagtgtgaggctcggctccggcaccagtcgccgccgggcgctgggcctgagagtcgccgcgtcggcggagcaagggaggaggcaagtggaggttgagtatgatctacaagcaaagttcaacaagctagcggaccaaattgaccagaatgctgggattacacggctgaacctattctcaccttgcaaaattaatgtgttcttgaggataacgggtaagagaccagatgggttccatgacctggcttctctgtttcatgtgataagtttgggtgatactatcaaattctcattgtcaccaagtaagagcaaagatcgcttgtcaaccaatgtagcaggtgtcccagttgatgaaagcaatttgatcatcaaggcactcaatctttaccgcaagaaaactggaactgacaactttttttggattcatcttgataagaaggtccctactggtgctggtcttggtggtggaagcagtaatgctgcaactgcgctgtgggccgccaaccagtttagtggctgcattgcttcagaaaaggagcttcaggagtggtctggagagataggatcggatattcccttcttcttttcacaaggagcagcgtattgtaccggtagaggagagattgttgaagatattcggaatccattgccagcaaatttgccgatggtactagtaaagccacctgaagcatgctcaacagctgaagtttacaagcggctcaggttagagcacacaagtcaaactgatcccttggtattgctcaaggaaattactgaaaatgggatatcacaggatgcctgtgttaatgatctagaacctccagcatttgaggtgttgccatcactaaagaggttgaagaaacgtataattgctgctaaccggggagattatgatgctgtttttatgtcaggaagtggaagcacaattgttgggattggttcaccagatccgcctgcatttgtgtatgatgatgatgactacaaggatacttttgtgtcagaggcctgcttcctcactcgtaatgagaacgagtggtacagagaaccaatctcatcgaaaatcactagcgaggaagatttacctccggaggtagcatcagtttctgactgagggagtggattctatattagatctcattttgcggttatacaggatacaacatacaggtgtgcactcactgtgattagctttaaaatggtacttccactaggaaaagaaccattccaccttgaaatttgttaacgggactaggagtatcaatcattgattttgaagtgtaggtaagatcgtttactgtgtgtatttgcagcatgcgtcgtagaaacttgttacgggcataccaagtgacacacttgatatgacagaatacatcctccctgcaaaaactgcttgcacttcctgtgagtagaaagcaccaggtttggatttt

SEQ ID NO: 17129 - DNA, 2565 bp, Oryza sativa
  ref <308>: DATABASE ACCESSION NUMBER: AK067590
  ref <309>: DATABASE ENTRY DATE: 2001-12-06
ggcgtaacagaacaaactaacttcttctcgagagaggaaaaaaaaaaagaaaaaccaagaagaagtcgaggagaagagaggaagagtaaagcagcgcgaggaaggaaggcgagtctgctttgcgggattcgcccgtagtagagtttgattccgccgggttggtttggtggtttgatcgggggaggaggaggaggaggatggtggtgcgggagccggtggcgatggagataccggcggtggagtcgtcggcggcggggaggatgccgccgaggatcaggcggcggttgctggaggggagccgcgtcggaggcggggcgccgacgagcgcggaggagatcgaggcgaagctgaaggaggcggagctccggaggcagcaattccatgaatgggtgtcctgcaaagcgaggaagaagccgcggagcccatcatggtcatcacaagaggaagatcaaggtcagcgcctcgaagcgaagcttcaggccgccgagcagaaaaggttgagcctcttggcaaaggcacagaacaggctagccaagttggatgaactccgacaagcggcgaagaacatcgtggaaatgcggatcgagaaagaaagggaagaactcgggactcgagtcgagtctcgtgttcgtcaagcagaggcaaatcgcatgcgtcttttgcatgcacatatgcagaagcgggcggcaatgaaggagagaacggcgcggtcccttgtgcggaaacagacatctgagaggaaatacacggagcgagtcaagtctttgatcttacaaaagcgcaatgctgctgaaaagaagcgactggcattgctggaagctgagaagaggaaagcccaggctaggattttgcacatccaacgagctgccaagactgtatgcagcaagagagaatcagagaggagacagttgcaagaacagctagaaagcaagcttcagaaggcaaaaaggcagagagctgagtacttgaagcagcgggtaagtccccgtagttctgcccatgctgattacatcaagcatgcagaatttctttcaacaaagctggcaagatgctggaaaagatttttgaaatctaacaagacaacatatgcactggttcaagcttatgacgccttgggaattaatgagatgtctgtcaaatctatgccatttgaaaatttagctatgttgatggaatctccaacgactctccagaccaccaaggcagtgcttgaccggttcgagaaacgtttgcttctttctcagccaactggttcatcatcagccgagaacattgatcaccttctgaaacgccttggatctccaaagaggaaggcacctgctagcagatctagggtagctgcgaaaaagccagcgaagggttccgagacaagcaagctttctagatactcactgcgggtagtcctctgctcttatatgatactggctcatccaggtgctgtattaagtggacaaggggagaaggagaatctacttatggagtcagcagaaaactttgttaaggagtttgagctattggttaagacagtacttgatagaccaggaggtgcctcgatgcaatcgactgatgctgccagtcagaaaaagttcaggactcagttggctgcttttgataaagcatggtgcgcttacctttaccactttgttgtgtggaaactgaaggatgccaaatcattggaacaagatcttgtcagggctgcatgcaagcttgagctgtcaatgatgcaaacatgcaagttaagttcagatgggcagtcacatgacctttctcatgatatgaaggcaattcagaaacaggttactgatgaccagaagctgttaagagagaagattcagcacctgagtggcgatgcaggcatcgagcggatgaactctgctctttcggatacaaggtcaaagttctttgaggcgaaggaaaacagattcaggacacgacagagctagcaaccaagatgcttctcaagagcctccaggccggcgacatcgtcttcggtaaggtgtcccgggcggtctactttgccttccgcggcgtcgtcctcggtggcggcgccaagggcaagaagctagccgaagcgccgctgcgacgcctcggcgcggcgaagctcgccgacagggttgtcaaggccggggaggtgctgataaagatggcagtcatatcagagaaggtccatggacaatggtacaaggcgcttgccttgtgaagagcagaatagggtttgtgttgttttgtgaatatacattacggattacggactgtaaattcttgtcctaccggggtgaggtaggaaatattgggcattgtacataaatttatataggtgttaattggtaggctgatttcagtgtcaaaaattaattctgggtgcagggctaatatggatgaccctcaccccagaatttagccagtggttagatgtgctgaattgcacctgggtgtaagttaaatctgatgtaatctatttgctcttggaactgaaataatgtgaatattttaatttaaatattgtgatgtaaatatttcgatcggttgtgcagtggggtgattgaaatttggttggcattcacc

SEQ ID NO: 17130 - DNA, 1895 bp, Oryza sativa
  ref <308>: DATABASE ACCESSION NUMBER: AK067591
  ref <309>: DATABASE ENTRY DATE: 2001-12-06
gaagtaatttatcaagaaggtagtagctactagctcctcgcaataccatggaggacaagctgctgctgctgctggctctggccgtgtcggtgctcgtcgccgtcgtcatctccaagctggtatcatatgccaccaagccaaggctcaacctgccgccggggccatggacgctgccggtgatcggcagcatccaccacctcgtggggagccaccccatccaccgctcgatgcgcgcgctcgccgagaagcacgggcgcgacctcatgcaggtctggctcggcgagcttcccgcggtggtcgtgtcgtcgccggaggcggcgcgggacgtcctccggagccaggacctcgcgttcgccgaccgctacgtcagcaccaccatcgccgcgatctacctcggcggccgggacctcgccttcgcgccctacggcgagcggtggcggcagctgcggaagctctgcacgcagcggctgctgaccgcggcgcgggtgaggtcgttccggtgcgtccgcgaggaggaggtggcgcgcctcgtgcgcgacctggcggcctccgccgccgccggcgaggccgtggacctcaccgcgagggtggccgagctcgtcaacgacgtcgtggtgaggtgctgcatcggcgggcgccggagcaggtaccgcgacgagttcctcgacgccctccgcaccgcgctggaccagacgacgtggctcaccgtcgccgacgtcttcccgtcgagcaagctggcgcggatgctcggcacggcgccgcggaaggctctcgcttcccgcaagaagatggagcgcatcctggagcagatcatccaagaacggaagcagatcaaggagaggagcaccggcgccggcgccggcgccgacgacgaggcggcggcggccggaaacgagtgctttctggacgtgctgttgaggctgcagaaggaaggcgacacaccgatcccaatcacaaacgaaaccatgatgttgcttctacacaacatgttttcagcaggcagcgaaacatctagcaccactctaaactggactatggcagagctcatcaagtcaccaagagtaatggcgaaggtgcatgatgaggtgaggcaagcctttcagggaaagaacactattaccgatgatgatgttgccaaattgagctatcttaaaatggtaaccaaagagtccttgagaatgcattgcccagtgccgctcttaggcccccgaagatgtcgtgagacatgcaaggttatgggttatgatgtgcccaagggcactatcgtgtttgtgaatgcatgggcaatatgtagggattcaaagtattggaagagtgccgaggagtttaagccagagcggtttgaaaacataagtatagactataatggaaataactttgaattccttccatttggatctggccgtagaatatgtccaggtataactcttggtatggccaacgtagaattccccttggctagtttgctttaccattttgattggaaacttcctaatcaaatggagcctgaggaaatcgatatgagagaggcacctggacttgttgggcctaaacgcaccagcctatatttgcaccctgttactcgtgttgctccaagcagtgtttaggtggcaacacatacatatctgaagtaatgctatcatagtatgttgccttttctcccttctatcgaagttgatgggacatatccccaattatcgcaataaatttggatatctaaattgctgtttacatttcaaattcgctaaatttgtattgtgcggagggtatataccatgtcaaacctcaaatttgtactcagtgtatatgtattttgataagggcgccttttggacgcaatttcgcaatgtacaccaagaaatattactacatgaaaagacaaggtttgtatactt

SEQ ID NO: 17131 - DNA, 2361 bp, Oryza sativa
  ref <308>: DATABASE ACCESSION NUMBER: AK067592
  ref <309>: DATABASE ENTRY DATE: 2001-12-06
gagtagtgtgaggagaagatggagtttctgtcatcagtttcatatcttttcaaggctctctgcacatgtggtgttgcatttgtcactgggtggtttgctcactgggtgtacagatggatgaatccccaatgcgatgggaagctccctcctggctccatgggcttgcctcttgttggtgagacattccgcttctttagagcgagcgcatctattgacatgccgagctactacaaggaaaggctcaagagatatgggccaatcttcaagacaagcctagtggggcagcctctggtcatttccctcgatccagaggtgaaccggttcgtgttccagcaggagggcaagctgttccgtagctggtacccagagacgacgaacaccatctttggcaagaaaagcctcaccacgtatagtggtgccgttaataagttcgtccggagtttcgcgtccaagctctttggccctacaaacttgaaagaatcactccttcctgaactggagagcgccgtgagggagagcttcgcgacgtgggtcatgaaccccagcattgaggtgaaggacggcatatcgaatatgatatttgatctggtcgctaagaagttgattggcttcaaccccaccaagtcaagagaattgaggaaaaactttcaggagttcttccagggaatggtctctttccccatatattttccagggacatcattttaccgatgcatgcaggtatatttgtgtccaagtagctcaatgaggaaccaattttttgactttatcagagaaaactagatacttctcgaaatactaattaggagctgaccctttacctatgaaaaatgttctgattttgtcgcctcgaccttctgatgcttttctttgtagggcaggagaaacgtgcataaaacactgactgatttattaaaagagaggctaagtgcacctggggaaaaatataatgatcttattgaccaaattattgaagaactacagagtgaaaatccggtgatagatgtcaattttgctgtagatgtactttctgcactcttatttgccagttttgcaacactatcatcgaccttgtctgtcggttttaagtttctcaccgacaatccaaaagttgtcaaggagcttaaggtttgtcctttgtactcaacaaacattatattgttttttaaaactagactacctgcttgtttcattaggaaagttacagcaggagaggcacttacaggcacctgcttgttttgaaagcataccaaattctacaatcataatcaaatcaataacctaaactacaaatcagctacccaaagaaaatatatctgaaacattacaagtcaaacatttaaaatctcaattgtatgtaagaaacataggttccaaggttaaaatctttgaggtactacacttttttttttgttaaattctgttactttcagtatatcttcgatgtacctcaccttttaccgcaaacacctaaaaggtgaggtacctcccaatagctataaaaaatctcttgaacagtttatgtcaatcctgaggaaaaacatttttgctttggttgcacacatccgtcttcacgttagtgtgccaaaagcttaacttgacagtgaaagagtagccattaatttacgcgtcaataattatgtcattccaggaggagcatacaacgatcctgaacaaacgaggcagtctgaattctgggttcacttgggaagagtacaaatccttgatgttcacttcacaggttgtccacgaaattactcgaattagtaacgttgcacctggaattttcaggaaaaccctagcagatgtgaaagtgaaaggctatacaatcccagctgggtggctagtcatgattagccccatggcagttgatctaaacccaacattgtttgaagacccactcgaattcaatccatggaggtggacggacaagacaaagcagagtgagctactaaggaattacatgccatttggaggaggcataagactctgtctcggggcagagtttagcaagctttttattgcccttttcatccacgtcttggtgactgagtacagatggaaagagatcaaaggaggtgatgtactgcgcatctcagaggttatattcccacaaggctatcatatccaacttatccctcatacctaattaaaattgtgtcaagggaattgtacccaacactttcttgtgagcaatgtaaagcgttatgattgggtacagtcagtgagtttctgtgaatgcatttgtgtaataagcaagatcagcgacataacagagttgctagggtcggattacatccttaccacaacatcgactctgagcacccggctacctatgagtactaccttcattttatttgg

SEQ ID NO: 17132 - DNA, 1136 bp, Oryza sativa
  ref <308>: DATABASE ACCESSION NUMBER: AK067593
  ref <309>: DATABASE ENTRY DATE: 2001-12-06
gttctttttcttccttccttttactcgctcgctcgctcgctgggtgttcgtccatttgcccccaagccggagctgcgcgacacgagcagcaggagagagagagagagagaatgggcgaccgggcgtacgtgccggcatcgaagccggtgccggtggcggcggcgcgggcggcgaacggggtggcgaacggaggcggaagaggggttgggggtgggggagggggaggtgcggcgcgaccgccgcccatcggtgccagggcgcgtgctcctgccgccgatgtacaagcagaagccgatgcaagctccggctatgcggatgcggagcgatcgcggggtggtgctgcgcgttctgcctatggattacgcttgtggtggtggggcttggtgttctagaggtcatcgcggctgggggtgttctacgttgcgtaccacccgcagctctccaccttcgccgtcacgtctctccgcctcgccgcgctcaacgtgtccgactccgacgccgtcacctcccgcatcgagttcactgtcaccgctcgtaaccctaacgacaagatcgccttcgcgtacggcgacatcgcggccgcgttcgccgcggacggcgccgacgtcggcgacggcacggtccccgggttcgtccaccccgccggcaacaccaccgtcatcaaggtgcgacgcctccgccgccgccgccaccgtggacccgctggtggcgaacggcctcagatccaggaagtcgcacgccatgtcggtggagatggactccaaggttgggttcctgatcgtccgcttcaagtccaagcgtatcaacgtccgcgtcctctgcgccggcttcactgccgccctcgccaagaacaccccttccgctccaccgatcgtcgtcgccgccgccccgtcgccggtgaggtcggtcgtcaaggctctcttcttcctcttcgagcacgacggacgccaagtgtaagctccgggtcaagatctggatttggacattttgacggatttgacggtagagaagacttccttcttccttcttctacatgttttattcctctctcaatttcacaacatatatatctctctctcaacagtgatatgtggatttattggagtattgtttatttgattttcttttacctattt

SEQ ID NO: 17133 - DNA, 1853 bp, Oryza sativa
  ref <308>: DATABASE ACCESSION NUMBER: AK067594
  ref <309>: DATABASE ENTRY DATE: 2001-12-06
gactagtacatgcaaagctccctaccacggtgccacccccaccccaccccacccctgccgccgcctactgatcacaaattcacaactcaattctctccacacaaaaacacacacgtaactacttacgcttaatcagtgatcgatcgagctggagtagctagctgacaagaggaggtacgtgtcgccggcgatcgatcgtttgaccgacatggcggcgaaggggagcccggaggaggaggccctcctcgccggcgtcggaggtgatcatcagctggtggagtcggatgagttggcgccagctgcagcggtggtgcgggaggaggtgaagaagcagctgtggctggccgtcccgctcgtcgccggcgcgctgctgcagaacgtcatccagatgatctccgtgatgttcgtcggccacctcggcgagctccccctcgccggcgcctccatggccagctccttcgcctccgtcaccggcctcagcctcctgctaggaatggcaagcgcactggacaccctgtgcggccaggcgttcggctcccggcagtatcatctcctgggcgtctacaagcagcgcgccatgctgctgctcaccgccgtcagcgtcccgctcgtcgtcgtctggttctacaccggcgacatcctcgtcgcgttcgggcaggacgccgacatcgccgcggaggccggcgcgtacgcccggtggatgatcccggcgctgttcgcctacggcccgctgcagtgccacgtccggttcctgcagacgcagaacgtggtgctcccggtgatggcgagcgccggcgcggcggcgctgtgccacctggtcgtgtgctgggcgctcgtctacgccgccgggatgggcagcaagggcgcggcgctgagcaacgccgtgtcgtactggatcaatgtcgccatcctggcggtgtacgtgagggtgtcgagctcttgcaagaagacatggacggggttctccatggaagccttccatgacccgctcagcttcttcaggctcgccatcccttccgctctcatggtctgcttggagatgtggtcgtttgagctcattgtgcttctttcaggtattcttcccaacccgaagctagagacgtccgtgctatcaatcagcctcaacactgctgctttcgtttggatgatcccctttggcctcggttctgccataagcacccgtgtctccaacgagctcggagcgggccggccccgcgcggcccgcctcgccgtccgggtcgtcgtgttcatggccgtctcggagggattggtgatagggttggtgctggttggcgtgcgctacatctggggccatgcttacagcgacgaggaggaggttgtcacatacgtggccaagatgatgctggtcatcgcagtctccaacttcttcgacgggatacagtgtgtcctttcaggtgtggctagagggtgtggatggcaaaaaattggagcttgtgtaaaccttggcgcctactatatcgttggcatcccttcagcttacctcatagcttttgtcttacatgtcggcggaatgggtctatggctaggcatcatctgcggcctcttggtgcaagtcctgctactaatggcaataacactatgcacaaattgggataaagaggcggctaatgcgaaggacagggtcttcagttcttctcttccttcagatctcgcaacatgaagttagaggtgatagttgtgaaagcgtgcttgcagactacatgctattactaatcaggccgcattgatctagtttctcttggttgggtgtcgatcgtaaaatttagtatgctgatctggaagcttaaaacaacttgtgtatattgccacttttatatatatgctgccttgtg

SEQ ID NO: 17134 - DNA, 1205 bp, Oryza sativa
  misc_feature (509)..(509): "n"=any one base of a, t, c, or g
  ref <308>: DATABASE ACCESSION NUMBER: AK067595
  ref <309>: DATABASE ENTRY DATE: 2001-12-06
ggctcaccggaatgcggcggtgacgagacgaccaaccacctcctgcgactgctcggatctcgcgacgcggcggcggcggcgagatacggagatccggcagcttgaggcaagagagagagaaagccatggcgagcgacgtgcccatgagccccgagctggagcaggtggacggcgagatccaggacatcttccgcgcgctccagaatgggttccagaagatggacaagatcaaggactccaacaggcagtccaagcagctggaagatctcaccgggaagatgagggagtgcaagcgcttaatcaaagaatttgatcgtattctcaaagaggatgagaaaaagaactcggctgatgtcaacaagcagctaaatgataagaagcagctgatgatcaaagaattgaattcctatgtcacattgaggaaaacgtaccaaagcagcctgggtaataagaggattgaactatttgatactggtaatgatcaggtggccgaggacaacactgttcanatggcatcagaaatgtcaaatcaacaactcatggatgccggaaggaaacagatggaccaaacagatcaagttattgagcgttcgaaaaaggttgttgcacaaaccgttgaagttggatctcaaactgctgcagctctatcacaacaaacagaacaaatgaagagaattggcaatgagctagactcggttcacttttcactgaagaaggctagccaaatggtgaaagagattggtcgccaggttgcaactgacaaatgcatcatggcattcctatttctgatagtctgtggtgtgattgcaatcattgttgttaagattgtcaaccctcacaacaagaacatcagagacatcccaggactggcaccacctgcgcagaacaggaagctcttgtccatagaatctttcggaagcctctgagcattgcgagtgggaggcaaccgagatgtttgggagaagatactatgcacgtcgtgacaattcttttgcgcttgtatatcatctcatgtcgttattcccttccactgatctattcttttcttgctgtaattggtcattagtgttggatttacgtttgatggttgcagtgcggcttcctgttggctttatgaatgtgtgtatatgtggtagtgatgaggatacaaagatatttgttgttctttttattctgcaagtaatcacgtgaaggcttcagtttgc

SEQ ID NO: 17135 - DNA, 2449 bp, Oryza sativa
  ref <308>: DATABASE ACCESSION NUMBER: AK067596
  ref <309>: DATABASE ENTRY DATE: 2001-12-06
gagctctcccccttcccgccgcttcacgctcctctcccgccgattaccaccggcgcgccgccgccgtcgccgccgccgccccaactccatggaagagccaccactccttgcctccacctcacgcgccaccgcctccgtcgcctcctcctcctccgcaaactgccccgaccccatggacgagggaccctccgtgtcagttcccggcctgcccttcgccgagcagcttagggctgcggggcggggcgcgtccagcggctctccgggggggcccgaggcgcaggtccaggcgctcgcctcgatatcccgcgggatctacccgttggcgagggccgaggcgctccgcggccttgccgcggtcctcgagacggcggacgcccccggcggggttgtggagctgtgccacggatgcgcggtggggctgatgaaggacgaagacgagggcgtcaggttggcctccgtgcgattgctctatgtgcggataagttgaatacgagagaaggatcggatggaaatggcgataaccaaacagacattatgttccttcagcttagctccatggctagggacatgtgtacaaatgtaagaattgaagcattcaatgcacttggtaaaatgcagagagtttctgagggtgttttgcttcagtcactgtctaagaaggtcataaaacccaacactgggagtggttctatcatcaagggagaaaaagtacctcctaaattaatatatccctgcgctgccggcatttttgcgcatggtgcggacagctgcctgtaaatcattgggagcactttcaaaactctctgctcaatacgcacagaaagccctggacttattgatgggcatgatgaatgatgatacagaagcagttaggctgcagactttgcaggccttattccatatggcaacatatggatgtttgactgtgcaggagatgcacatgcatatgttccttggtttgttggttgacatgaatgcctcgatccgagatgcaacacgcaagatcctaggtttagtcaatctgcctaaacttcaaatgttcaaatctgcaatcgatgttctcattacaagtttggaaaaacatcaagaggaacaagaaatatacagtgttcttttttccgttggtaagaatcatgggaatttttcagccaatatagctaagcatttggccaaagagatcagtatgccatctgatggagagctgatcttggacaaacccaggataaaagcattgttaatagtgtctatctctgtagctttctctgatgataaacacaacaaacgggatatacctgaggttatcttttcacatgcaatttccctactgggaaagatctcttgtgcaataggagaagtagttgatcagaattcactcttatcctacttttgtcaaagaactggaattccattttgggaaacaaagttgccgtctagagaatctgaaggatgtagtgttgagacagtggctgacattcgtcctcggatagaaaaaactgtaaagtcaactaaatgtttagatgaagttctgacgatgcaatcagttaagtccataatagaaacagttgaaaggacttggactatcagaaagtcgtgcaatattcgtgatgttcgaaatattctaagaacatgcaaggaggaactaagaatattagcttcaaattcttctggatcaactggagcattcttgagctttttgtgtgagtatcttgatgcagtacaatttattgtagaaatattacgatcgtttcaattggataattcatatgaccttggcccaacttcacctgatattttactggagaagttagatacatctataagaaggatgaagtgttgttatgctggattcaataggggaatggagattcaagtctgtgagcttgctttgttggcgaatttatttggactttcaaaggttgggattcagtcgaaactagtgctggataagttgcattggatgattaatcgtttagattgtctgtgtgctgatggatcatgcgagctttcttacttcagcagagaaattaagaaagcctttgatgctaactttgttggccatgatattttcactttgctcgagctctttcatccaaaaccaacaacagattatggaatgctgaaaacaataagcgcggatttgcaatcaggacagattgtggctccgcatgattgttggtgagtctatccagcacaccttcttagagttgtccagttttggaggtaatgatgaggtgaagagctgctctacgattattcctttctatgctaccccaatggcatgctcgttcgttctgaggacatgtctggtaatggaatgcccatacggaagcgtcagcattcgtcaagaatgcaacagagggccaagtggttctataatcgaactctctgatgaattggatgtctattttgtctgtactaaacgaaggtgatgaatgaaactacagtgatg

SEQ ID NO: 17136 - DNA, 1938 bp, Oryza sativa
  ref <308>: DATABASE ACCESSION NUMBER: AK067597
  ref <309>: DATABASE ENTRY DATE: 2001-12-06
ctggaaccaaatttcccaaattcccagtaaaccccccgagcgaagcgaacgaaccaattctcctctcttcctccgcacggaacagcgccgcgccgcgactcgccgcgaagccatggcggcgcgcgctcgcctccgcctcgtcctgcccccgctcgcggcgctgctcctcttcgcgcacctcgccgccgtcgcggtggcgcggccgcggtgggaggaggagggcagcaacctccgcctgccgtcggagcgcgccgtggcggctggcgcggcggcggacgacgctgccgaggccgccgagggcaccaggtgggccgtcctcatcgccggctccaacggctactacaactaccgccaccaggcggatgtctgccatgcctaccagatcatgaagaggggcgggctcaaggacgagaacatcatcgtcttcatgtacgatgacatcgcgcacaacccggagaatccgaggcctggtgtcatcatcaaccatccccagggtggcgatgtctatgctggggtcccgaaggattacactgggaaggaggttaatgtcaaaaacttgtttgctgttctgctcggtaacaaaactgctgtcaaaggtgggagtggcaaagtcctggacagtggccccaacgatcatattttcattttttacagtgaccatgggggtcctggtgtccttgggatgccaacctatccatacctctacggtgatgatcttgtagatgttctgaagaagaagcatgctgctgggacgtacaaaagcctggtcttttaccttgaagcctgtgaatctggaagcatctttgagggtctattgccaaatggcatcaatgtttatgccaccactgcatcaaacgctgatgagagcagctggggaacatactgccctggggagtacccgagcccacctccggagtacgacacatgcctaggggacttgtacagcgttgcttggatggaagacagcgatgtccacaacctgagaactgaatcactcaagcagcagtacaatctcgtcaaggaaaggacatctgtgcagcacacatattactctgggtcacatgtgatggaatacggttctttagagctgaatgcccatcatgtgttcatgtacatgggttccaatccggctaacgacaatgctacatttgtggaagataactcgttgccatcgttctcaagggctgttaatcagcgggatgctgacctggtttacttctggcagaagtaccgcaaattgcctgagagttctcctgagaaaaacgaagctcggaagcaattgcttgaaatgatggcacacagatctcatgttgacaacagtgttgagctgatcggaaaccttctctttggctctgaggaaggcccaagggttctaaaggctgttcgtgcaactggcgaacctcttgttgatgactggagttgtctcaagtctatggtacgcactttcgaagcacaatgcggctcgctagcgcagtatggaatgaagcatatgcgttcctttgcaaacatctgcaatgctggcatctctgctgaagcgatggcaaaggttgctgcgcaggcttgcaccagcattccctccaacccctggagttccacccataggggttttagtgcttaaatcataggtgaagaaaacttagcaaatattctcagctcctgcaatatacccaagttatctttttctcttgcccctgtagtttgatgatcgattgggggcagtagtgcttgaaccgtaggtgaagtctgaagaactgtgcattatttcagatgctccaccatcccaaatcatctaaattgttctcgttctctggtgtacataccatagcaggaaaattgatatggcaatattacctgccatcattgctgtacatacttatagcttgctatatgtagtttgtagctacatatataatatgataaatgcattgctgctatttt

SEQ ID NO: 17137 - DNA, 1195 bp, Oryza sativa
  ref <308>: DATABASE ACCESSION NUMBER: AK067598
  ref <309>: DATABASE ENTRY DATE: 2001-12-06
ggattccacagctgccaacgcaacgccgacgagaaatccggcgaaccccaccacggccatggattcgccgcctccgccggaaactcgagcgccgcggcggcggcggcggcggcgggcgggtaggagcccacgaggaggggatattgccggtggcggcgcttccttcaccctctcggttgcgtatttgtgctcgcgttcttatctcggccatcgccgtcgccgtcgccgtcgccgccgcggccagatcccctttcccagggaagcgcggagtagagtacatagccagccggccagccagccagccagccatgcagtggcatggattgatgaccagtcttcagaaattccaaccactagccaaacgcatctacgacccacggcacaaacaccgggacgtgtgcctgcagattgcggtgccggcggcggcggcggcgatctggttcgcaccgtcgactgggcttcgattcttcgtcggcctaattcagattggaatctcatcagatacttcatgtggttcctgtgcttgaagccaagtgctggttcttcattggcatccatcgaggattggatgtgcggaaattaggcagacattgctgattgctctctgacgacagcgcgttcgttatgcttcaccacacttctcgatggtttcgagtaccattcatctcaaagtactgtggtcaaggtgccggaaagagagtggggcttcccggacaatcggaacagtccatttatatgggcgagtgattcgtttgaacgattgcgttcgggaagtttgtgtggagatacgttgcggttggatggtgaaggcgcgaacatccgcaagctcttgtccaccctccggaataaggtgggccgcgcccagttggtgcaggtcgaggataagagaaaaagggtagaggaggcgacgaagccttgtgaatttcacgaggtcaaaacaatatgcatccttggattgcctggcgcaggcaaaacaactcttgcaaaactgttgtactcccatcactcaacgacagagcagcaattccaacaccgggctttcgtgtcactctctccgggtgccaatctcaccgacactcttactgatattttattgcaagtaggagcatataatgatgatgcaacaccatattgtgggaccggaacaccgcaccaacagtatctcattgacaatatatcagcttatctcattggc

SEQ ID NO: 17138 - DNA, 820 bp, Oryza sativa
  ref <308>: DATABASE ACCESSION NUMBER: AK067599
  ref <309>: DATABASE ENTRY DATE: 2001-12-06
gtgccggcgtcgagccgtcgggagggaaaaaaacatctctagctctccttcgcggcgccgccgatggctgccgtcgcgcggatggccgccgcggtcgtctgccttccctcctcgtcctcatcctcctccgcgtgccgcgcggcgccattgccgtggtcccgcggcgtcgtcgtcggggtgaggcggcggcgcacggtggcgcgggcggcgcggcggagggggaggaggcccggccgccgcggcctcgtcatcgtggacgagttcgccgggcagtacgaggaggggttcgaagacgtgcacacggaaatcatgaattacttcacttacaaggccacaagcacggtgctccaccagttgtatgaaatgaatccacctgcttatacttggctgtataactacgtcgtggttaacgatccaaaggagggcaaacatttcctcatcgcactcgcaaaggagaggcaagatttggcagagagagtgatgatcacacgactccacttgtacagcaaatggatcaagaaatgtgaccatgcaaaaatgtacgagaagatttcgaatgagaatctggagataatgcgtcagaggttaatggaaactgtagcgtggccaacggacgacacaaacaccagcgacacggcgaaatgaacgatcgattcatggcagcaaacttgaaactcatgttgagtatgacagatccactcaataatgtactttacgaatattccttgcaggttttgagttaatcatttgtgtatataagtagccctgcatgaatagaacaatcgatgtatattctcctagtaaaaagaacagttggtgt

SEQ ID NO: 17139 - DNA, 1635 bp, Oryza sativa
  ref <308>: DATABASE ACCESSION NUMBER: AK067600
  ref <309>: DATABASE ENTRY DATE: 2001-12-06
gaggggccatgaactttcacactcctctctctctctctctctctctctctctcttccagctgagtgagctgcttgcacgccgccttcctgctcgtcgcctttcgccgccgccatctctctctactctactctaatgcctcggcgcctttactagttaattagttcttctttagcatcgtaccataatctgcccacacggctacagactcttgattggtttgagattgagctattgggttggttcttggcaagagaaggcaaggccaagaaaggtggcaggttcttgtcaatctccaaattttcccattaaatttgcgatttcttccccactcctccccgtcagaaccgaggttttaccaggagtgcttcagcatttggggtgtggagttattgcaaagcaacctcgattcctgcaccggttcctcgatttgatgctgaagaaattgagcaaagctggtcttcgttttggtaaaacccccagctttctcagggcggaacagtagaagaaaaagattggaggagaggagaggagaggaagggttggttttgggaggatgattcagctgctgttcttggtggtgttggcggaggcggcggtggcgctgctgctgatggtgaaggtggggccgctgcgggaggtggcgatgcgcggcgtggagcaggcgaagacggggaagggcccggcgacggtgaagacgctggcctgcacgctctcggtgatcctcatgtccagcgtcgccagcatcctcaagatccagaacaggggcctcaagctcggcaccgtcagccccatggaccaggtgctatggcggactcacctcctcgaggcctccctcatcggatttactctattccttgcatttgtcattgaccggttgcaccactacctccgaaaactgattacactgaggaaagcagccaacacatcaagagaggaggtcgagaaacttcaaatggagaaccggttattccgtgaaaaggaggagaaatcttccagtgaaatcaagaagctccaccaggagattgctaagctaaacgagagtatgaagaagctgaaatcggagtctgaagatcacgagaggaaggtgttggaagcggaggcccatgtgaacgccctacagaagcagtcggaggagcttctcctggagtacgacaggttgctggaagacaaccagattctacaatctcagcttcactacaaaggctgaaacagttaacctggggcatgcaactcaaagtgctcgttaccaagactcgtagacttaccaaatgtcagtgcagagcgaaggtattggtgaatgtgatgcttggaatccttgctctaacttgtggtgttgggttgatgtactagtgtgtgcatttgtagttttgaggagtataaaagccagggatgatatatggtgaaatggttatgaatctggtatcagttcatgtcgccatgcagggttgttgatctgaaaactgaattgaacttgtgggctgcggccatgcctctattcaggccttgatctgaaaatctgaaaaggaggaaagtttcctactgaaatgaatgctctgttagctttgctaaaaccgggctaggatggatcgttttatttgtgtgaataacttagaatatattctggtttactgtgc

SEQ ID NO: 17140 - DNA, 1009 bp, Oryza sativa
  ref <308>: DATABASE ACCESSION NUMBER: AK067601
  ref <309>: DATABASE ENTRY DATE: 2001-12-06
gctccttccctttcctcctccattccaaccttccaacccaacaacctcaaccctcctccctcagtatccccccaagaacgcgaggagccgagtccgtactaggcccaggtcatcttttgttgtagaggcgatgcagacggcggcggcggcggcggtggcgtgggcgccgagcccatcgccgtccacctccacctcatcgccgccccccttcaaggtggggatcgcgtcgccgtgtgggacggctgctcacgcctcctccgcgccgaggttggttgctgcggccactcaccgggggcggcggcggcagcagcaagtggttaaggctattgccaacccagacccagcagttgagctgccattgacagctgaaaatgttgagattgtattggatgaagttcgaccataccttatggcagacggaggaaatgttgcattgcatgaaattgatgggaatgtggtgaggttgaagctgcaaggagcatgtggatcatgcccagcttcagtaacaacaatgaagatgggtattgagcgacgcttgatggagaaaattcctgaaattgttgctgtcgagcccattgctgatgaggagactggccttgagttgaaccaggagaatattgaaaaggtactcgatgagattaggccatacctttctggcacaggaggtggtgagcttgaattcgttgcgatcgaggaacctatcgtcaaggttaggcttacgggcccagctgctggtgtgatgacagttcgcgttgccctaactcagaagctcagagaaaagatacctaaaatcgcagctgtccagctattgtcgtaagcctgaaaacatttagaaaacaacccctgcaatgtaaatgtgccgctacaataatcgccaggaaagattgtaatgggcttaaagctttgtaacctgttactctattctacttgaactacgaatagtgatcatcaatatgaaatgttgtaagggtgttcctactggatttatttacaaaaggttttgggcttc

SEQ ID NO: 17141 - DNA, 2105 bp, Oryza sativa
  ref <308>: DATABASE ACCESSION NUMBER: AK067602
  ref <309>: DATABASE ENTRY DATE: 2001-12-06
ggccgccgcctcatccgctctgcttctgctcgcatggggaaggagaaggggaaggggaagtggaagaggcccccgaccgtgaagccgccggtgatggccgcctccgcctccgacgacgacgagatcgacgccttccacaagcaccgcgacatgatccccctccacgaccacgatatggagtctgaggatgacctggaacaccccgtcttcgatctcgagggtatttctgagaatgaaactgatgacagcgagggagatgaggatggcaacatggacaaagctgcttatgatgaatgggatgacaaatttatcgcaaaattaaaaagagcagagagggcagtgaaacaaattgctggaggtgatgacagcatggatgaacatgaggatgatcataaggataaaaattcctggggtagaggaaaaaatgcatattatgatgctggtgaacagtctggtgatgatgaggatgactatgaagaggcacggaggatccagaaagaggaggagagcaagctatcaatgcaagattttggattagaagatggtgaaagtgatgaagaggatagagccattaaggcatccaaccatcaagtcaaagttcctgatggtgaacactcttttgaaacctatgtgaaaatgaaagaggagtttgctgtcttgtcaagagatgagaagatgggtgtgctagacagttctgctcctgaactggttggattgttgtccgagctaaaagatgcccatgaagaactaatggcgataggaccagtcaccaatgaggtgacagctgggcaaagcaaggataagggtaaaatgcagcctttggaagtgaaacgagcttgcctagctgcttattgtcaggctataaccttctacctccttatgaaagctgagggattgtctgtgcaggatcatcctgtaattgctcgtcttgtagagatcaagagtgtagtagaaaagatgaaacatgccaatgtaaactttccaagacaaaaagaggacagtgatgactattgtatgcctgatagcaatatcatggatgtggcagacatgatttctttggacaagaagaatatatatagcaatttactactacgagacaaaggtgtggaagttgcagagttgacaaagaatgaccactctaacaaggatcaccatgaaattgccaaaagaaagggcaaggatgagcatattggttcgcaaagccttgaaatgttgaaggtgagagcaacccttgaagagaggttaaaagaaaaagggctctataatttgacgcgattgaaacgtaagaaggtttcaaacaccaggacaactaatagaagtgacctgcaaacgttggatgattttgatgatgaagtgctgaaaaatactcaagccatcaaacctagtaaggtcctggtagctgcggcaaaatccaataaaaacaagtttgtctctggtgatgacgagcttccaaagcgagatgatattggtgaaagacgacgaaagcacgaattacgtgttcttgcaagagtaggagctagtacacttgaagatgatgacttgccagaggaagatgatcatactgaagagagacctaatcaattaagtgaagaaaatggcagtgatgatgacattggaccatcagagtctgaagatgagttttacaaggatgttaaaaggcggaggactgaaaagctctcgagtaaagaacagaaatactcgccgaaccctgttattgaatcactggaggaagaaactgaaggagatggcaagaggaagatctcataccagatggagaagaaccgggggttgactcgctcgagaaataagaagcttaagaatccacggaagaaatacagggttaagcatcaaacaaaacttgttaagcggggaggtcaagtgcgtggcgtgaagaagccctcaggaccatacggaggtgaaatgtctggtattaatccaaatgtgagccgtagtgttaggttcaagggctgatgtatcgaattgattacgcccaacatggaaatttttgtttgatggtaggaagtttcatggttgtaatttgccagtaacagttttgcctagagagagagagagagcatgcatggattgtctttcgattttgtacc

SEQ ID NO: 17142 - DNA, 2072 bp, Oryza sativa
  ref <308>: DATABASE ACCESSION NUMBER: AK067603
  ref <309>: DATABASE ENTRY DATE: 2001-12-06
aaaaccactccattcattgcatgaatgaagaaagaacagctagtggtatggtaacagtagtaatggcagcagttagccacagcaactgctccccctcctctgcttgctgctgccactactgccctgccctccttgagttgggtgagtgagtgacagtagtgtgtgtggtgtagtggtaggagaggaggagtatctcttgtatggctgtggcctgtagtaggctgtagccccaaacctcttgtctccttttcccctcctctctctcccccactctacttcagttctttgcttgtttgctagcttctctcattgcctctcttgttgcttgatgcttttagggagagtagagtggtgtagtgtagtgttgaatcctcctccacatcttggaacttcttcttcttcttcttcttcttcttcttcttcttcaaagtcttcaaaggcttatcttgggtgaagaagcacctgaagcttccatcatttttgctttaatggtggtggtcttggggaaacttctgaagaaatctccgggggaaagattgctgctttgctgctggtttcgcggcaaatcttgattgattgcgttggaagaggtcggcttcgtgaaggaatcttgcttgcgggatcaatcgcctccgctcgcttgcttgctttttgggcggttcttggtgctgctttattggggtgaaaggttgggggatctcgcggccactcgaggtagcgagcgatctccccgcggcttctcctcgttgccggcattgcgggggaggcgagctcgccgccgggtcgcttgttgatgcggtgaggcggcggagcggagcttctcgctgtgctgctgctgcggcggccgccaggtgttcggtgaaaggcgcgagcaagcgagcatgagggacttcccttcctgcttcggggagagcggcgtccagatcgcggacgcgtcgtcgtcgtcgtcgagcgccggaaagggcgcggcgcagaatctggtgacctgcctctaccaggcgcagttctcgggccggccatgcctgatctcggtgacctggagcaagagcctcatggggcaagggctcagcattggcgtggacgatctgtccaaccagtgcctgtgcaaggcagacatcaagccatggctcttctccaagaagaagggctccaagaggcttgacgtcgaggacggcaagattgagatcttctgggacctgtccggtgccaagtttggtgctgggccagagccaatggaagggttctatgtcgccgtggtgtttgaccttgagctgatactcctgctcggcgacatgaagaaggatgcataccggaagaccggcgcaaaccggccgatgctgaatgctgcatttgtggctaggagggagcacatatatgggaagaagatttacactgccaaggcacaattctgtgaaaatggtcaattccatgatgttgtgatagagtgtgacaccgtcagcctcaaggatccatgtcttgagatacgggtcgacaagaagcccgtcatgcaggtgaagcgtctggcttggaaatttaggggaaaccagacaattcttgtggatggtttgcccgtggaggtgttctgggatgtccacagttggctgtttggattgacgacaagcaatgcggtgttcatgtttcagacatgccaagcacctgagaagtcgatgccttggtcatactcgcaggtttttagggagtctcagttgcagggtcttggtttctcgctgatcctatatgcatggaagcttgaataggttcttgcagaatcataatttgcttctgcaattgcctccgttttagtgctaacgggatgtttattgagtgtcaattcttggaaatgttatggaggctctccaatatatgttctttcaatttttcttggttttgccatcttttataaacactgtttgaatagtttggcaggattctgtgacaatcctgtgattctcaaattcccttccttttgctcctaatgctctcaatagtttactgtggcaatgctccaagaaagaatgttgtcatgatgtaaagtacttcaaagttcggatatagattatttgttaatagcg

SEQ ID NO: 17143 - DNA, 2098 bp, Oryza sativa
  ref <308>: DATABASE ACCESSION NUMBER: AK067604
  ref <309>: DATABASE ENTRY DATE: 2001-12-06
gatccgagcctctgcacgccgcatcctctccgccgacgaggacaccggcccggagccccacctggccaccaccactcgccaccttcgccgcctcaactgccggccgtccagtcctcggggatgcggcagtgtgtgtggcggcccggtggctgtgctatggcggccaaaatcgaaatcaaccgccggatttcctgcgctccaccgcacggcggcctgacggtggctgctcatccttcgcgccgagctattccgccgccgggcaacaaattccggtggtgtccgtgtccgtttcagtttgcgttggctaacttcaggtatatgaaggtataccttgtgcctctcacttcatcaaatgttccaactcggcaagttttcaagcagacgacgaatttcacctttcaagtggggatcgatctgttccaatggcggcctgtagcatagccaggattataaacttaggggatctagcaaaatgtcccaaaaatttgtgctgcctactcttcagagttgtgtccaagttcctagccctttctcccagtttactgaaggaagtggaaaaagatgatggtgatcagccatcaatgacagagagtgtcatggcaaatttaccagagctgcatcaggacatcttaatggagatatttgccctcctggagatccctgacctcgtgcgcgcagggtcggtttgtaactcctggcgctccgcctacaatggaatgcgcagcctaggtatctataaattgtcccagacaccgtgcctgctctacacctctgaatctgctggcgatagcgtcgtgtctctctacagtcttgtcgagaagagggagtacaagattactctaccagagccacccgtgcgtagtaggtttctgatcgggtcctcactgggctgtctggttactgttgatgacgtatccgagatgcacctggtcaatccgattacaggggaacaaatagctctcccttctgttatcacaatcgagcatgtgaatcccatcttcaatgagtccggtgctatccacatgtatgagtactcatggtacagtgcatcgagggtttatcattctgagccatcaattttctcccttgacgagctgcgagaataccttcttgataaggcttttgtgttttctgatacatccacagaaaattacctcgtggtactaattcacaatccgcattcgcaactttcgtttgcaagggttggggatgataagtggacctggcttccaccacacactcactatgctgactgcatctacaaggatggcatattgtatgcagtgaataaagtgggagaaatccatgcattcgatctcagtggccctgtggtcacaatgaagacgataattgaaatggtgccaggatatgcttgtgataagatgtacattgtgcaagctccatggggtgatcttctgcaagtttggaggtcatatgagtacattgagggggattacgaggctgacttgcatgatgctgaccctgcaatatctgtggagaatactgcggaaattaaaatatttgttgttgacactgtggaaaaaaagcgtgtggagatcgaaaacctggatggtcacgtgctatttcttgggcataaccaatcactttgtctcagcacagaacaatatccacatctcaaggaaaattatacatattttactgatgacaacgatctttcgttatttggacacaagaataatcgtcgtgatattggattatttgatttgaaacataacagcagggaggaacttgtgtctcctcagctttggtccaactttcctgctcctgtatggattacacctagtttcacaaagttgaacttcgcctagaagaagcacctttaaggctagttttttatttatggatattagagttgtgtatgtttcttcttgttctgtgcaatttatatgtaaaattatgattggagaactaaagtgtgaatgtgaaggttaagttgcttcatatttgttttgtaccaacctttatatgtttatttaaatttctgctatgtgaaagtctaaacaacaggtcttgtgcggtagccacttgaggggaattagtgaaatatacaaggctaatgtgaccaatgttattttgg

SEQ ID NO: 17144 - DNA, 1556 bp, Oryza sativa
  ref <308>: DATABASE ACCESSION NUMBER: AK067605
  ref <309>: DATABASE ENTRY DATE: 2001-12-06
ggcatccgcacccggatctgccaccgccgcggcttccctccccccctcctcccgatccacccctcccgccgccgccaccgccaccgccgccgccgccggccggcgagagagacaggatgtacgggtgggagatgctctcgttcaacatccacgacggcttcctggaggccatcgtgcgggggaaccggtcgggcctcctcaccgccgccgactacaacaacctctgccagtgcgagaacctcgacgacgtcaagatgcacctcaccgccaccgagtacggcccctacctccagaacgaaccttcacccctgcacacaactacaattgtggagaagtgcactcttaaactggttgatgagtacaaacacatgatgtgccaggcgactgaaccactatccacattcttacagtatataacgtatggccacatgatcgacaatgttgtacttattgttaccggaacattgcatgagagagatgttaatgaactattggagaaatgccatccattgggaatgtttgacagcattgcatctcttgcagttgctcaaaatatgcgcgagctttacagattggttttggttgacacaccgttagccccatacttctcagaatgcattacatctgaggatttggatgacatgaatatcgagattatgaggaacactctttacaaagcataccttgaggacttttacaaattctgtgaaaaacttggtggtgcaactgctgagattatgtgcgatcttctgtcatttgaagcagacagaagagctgtgaacattacaataaacagtattggtacagagttgactagagatgaccgtcggaagctgtactccaactttggtttattgtatccatatggtcatgaagaactggctgtttgtgaagatgttgatcaggtccgtggtgtaatggagaagtaccctccataccaggctatttttgccaaaatttcgtatggggaaagccaaatgttggataaggccttctatgaggaggaagtgcggaggctgtgcttgtcatttgaacagcagttccactatgctgttttctttgcttacataaggctacgggagcaggagattaggaacttgatgtggatatcagagtgtgttgcgcagaatcagaagaacagggtccacgacagcgttgtgttcatcttttgacctgctcctgccactccacggatggttgtacaaaatgccaggtttgatgatggcacaatcggctgcgataattataagcacatgacttattatgccccattcatttctctttctgctctgctcgaaagcaagaccatgagtgaatgtactattgttttactttttgtagtaaaataaaggcttgattatcttgtggtaaattgaataaatcctgtctattttgggaggctgtaactatcaatatctagtgaacatggaacagtttgttggcttattgccaacatccaaattgcgcccaactctgttttggtgcatcaggttctgttctaattttctacttatgtaacctgacggagtataaagagagaatgtttctcttttttg

SEQ ID NO: 17145 - DNA, 2601 bp, Oryza sativa
  ref <308>: DATABASE ACCESSION NUMBER: AK067606
  ref <309>: DATABASE ENTRY DATE: 2001-12-06
gggtcccgcccaatctccacgcgacgcgatgcccatcacaccacacgcccccgcgcccgcgcccgcgacgccgcgacgccgccgccaccaccaccgctccgcccgccgcaccacccaccgatggccgccgcgctcgtcacctccttcccgcacgcgatccccaagccgcaccaccacctccacgccgcacaccacgcccacctcaccgctgccgccacgaggcccgaggcccccagcgcgtcgtcccccaacccggccaacgccaggctccgccgcctcatcgcccgcgacgacctcgccgaggccgcgcgcctcgtcgaccgcgccacctcccgcggggaggcccccgacgtgtacctgtgcaccaagctcatccgcaacctatgccgccggggccgcacctccgacgccgcgcgcgtcctccgcgcggccgagaggtccggcaccgccgtcgacgtcttcgcctacaacacgctcgtcgcggggtactgccggtacggccagctcgacgccgcgcgccggctcatcgcgtccatgcccgtcgcgcccgacgcgtacacgtacacgccgatcatccgggggctctgcgaccgtgggagggtcggcgaggcgctcagcctgctcgacgatatgctccaccggggctgccagcccagcgtggtgacctacacagttctcctggaggccgtatgcaagagtactgggttcgggcaggcaatggaggtcctcgatgagatgcgtgccaaggggtgcacgcccaacattgtcacctacaatgtcatcatcaacggaatgtgcagggagggccgcgtcgacgatgcgagggagttcttgaacaggttgtcctcgtatggcttccaacccgacactgtcagctacaccactgtgcttaagggtttgtgtgctgctaagcggtgggaggatgttgaggagctctttgctgagatgatggagaagaattgcatgccgaatgaggtaacattcgacatgttagtcagattcttttgtcgtggaggtatggtggagcgggcaatccaagttcttgagcaaatgtccggacatggatgcgcagccaacactaccttgtgtaacattgtcataaacactatctgtaaacaaggacgtgttgatgatgcctttcagttcttgaacaacatgggttcctatggatgcagtccagataccatcagctatacaactgtgctaaagggcttgtgtcgcgctgagcgatgggaggatgccaaagagctcttgaaagagatggtccggaagaattgtcccccaaatgaggtgacattcaatacattcatctgcatcttatgccaaaaaggattgatcgagcaagctactatgcttatcgaacaaatgtcagagcatggatgtgaagtgaatattgtcacatacaacgccctcgttaatggcttttgtgtgcaagggcgcgttgatagcgctcttgagttattttacagcatgccttacaagcccaacaccattacatacactaccttgctaacaggtttgtgcaatgccgagcggttggatgctgctgcagaactcttagctgagatgctccagaaagattgcgcaccaaatgtagtgactttcaatgtacttgtgagtttcttctgtcaaaaaggattaatggatgaagcaattgaacttgtagaacagatgatggagcacggttgcacccctaacctgattacatacaatactttactcgatgggataaccaaggattgcaactcagaagaagctctggagctattgcatggtttggtcagcaatggggtatccccagatatagttacctattcttcaatcattggtgtcctctcaagagaagatagagtagaagaagcaatcaaaatgttccatattgtgcaagatttggggatgagacctaaagcagtgatatacaacaagatactacttgcactctgtaaaagatgtaatacagatggtgccattgattttttcgcttatatggtgtctaatggttgcatgcccaatgagttgacctacattacactcattgaaggccttgcaaatgaggatttcttgaaggagacaagagatttactgcgcgagttgtgctcaagaggtgttctaaataaaaacttgcttgaagagtggcgccctaagttttcgaatcaaaccgtgcatttaccttgagtcatcatgaatccaaaacctttagtactgttgagtatccatggaactctattcctcatctacagtaatgtggaatcagtggcacactggcatgtcctgtgtatgcttcaagatacttttcatgatgatgggacagaccacagacgagggctcctagcctcatgtacaggaatcgtgattgtgttttccttgcttcagactggcgtttcataccgattaccttacatcaaactgacatctcaaattactgcgttataatttcatttcggttgcaacttcttgctttgccaggctgatacaatcatgccacatgcatcatcgagcatttgcatgttggtgactattgggcacagagacgcaataatccattttgggaacaagtcaatggcctggcaaagggaagcagtttcagttgtaccaaggttc

SEQ ID NO: 17146 - DNA, 2143 bp, Oryza sativa
  ref <308>: DATABASE ACCESSION NUMBER: AK067607
  ref <309>: DATABASE ENTRY DATE: 2001-12-06
ggcttgtccctcccattcctcgccgccaccgccgccgccgcgccgaaaccctagggcggcagcgtagggttcccctccccccccctcctccgccccgatgacgccggtgcaggcgggggcggcgcccgcgtcgccgtcggcggcggcggcgctcgggttcctcctcccgacctgctgggagatcgaggtcacctgcgccgccgcgatgatcctcgtcgcgctctacgccgcgtacgagctgctcgccccgcgccccgcgtcggcggctgggggatcctccgccgccggggacgacctcctcctcgtgcgggacctcgacggcgccgacaagtacaagggtggctcgagtgggccctcggcgtacatggtgaagctagagttgttggctgcgaagaatttgattgcggcaaacttaaatgggacctcggacccctacgcattgatcacttgcggcgaagagaagcgtttcagttccatggttcctggctcaagaaacccaatgtggggagaggaattcaatttttttgttgacagtcttcctgtaaagataaatgtgacaatatatgactgggacattgtatggaaaagtactgttcttggttctgttattgttccagttgaatccgagggacagagtggaccagtttggtatacgcttgatagtacatcaggccaggtgtgcctacatattaaggcaatcaaggtccatgagagttcatcgagggctctaaatagctctgctgaggctggtgctcgtagaagaatttccttggataaacaaggacccactgtagttcatcaaaaaccaagtcatttgcagacgatatttggacttcctccagatgaggttgttgaacatagttattcatgtgcacttgagaggtcatttctgtatcacgggcgcatgtatgtctcttcatggcacatttgcttccattcaaacgtcttctctaagcagatcaaggttatgcttccgttgagggatattgatgagataagaagaagccagcatgcagttattaatccagcaatcacgatatttcttcgaatgggagctggaggacatggggttcctcccttaggaagtcccgatggaagagtcagatataaatttgcatcattttggaatagaaaccatacatttagagcattgcaacgagctgtcaagaacttccatacaatgatagaggctgagaaacaggaacgtgctcaatctgcattacgtgcacacagtagctcaagaaaaagtagcatgaaggagataaatgttccagaagattgtgctgatttaacaggccaattacaaccttttgtcaaagaggaagttctagtcactgtattcaatggatcttttccatgtactgcagaggagttctttaatactctgttaagtgatgattcaagttacatcacggaatttcggacagctcgaaaggataaagatatcaatttaggtcaatggcaccacgctgatgagtatgatggtcaggtgagggaacttaattgcaaatcaatatgccatagtccaatgtgccccccatattcagcaatgacagagtggcaacatatggttctttcagctgacaaaacagatctggtatttgaaactgtacagcaagtacatggtgttccatttggttccttctttgaggtacactgtagatggtctgtgaagactaccagttctgactcatgcagtcttaacattagtgctggtgcacatttcaagaaatggtgcataatgcagtcgaagataaagagtggtgctgtggacgagtacgagaaggaagtccaggagatgttggaatttgcagagtcgtatatgcgcaaagttagaacttctagccaagacaatggtacacctactgagcaagacaacggcgctgtgactgagcaagaaaatgtggcgccggataatacaccaaatgatgaataatttttctctaagttatgtcttctcctgtaggatgacatctaccacccgttgatagtagtttgttgaagtgttatagcagaagaacaggtggacctgtaattataatccacatgtaatagggtttagccggaaaaagggggtgcttacaagatctaacagtgtataaattgtctatacattttggctaatgtatatttgaaaacgcat

SEQ ID NO: 17147 - DNA, 1559 bp, Oryza sativa
  ref <308>: DATABASE ACCESSION NUMBER: AK067608
  ref <309>: DATABASE ENTRY DATE: 2001-12-06
gctctctctctctctgactcttgactctctttcgctgtgcctgtgagcaacgctgttctcctccctccggcctccggcctccgctctccgcctcgcctcgccgcccgatccgcgcgtgccttctcctcctcccccttcgttgcgtgctcggcctccgcacccaccctccgcttcgatcagccgcagcccgactcccccctgcttccccgcctactccgcgccgcccgcctttggcgctcgccgccgcggtcgcccccttccgcggctcgtcgctgggttctcgtccagcacgcgggtgccggttgcttcttcttcttcctcctcatccggtcgccgcgtcaccagggttagtgcatggcagtgacaccgcatcatcggctatatgaatttgctaagactgcccttatcaagattttcgcattcccttatgccacggtctgtgacctgtattgtgatggtggggttgatacagacaagtggggcgatgcacaaattggtcactacatagggattgatgcctctgcatcaggtgtcaatgatgctcgtgagctgtgggagagcagaaagaaacttttcacgtctgagttcatcgagttagatccttctgctgatgactttgaagctcaaatgcaagaaaagggcatccaagcagatatagtttgttgtatgcagcatttgcagttatgtttcgagagtgaggaacatgctcaaaagcttctgaataatgtatcatctttactcaaacctggaggctattttgttggcataattcctgattcatctacaatatggacaaaatatcaaaagaatgtcgaggcttcacataataagggtctgaagactgttccaaatagcattcgctcagagaactatgtcatcacctttgaagttgaggaagaaaagtttcctttctttggaaaaaagtaccaactcaaatttgcaaatgaatcaatgttcgagaatcactgcctggtccactttcccagctttatgagattagcaagggaggcaggacttgaatatgtagagatccagaatttaaccgagttttacgatgataacagaactcagtttgctccattgcttggtggttatggttccagtttggtggatccgcgtggaaagcttgtcgctcgttcgtttgatattttaggcttgtattcaacttttgttttccagaagcctgacccagatgcaatgccaccaattgtaacacccgaattacatgatcctgagaatgatcaagaagaggaatggctctggacgcagcaggcatcaatggacgatggaagggtctcacgtactgatatacttcctcctgcggataatgagaaaggcatccttggtcctggacctgcagatatgaggctttaagttcactgaacaactggatataggctcactgctggagttggagcaacgatgctcctgcaaagctgcaattggtggtttatggatgcatacatatgcatgatgctcacgtagtttctaaatttatttaggctctacctgtaaaaagaaaacctttcagttattcttgagaagatagaattagcacc

SEQ ID NO: 17148 - DNA, 2819 bp, Oryza sativa
  ref <308>: DATABASE ACCESSION NUMBER: AK067609
  ref <309>: DATABASE ENTRY DATE: 2001-12-06
gctcctcctcgatctcccagatccaaaccgaacccaaccaagcggccgcggcgctctaaaacctctcccgctccacgcgcggggcgcatgaaaccctagcgagaggcgccagatctcccgcatccggatcgccgccatggccgccgccaccgcgctggactcgctgccggcgccgctccggtcgctgcggctgaagacgaagcagcaggagctcctgctccgggtctcggcgctggcgctcatctacgtgctcgcgttcgtcgtccgcctcttctccgtgctccgctacgagtccatgatccacgagttcgatccctacttcaactaccgcaccacgctcttcctctccgaccatggattcagcgagttctggaactggttcgatttcgagagctggtacccgctcggccgcgtcgtcggcggcaccctcttcccgggcctcatggtcaccgccgcgctgctccaccgcctcctccgcgcgctctccctcgccgtccacatccgcgaggtctgcgtcctcaccgcccccttcttcgccgccaacaccacgctcgtcgcctacgccttcggccgcgagatctgggactccggcgcgggcctcgtcgccgccgcgctcatcgccgtctgccccggctacatctcccgctccgtcgcgggctcctacgacaacgagggcgtcgccatcttcgcgctgctgctcaccttctacctcttcgtgcgcgccgtcaacacgggatctctcgcatggtcgctcgcctcggcgttcggctacttctacatggtctccgcgtggggaggctatgtcttcatcatcaatctgttgccgctgtacgtgctcgtgctgctcgtcacggggaggtactcgcagaggctctacgtggcctacaattccacgtatgtgcttggaatgctacttgcgatgcagatccggttcgttgggttccaacacgtccagtctggggagcacatggccgctatgggagtattcttccttttgcaggttttctttttcttgggctgggtgaagtacctgctgaatgatgccaaactattcaagtcattcctgagaatcaccctgacatgtgtgataactgttggcaccctagctcttggaattggtaccacgtcaggttacatctccccttggacagggcggttttactccctgcttgatccaacctatgcaaaggaccatataccaatcattgcatcagtatctgagcatcaaccaacagcgtggtcttcgttcatgtttgatttccacatccttcttttcctgttcccagcaggcctctacttctgtttcaagcgcttgtcagatgccacaatatttatagttatgtatggcctcacgagtatgtactttgctggtgtgatggttcggttaattcttgttgcagcgccagctgtttgccttattagtgccattgcagcatcagctacaataaaaaatctgactaccttgattcggacaaaaagcaaaagtccacaaactgtctctggaaaatcatctggctcaaaggcagctgcaaagggtgcagttgatcaatccttgcctttccagcagaatgtggccattgctttacttctgggtgctttctacttgcttagtagatatgctgtacactgcacttgggtgacatctgaagcttactcttctccttccgttgttctggccgcaaggggtcataatggaggcagggtcatatttgatgattatcgtgaagcgtattattggcttcgtcagaacactccttctgatgcaaagattatgtcatggtgggattatggataccaaatcacagctatggggaacagaactgttattgttgataacaacacatggaataatacacatatagctacagttgggcgtgcaatgtcatcctatgaagatgaagcgtatgagataatgcagtcactggatgtgaattatgtgcttgtcgtatttggtggtgttactggttattcttcagatgacattaacaagttcttatggatggtgcgcattggtggtggagtttttcctgtaatcaaagagcctgattaccttgttaatggggagtatcgtgtcgacaagggggcagcaccaaaaatgttgaattgcttaatgtacaagctttgttattaccgttttggagaactgaccacagaatatggaaaacctccaggatacgatcgagtacgaggagtggagattggcaacaaagacattaagcttgagtacttggaggaggcattcacaacttcggactggatagtgcgcatatacaaggtcaaacccccgaagaataggtcttgaggagaggaatcatctcttggttagtatctggtgctattaccttgaggtacattgtgtcaagtcaaaacgtattggagttcctacaggagacgggcaattgatttgaaaatctgcatcagctgcccccaagtgcgatcttttgttttggtgagactgacggaagtagaccataggtcagtttgaagtaacgatcatccgtcttcccctatatcattttgttagatgtaatcaggtgccattcagaactagcaattgcgacgaccgagtactttttgattgctgagcatggtatgacagtactccagatgtttttgtaagcacaacagcttatttgcgtagtaactttagatcgggttacacgggacacttgcaattttctggtgttgaagacaacaatgaataacttaactgtggttgctctgttttcctctgtgagctctcatcatcttgtggcaatcgcagtagtcgtttttatgttaataaatgatgcctataaacttgcatcatctcattagtt

SEQ ID NO: 17149 - DNA, 2264 bp, Oryza sativa
  ref <308>: DATABASE ACCESSION NUMBER: AK067610
  ref <309>: DATABASE ENTRY DATE: 2001-12-06
ggtcggcagcgtgcgcaggaggagaaaattgcggaggggatccacagttccagccgcgtgtgacggcggcgtgcggttgccgcggcgtgctgctcgagccgctttacgactgatccgagcggctttttccggcgatcatggcggacgcgcccgccaccggcggcggattccccgcgcaggactaccccaccatcgaccccacctcgttcgacgtggtcctctgcggcaccggcctcccggagtccgtcctcgccgccgcctgcgccgccgccgggaagacggtcctccacgtcgaccccaaccctttctacggctccctcttctcctccctccctctcccttccctcccctccttcctctccccctccccctccgacgaccccgccccctccccttccccctcctccgccgccgccgtcgatctccgccgccgcagcccgtactcggaggtggagacctcgggggcggtgcccgagccgtccaggcgcttcaccgccgacctggtgggccccaggctgctctactgcgccgacgaggccgtcgacctcctcctcaggtcagggggaagccaccatgtggagttcaagagcgtggaggggggaaccctcctctactgggacggcgatctctacccggtgccggactcgaggcaggccatcttcaaggacaccaccctccagctcagggagaagaacctactcttcaggttcttcaagcttgtgcaggcccacattgccgcgtcggctgccggcgccgccgcggcgggggaaggcgaggcctccggtaggctgcccgatgaggacctggacctccccttcgtcgaattcctcaagaggcagaatctttcgcccaagatgagagcggttgtcttgtatgcaattgccatggcggattatgatcaggatggtgtggagtcttgtgagaggttgttaacaacgagagagggagtcaagacaattgctctttactcctcatctattgggaggtttgctaatgcagagggggctttcatttatcctatgtatgggcatggtgagctgcatcaagctttctgccgctgtgctgctgttaaaggtattgcgaatgccagccacagcacttcttgttgatgaggaaaaaaagcgttatgtaggtatcagattggcatctggtcaggatattttgtgccaacagttgatactcgatccatcatatgaaattccttccttggatatgccaagtgatgcaccagtatcaaatttgccaagaaaagttgctaggggaatatgcataatcagcagctctgtgagacaagatacatcaaatgttctggttgttttccccccaaagtcactagaagaggagcaaattactgctgttcgggtgcttcagttgagcagcaatttagcagtatgccctcctggaatgttcatggcatatctctctactccctgtactgatgccttcactggaaagaaatgcatcagcaaagcaatagatgctcttttctcaactaaggtttctaatgatttggaagatcatttggagaaaaacagtgaagaaaataaggagagtgtgaagccaaccctactctggagctgtgtgtatgtacaagagattatacagggaacatctggtactgcattgtcatgccccatacctgatgaaaatatggactacaggagtatacttgaatcaacaaaaatgctgttcactgatatttgtcctaatgaagagttcctgcctagaaattcagctcccaaatatgcttctgataatgactctgattctgcagagtaaatccaaacttgcaaagggctttgtattctacatgacagggttatcgttgaagatatctgttccatattacagtgttccccaaagtcacggtaagaaatattgcagcaagggggagccctttacgttggtgagatttgccaggtttctctttgactagattgcagatgcctacattgttccatcattggtacgacatattatgatactggtaaaacactcaagagagagcgatgcagatgtccttggcattttgacatttggagaacatcataccacatgaaccgcttagtgtgattactacatccatatggttctctgaattctatgctgaatttgttggcacataggagtactgtactacataggaaggatactgctgagttctatgctaaatctgtgtatttttggtgggctgcctgaatcattgtacaagcgaacgacagaaatggatatcaaatgaggtccctccgagagggagttgcatt

SEQ ID NO: 17150 - DNA, 2969 bp, Oryza sativa
  ref <308>: DATABASE ACCESSION NUMBER: AK067611
  ref <309>: DATABASE ENTRY DATE: 2001-12-06
gtttcacaaggagaggagaggaggttgaggttgatcttgagtgtgaggagaggcgagatcggaaaaaggggaaatcggcgttgcgatgccgaagcgggtggccgacgagatcgcggcgctcccggagccgcgtgggcccctgcgccgcccctgcgccgacctctcccgccgcgtccgcctcctcgccccgctgctcgaccacctccccgcctcctcctcctcctcctcgagtactcccctcgccgacgccctcggggccgcgcgagacctcctccgcaagacccgcgacggcagtaagatcgaccaggccatgcgaggggatgcgttcctggacgaatttgcaggcgtcaacaggcagattcacctcgccttggatgccttgccctacaacaccttccacatgccccaagaggtccaagagcaggtcgcgctcgtccactcccagttccaacgagcctccacaaggacggatcccccggatacacagctttccatggatcttgcttgggctctcaccgacaacccttccgaccccgcccttctcaccaggatctctcacaagctgcagctgcacaccatggctgacatgaagaacgagtccatcgcccttcataacatggtcatttccactgccggagaacctgatggctgtgtcgaccaaatgtcttccctgctcaagaagctcaaagactgcgtcgtcactgaagatcatgccaacgatgccctcaccactaggtctgcctccattaagcataggtctcctatcatcccagacgagtttaggtgccccatatccctcgagctcatgcaggaccctgtcattgtgtccagcggccagacatatgagcgatcctgcatccaaaagtggcttgattctggccacaagacctgccctaagacgcagcagccactctcgcatacttctctcaccccaaactttgtcctcaaaagcctcatctcacaatggtgcgaagctaatggtattgagcttcccaagaacaaacagaattcccgtgataagaaggcggcaaaaagttccgactatgaccatgctggtctagtctcgctgatgaacaggctcaggagtgggaaccaagatgagcagcgggcagctgcaggtgagatacgactgcttgccaagagaaatgtcaacaaccggatatgcatcgctgaggcaggagccatccccttgctggtcaatctgctctcctcttcagatccacgaacacaggaacatgcagtgacagcactcctgaacctctccattcatgagaacaacaaggcaagcatcgtggactctcatgctatccctaagatagtggaagtgctgaaaactgggagcatggaaaccagagagaatgcagcagccacactattcagcttatcagttgttgatgagaacaaggtaactattggcgccgctggtgcaatccctccactcatcaaccttctgtgcgatgggagcccaagaggcaagaaagatgctgcgacggcaatttttaacctgtgcatatatcagggaaacaaggtccgggcagtgaaagctggaatcgtcatccatctgatgaacttcttggtggatcctacagggggaatgattgacgaggcacttagtcttctgtcaattcttgcaggcaacccagaaggcaagattgtaattgcgcggtcagaaccaattcctccacttgttgaggttatcaaaacagggtctcctcgcaatagggagaacgctgcagccattctatggttgctctgttctgctgatactgagcagacattggctgcaaaggcagctggagtggaggatgcactcaaggagctgtcagaaactggaacagatcgtgcaaagaggaaagcttctagcatcctcgaactcatgcaccaagcaaatgaggattctttgaagggaaatggacactgaaagttgcttcttcctggggaagctctgtgctttgggcaatgcatttggtggcttcattctgaagggtgagccgcgagccagagccatcaggtatttgtcagcagcagccaaagaagctactcgatcagtagctatcttggggagctaagggaggtcatgggtcacattggcgaggctggcggcggcgctgttgtcatgggctgcaaggtgctgccgatgtggagggagagcggcggcatggtggatggcgcgaggaagacgatggtgcatggcaagaaagctgtcgctcgggtgaaggagctcctcaggcgggctgctcagcccaggtcccctcaccctcaccctcaggccactggcgccagcaggtggaagaaggttatgagcttccaggcgagggatagcagcaacagcaaagcaggcaacgacagcacgagcaagctgagtttcaagtgggacgcgggtagctgctcgtctgcatcatcgtcggctatgtattccccgctgtcagccgtgtccgcgccggcgaaggcgccgtcgagccagcagcagctgcggccttggtccactgtccctgatgatggcgagcagcggatggcgcagtggatcaccaccgattcagactttgtggtgctggagctgtgacctcaactaatcccgttccttgggatgatggagtggaggccaggcaagcaattaagctgcagatactcatggatggctctcactaatttactgactgactacattcacaagtttagaccgatggaggaggggaagacggaagcagcgaagacagtagtattatttatgaatctcaacggccaagagcagaggctgcagctaggttgctgctgatcaatccatatcatgaggaaacttgaatggattattaaaagtaataataacagaccggtttattactagcacaagaggagagtcatcgatgaaatactagtgcgatgtatagtatacgtttgtgtttcttttttctttgacacgtaggatgtgtttgtgttggttgtcctattggagtgagtgaatttagagt

SEQ ID NO: 17151 - DNA, 2013 bp, Oryza sativa
  ref <308>: DATABASE ACCESSION NUMBER: AK067612
  ref <309>: DATABASE ENTRY DATE: 2001-12-06
tgggtagcggaaacttgtgtccggtgctctccgcaatccggtcgacgccggtcgtttctggcgctcgcggctcgccaatggccaaaccaacgtcgtcgtcccaatagtccccttggcgttgttgccaccgcctcctcccgcaccgcgatgccactcctcgacaccccctacctcgccctccgcgttcgcctcccccgcttcccgaccccccacaatcccagacccgccgttgccatcgaagcccagcactcctttccccacggcctgctcgcccgtgccgcgtgccagccgctccgtcacgtcgcggctccagcggagggggagggggaagaggtagaggacctcggcacgccgtcggctgcggccgtggcggaggccatccggcgtgcttcgagcgcgtcgccggtgcgtttcaggagggtgcaccgggaggagaatgagaagctgcgaggagagggaggcttcacggagcccagcaccgacttccggcgactgtgcggggagcagctcgagatgttccgggtggtcatctcccgcgacgccgtcctctctgtgtattgattctagttggtaatttcaccatatctgctggactaagagcagcggaagcttttcttgtaaaacaccagatggaaatcataactgaatttggagctgtagtccttccaatggtgaaacaccaatttgttgttggtttccttgttgcggagctcccagaactagttggataaagcatatttgcttcagcaagcttcctggcaaaacaatattagaatgagtggcttagtagaacagattcgaggacccctcgctaatataagagctcttgcaaagatgttatcagttcatacaaagagaaatgagatctcttatgatattgttgaagacgttatgatccaaggtgatcatttgaaagatgctttgcaacagattcaagatgcagtttatctgactaaggtgaacatagttaggtacaatgaggaaaccttaaagaaaattcaggggtcaccttcttcaagaactctaccacactatcaatcagatcctaagaatagttcacagaaagttgattcgttgtcatcacatgattctgacaatggagacatggtgatacccatgccacctctctggctggcccctcttcaaccccaagacgctaggcagaccatgtgatctctctgttgtactggaagatttggttggagcagctcaaccgcttgcttttaggcagcaacgcactctagatgtaacaggaatttcacacccgcttcaagttgctgttgaggaatctgctttaagacaagcgctgagtaatctcatagagggtgctcttctacgcactcagcttggtggccgagttcagatatatgctggtgaagcacctgcaggaggcattctcgttgtcattgatgatgatggtcctgacatgcaatacatgacacagatgcattgccttgctccattcgggtcagaccttgcggatggtatgcatgaagataatatgacatggaatttcattgcaggattaacagttgcccgtgagatacttgagaactatggctgtgttttgcgtgtgatatcgcctcggagacctgatgcaattatagggactggaggtagtcgtattgagatatggttgccaacttcacagacagaactatctgagatcactgaaggagcttagctgaattttagtaatcaacgcatgtttagaagataaaggtcatgtttaattggcatgatggagatcataccaccttttctgttttggaaatgttcgaacgacggctgcaaagtgagcttatacttctgattagatcagtcatcagtgaagcaccatatgaacatctttacacgcattccagtaaagcatgttacctgtggaaaaagcaccatatgaacacctttggacgtttttgtagcataaggaactgtagcacggtatacagtttgtatggtagagctagataccgcacttatgaaaagaagtacttttttgttgtttcgcagagc

SEQ ID NO: 17152 - DNA, 2999 bp, Oryza sativa
  ref <308>: DATABASE ACCESSION NUMBER: AK067613
  ref <309>: DATABASE ENTRY DATE: 2001-12-06
gaggtctggaattggggagcggttccggtagggccggtggcctccccgtcggcgatcgccgctcgcgtcgccgccgacgacaccaggagctccgcctgcccgccgcgcgcaggaggaggcgaggttggaaggcggtcactctggcgtgacgtttcactgcaatggagtacagagaggtcaggaggagcatttgatgaatcaagtaaaggtgtacagaaaaataagcctactggttcggaacttttcatctctatttccattaagaggtcaggaggaggctgggtggtgaggttgtacaattttctttatcttttttttttcccatttcaatcgcacgctaataattatttgggtttaaatcatatattccagtcactatcaactaattagaattaaaaacaattctagtgctacatttctaatctgggcatgttttgatggtatagaaccgaaatgtccgtcgtctttaatcaatgccgtttagatcattgggaacaattgagctggtgaagcagggaattaaccattatgggggttagaattgctatagtacctagactatgtgaaaatcgctgatagagcaatctttcatttgttttagctaagaatatgagattgacaatgcaaaagctaaataagtttactggggtaaacatggccagtattgtgatttaaagaattatcagtaggaaacatggtgatagtaacatgtatgctagttactactattcatttacacttgaagttggttttccttcataactttttgcaaggtttgattggttttaatttatgtgcttgcccacccaaattcaaggtaaaccatcagtttcaatgattatatgggcaccagtccttgccacagtccaaatctccttgcttacctcggtccatgcttagtcatcttgtctgttcatctcatcatgttttcctgatgaccatgtgacatgtcacacaaatgtacagaattcaatagaagtcagtttttgagtactcatatccgtggtctgtcagtgaattgtgaaaaggtaaatatgtccatgtttcttagctccggtttgctccattcaattaatttctccaggccttatgtcttctcagaggcatacattgcatacagatatgtattgaaaacattcctttgcctgcattcacagtcacatttacatgggtgcagacaaagtgtgggaatttggatgcgaagcaaccatgtttattgtgcgatcagcgttcggcaggtcagtctgataatgcagcgtatctgtaccaccgctgtgtgcatgtggatggccgctctgaggcgtgacatgtcgtagtcacctatgcaggaatgcatggtatgattgtataacttgttactcaacttccgaagtcctaacggcatttcaaatgagcttccaaattgttgaatttgctcttcaaggaaaatccactagaaaaaaaaaatgttgctgacaatacccaatgacaggtggatcctgctgcagtttacatcggcatgtagcaatttggttcgatgatactgctctgatgtccttgacgaggagggaaataagggtattctttatgaccgttttgtctgtaattgcaccagtaaagaatggagaactctatatctgaacattttgggctttagttttacctcttctgaaacttctgatgacaatttcttctgcattttttcatgttccagaacaagttaagaaagcaagcagttgtgccaaacaagggagtacaaagcagttgggtcataaaaattcaggacaggatctgttcctctgtgcgtgcactctgaaacatatgccatcatagtgttcataaccactggcccattcaagggatgagcttatttaagagagccacagaagaacttctgaaatgaccagggaaaagatgcaaaagccgtgatattgtggtagtagtacacaaagacattccttcgtcattgatctccaacgggagcagtgtctgattacacagtaaccgacctactcaagcaatcatgcgtgttcgttgcttaaaggatggcttttctttgctttgcaagtcttgatcccttcctgttcctccaatggcaagcaaaagctatggcttacccagcacttttgagttaggactatggctattatgtgaagagccatcagtttacttgtacggaaaataaaagcgaagctggcatagtgatgtaataatggtatgtatgtcactaacaatctccagtgtggcgtcttcagtaacatagtgttgttcagttagtttgcactcttgttttcatgtgttttactagcatagatggtcagggttgttctaccatttccttgtcactggacaactgagtagatcacaattatagctaccaataaatgaggtcgctgctggtttgctggggtagcacttcacaaagagagactattcaattttggatatcattttctgtcagtggccacctgctaatttgttcggcgtttcatgctggataaaagaagtgcacatcaagaagaggagtaactataaccatgtgatggaccgaatgaacttatgatacatcatgtgtcttactatctctctaggtcagaaatactaggacaacccagatgaggaacagtacttcttgttgctgtagcttggacttaaaaggccagtcatgtgctgaactgcagatacttgatgtgctctcttaccttcaggattaaacaagtgactgcttccttcattgcagttgggttttatttccagtttaatgagcctatgattctgtgagtcgtcttctctgcatagtattataaacagaagaatagaagctagcatctgctgcttgctggaagtaaaatattgctaacacaggttcctgcatcaagacaacagtggtggaggtgggggacctttggagcaggagtttaggaccgacgcatggcccctccttgtgcatgcatcattgtacatatatgtacgtatacctgtacattcatatttacgagtatatactactacatttaaag

SEQ ID NO: 17153 - DNA, 2533 bp, Oryza sativa
  ref <308>: DATABASE ACCESSION NUMBER: AK067614
  ref <309>: DATABASE ENTRY DATE: 2001-12-06
ttttttatctccagggcctattgacaacattatgcgttctactttgattgaggctgagccattatacaaacaatttgaatacatgaaagtgttggtgggttcttggaatgtcgggcaagaaaaggcatcttatgagtcactaagagcttggctaaagttaccgacaccagaggttgggttagtggtagttggattgcaggaggtggacatgggtgctggttttcttgcaatgtctgcagctaaagaaacagttgggctagagggaagcccaaacggagattggtggttggatgcaattgggcagcagttaaagggttactcttttgagcgtgttggctcgaggcagatggctggattgcttatctgtgtatgggtcagaacacatcttaagcagttcattggtgatattgataatgctgcggtagcatgtggattagggcgagcaatcggcaacaaggtacttctgttatcttattgccccactctttcttggcgcaagatgagcttgaaatgttgtttatgaggcatttgacttatcaaacatatcatgacaaattttgttttgatctaagcatttcatgctttagccatcatatttattggagatgtgttcatattctggaacatttgagttaagggggggaatacctttgctggccactatatgccaaaactccctttcatgtttaagcacaatgctgattagttcattctagagaaaggtagcaaggaggataagatataccatataggcatacagtatataataaaaaggaatatatgctatatgatggaaatgtagtgtgacagcaagtgctatttgatttgttttctttcatgcattcacatgttgaacattgtttgtttacttgtttaaaatgaacatcttggaagttctgaaagttcaagttgttaacgatgcactaagcaaaaagattattcacatttgtccccatattcatttggtagcagttgttgtgcaaaaccaataaatcattgttaccaagatgatatctggtggtttgtgcatacaattaatgaatgagaggtgtgcaatactgatcagaaaatgaaaaaaaaaagacaaattttaaaacacattatgggcctaaaatgtaaccacccactagttctgttatttttctgggggagtacagatattacttcaaaaggactgtattctgtcttatctgctgctttgttcatgtatgcctatattagggagcagtgggattgaggatgagaatacatgataggagtatttgctttgtaaattgccattttgctgctcatatggaagctgtgagtcgacggaatgaagattttgaccatgtctttagaacaatgacctttgccaccccttcgagtggaataatgacaacatcagtttctagttctactggccagcttcttcgaggagcaaatggatcaagaatgcctgagttgtcagacacggacatgattgtctttcttggtgacttcaattaccgcctttatgatatttcctatgatgatgcaatgggcttagtttcccggagatgctttgactggctaaaaaataatgaccaactgcgagcagaaatgagatctgggagagtcttccagggactacgtgaaggggatttcaagtttccccctacatacaaatttgagaaacatacagcaggcttatcagggtatgatagcagtgagaagaggcgcattcctgcctggtgtgacagaatcctatatcgtgatagccgagttagttcagggaatgagtgttccttggattgtcctgtggtttcttcaatatcactgtatgactcttgcatggaagcaacagatagtgatcacaaacctataaaatctgtgttcaatttggatattgcttatgttgacaaacagacaatgaggcagaaatatgtggagctaatgagctcaaataataaagtggtgcatttgcttcaggaacttgaagcattccctggagtaaatataaataattctaacatcatcttgcaagatcggaatccatctgttgtgaaattgcaaaacagaacagaagtcatcgcttgttttgagatcattggacaagcaccaaatttgtccagcacacatttctctgcttttcctgcatggctaaaggtctctccagcagtcggcataatatctccgggacagacggtagaggtcactttgcagcacagagacctgcatagccaacaaaactataatggaacttcattggatattttgcctggtggagctacccaacaaaaggcagcaactgtttttgcgaaaataactggagtatattcaacagttgcaaaatattacgaaatacatgcacaacaccagaactgcaggagcacattgccatcgagaggttataacttaggtgaccggtttttttaattttgagtttggtatcaggaatttaggaaatgtatgttgtatcaaatgttctttttgagtgaagtcacaaaatcaaggctttctactaccctcaacatgtgtattttcaagagaggaaaattgtaaacagtgtagc

SEQ ID NO: 17154 - DNA, 1721 bp, Oryza sativa
  ref <308>: DATABASE ACCESSION NUMBER: AK067615
  ref <309>: DATABASE ENTRY DATE: 2001-12-06
gtatgtattgtatatagcgagccctacctactccacaaaaagagtcctctcctctcctctcctctcccttgccaccaccaaactgcaattaattgtttgtttcgcaaaacaagcatcctcgcctcggcgtcccagatctctgctgctgggctgggctgcctgcctgacaagagaggcagcagccatggcgttcgacgccttcaccgacaagaacgccgtcttccgccgcctcaaggccaagcccgagaacaagatgtgcttcgactgcagcgccaagaaccccacctgggcctccgtcacctacggcatcttcctctgcctcgactgctccgccgtccaccgcagcctcggcgtccacatcaccttcgtcaggtcaacaaacctagattcatggactccagatcaactgaagatgatggcttttggaggcaacaatcgtgcccatgctttctttaaacagcacgggtggacagatggtggcaaggtcgacgcaaagtacacgtcaagggctgctgagctgtacaggcagatactgcaaaaggaagttgccaagagttctgctgataacgtcttgccatcgtcgccagttgcagcgtctcaaccacaaaatccatccgatgacttccctgagttcaagctaccagaggcaccagcagagaataccaatgggaagcaggaacctgatgtcaccaattcgcaaaaagcacctacgcagacacgaaaagcccctactcatcccacttttgccacttctgtaaagaagtccattggtgcgaagaagattggaggcaagactggagggcttggtgttaaaaagctcaccacaaagccaagtgaaagcctgtatgatcagaaacctgaagagccaaaacctgctgccccagtaatgactacttccaccacaaaaagtggcccgtccttgcattcacgttttgaatatgtggagaatgagccagcagttgattcaagaaatggaggaactcaaatgactggccacgtagcaccaccaaaatcatcaaacttctttcaagagtacggaatggataatgggttccaaaagaaaacaagcacagctgccacaaagacccagattcaggagactgacgaagcaaggaaaaaattctctaatgcaaaggcaatttcatcatctcagttttttggcaatcaaagcagagaagagaaagacgctcaaatgtcccttcaaaagtttgcgggttcttcgtccatttcaagtgctgatctttttggccgccgcgacatggatgactcgaatctggatttaagtgctgcggatctcatcaacagaatatcattccaggcatctcaagatctgtcttccctcaagaatatggctggagaaactggaaagaagctgacatctatagcctccaattttatcagcgacctcgacagaatcctttgagtggttgatggggcgagatcattagcattttttgttttggcaaacctgcacagaataccgtattgagtttaaaatgtggtgcagctcagagaagcatttgttgcacagctatgtagatgaaagtagaggattggcaattatgcgtctgtattcttttttccttttttactattgttggaaccctgtccgcatgaagatatttttattcgtttcttgacaagattgaaacatacgatggtattcattccagttagtggtatagctgggaagaaaaggtatactttgatgtgcctgtgct

SEQ ID NO: 17155 - DNA, 2777 bp, Oryza sativa
  ref <308>: DATABASE ACCESSION NUMBER: AK067616
  ref <309>: DATABASE ENTRY DATE: 2001-12-06
gcttcccccctccctctccaacccttccaccccatgccccacccctccgccgccgcgatgctcccctcgccttcctccctcctccgcctcctccgccgcccacaccctcgcctcctccccccgccgcccccgctcctcacccgcttcctctcctcttcctcccccggcgacgccgccggatgggcctcctacgacccgctgaccgacagcctcgccccaccggcggcagccgccgccgcgtccgactcggaggcccccgcggagggcgaggcttggggcgtgttcgacgccgtgaccggccgcatcgtcatgaaggagcacccgccctactcccagccgccgccgcccggccccgacgaggagaggtccaaggtggggaggaggaggagcgctggggtgaaggacgaggcgaggtggtcgtcggtggccgccgtggggaaggcccgcggcaaggcggggaaggagagggcctcgtacgtgtgcggcaactgcggggagggcttctcgcagtggtggggcacgtgccgccactgcgaggcgatggggaccctgaccaagtacgtcccgggctctgatcctggtgcctccgtggggtcacaccatgccttccggtcgtggattccgcagaagagcaaggagatggtgccccagagccttcagcaagtgaccaagggagttgatcagtccgagtggcgaataccgctgtccgggaacttcggaatggagattgctcgagtgcttgggggtggggttgttcctgggtccttgattctagtaggtggggatccaggtgtaggaaaaagttcattgatattacagcttgcttctatcatgtccgagaatattggtgctggggagtcttctgctatcgtatatgtgtctggcgaggagagcattgagcaaattggaaacagggctgatcggatgagtatcaagtctagaaatttgtacttgtattctagtacagatatcgaggatatcttggacaaaatccaaccattatctcctagggcactcattattgattcaattcagacagtttatctaagaggatttgctggaagtgctgggaatatgactcaggtgaaggaatgcacctctgcgctgttaagatttgcaaaattgacaaatattcctgttatcttgattggacatgttacaaaaactggtgatattgctggtccccgtttgttagagcacattgtagatgttgttttatatatggagggagagagatgcttatctcatcggttgttgcgatcagtgaaaaatcgtttcggttcaacagacgaggatatggtctacaacctgttctgaatccaaccgagatgttcttaactgaacatgatttggattctgaaatactagctggacttgctgtggctgttgttttggatggatccaggacatttgctattgaagttcaggcattgtgtgtttcaggttctcctcgcaatggagaagttgttggtataccgagaaatagggctgatattataatctcagtaagtgtttaagtgctcccgtacatacttccaagtaataaaatgacctgcccccatatgtggtgcctatgtcagattttttttaacctgaactttggatagcacccagctggatggacagctttgcaggactcgatctagtgggatgcatgtttggactaactttatggtgttagagatgcataataatgccaatctacatttttttaagcatgttagattgttctaacacttcccggcgagattgttctaacacttaatttcaagtgggcctggtcatgattgtttttatcaacttcagtgtaagtaccatatttaagaacatgctagtactcccaccgattccaaatgtaagttgttttggacttcaccactctctaaatgtaatatgttaggttaagcatatcaagaactacagcaatattattctgtttacaaaaagcatatcccctaagatgatatatttttgtttatttctggctttttttaccctaatcaagttacaacttgccagttaatgcattatcttgttcgagaacatacgaggtgtaatttgacattacaactgatggaaatggttagtttatcgaactttatgtatctaaaataataccttctatttgtaatgcaggttcttatgaagcaagcaggtctaaaacttcaggataatgctgtttttctaaatgttgtcagtggtttcatgttgacagaaactgcaggagatctggcaatagcagcttcaatttgcagcagtttcttagaatatcctataccaaatgatattgcgtttatcggagaggttggccttggtggtgaacttagaactgtgccaagaatggacaagcgggtgctagctattgcgaagttgggatacaagaaatgcgtcgttcccaaaacctcagagaagctgctcagaccgctgaaccttgaacttgagattttgccctgcagcaacctgaaagaggtcataaacaccgtatttaggccacaaggatgatgctacactctgcttactacttacagttgctgaccgtaggtatttagatctagtgtgcctgggtcattggccagatgctatgacgattgagagagatgatgtaactatttatactcattaacgggttttaatgttccagccatttttgcgccagaatacggtccctttcataggaatcgtattggctatccgtgctggaatcctgaaccctttacctctaccttaagtatgtaagatgtcttctatacactagtctgaaaatgaaatttgcttgc

SEQ ID NO: 17156 - DNA, 2121 bp, Oryza sativa
  ref <308>: DATABASE ACCESSION NUMBER: AK067617
  ref <309>: DATABASE ENTRY DATE: 2001-12-06
tggctgctgcgtcacctcagtacctcacctcatctcatccatcgtttgctccgtttctgtgggatttccaccggctgattctctcgccctcctcccataaagcgaccggtggttcgcaccggacggatgccccaatctttgcatcgaggggcaacgaagcgaggtcacggatgcgggcgatgccaccgccgtcttcttgtccctagatccatcaagtgaccagttctctgatcagtgagaataatggccgctgctgaagcaagggctgcttggcagcgtgctgcaaaccgttgcatcgttcaggaggatagaaaaagagcaccaaaactagcctgctgtccaccatcatcagaacagcagcatgtcaaaagcaatggaaattgtaggaattctgaagaccgccctgtgcccaatttcatgccattgagctggaatcccatgaactccagtctgccacctgatattagatggtggcttcagttacaaccaaatttaggagggcagaagaatcttgcaggtgagcacctatattttctgggaagagagatcagtgataaggaagtggaggattcagcacaaaagaatatacacgacgaaccattattttgtgaaatgttcgacaccaatcctgagaagattgaggatgtttttgagccttcgtggatggtttccacagcttccatgaagtattcttctgaaacaggcttacaagacttgaaaaatataggtggctattcccaagttccttcgaagtgcaaagaaaatgccagtgactgtttgttcaatgataaagaattcctggatttcaaaaattttaacccaccaccgtcgaagaacccacagaaggacgattttgatatgaatgcgccttggaaaggaggtgaaaggagtcaaccatggtggcagatcactgatgagaatgagctggctttactggttgcagaaagagcaatgcagcatattgagaattgcgatttaccaagacctacccagatagttcgtgttcagggtactgaatcacgcagtcatgaaaatatgggtaggtacagggggtcatcaggtccagcaggtacaatgtcatatcctgatactggacaatgtgaacatattgaatgcagttacagcacagcaagcacagatgaggtggatttaaccagtgatggagtttggcaacagcaggaaagaaatgttgcacgcagtgatgcacaagatttttctaggggcatcaatacagaaccacgaggcaagcgaacataccagaatcctgcagagcaagctcaacttttggaggcactttgtcactcgcaaacacgggcgagggaagctgagatggctgggaagaaagcacaaagtgaaaaagacgatgtcatcaagctatttttcagacaggcctcgcatctctttgcgtgcaaacaatggctgaaaatgttacagttggagaacatctgcctccagcttaaacacagagagcatcagatagcaaccatgatacctgatattccatggattacactaaagaaaaggactacaccagatcatgagaaagaagattggacaaggaagaaaggcagaaggcataaaaatgcagggagtttctgtgacgcgctcttatttgccgttggtttaggtcttgcaggtgcagggctgcttcttggctggacatttgggtggcttctggccaagttctgaagttgcccatagttttcaactgagactagcttagctagctaggcatgtattttgctgtgcgcctgtatgtgatgattcatagatgaaatctccaggtatactctccatattggagtgagatggcgaaattttagacccaagaatatgttcgtttggaagctctgctagttagaagacacgaatgtatagggagcatttgttgcaaatttgcaatttgtaaatatgggaggaggacgtctgtgaatgcttgtacatactgatcagtagagaaaaaatgtcatcggacttcttcaacagtactccctccgtcccaaaaagaattaagaggggataagaattaagaggggatgtgatctctcctaggttgatctccaggttgatgtatgtgtttttgggacggagggagtatctccacctgtacctattatttgg

SEQ ID NO: 17157 - DNA, 3538 bp, Oryza sativa
  ref <308>: DATABASE ACCESSION NUMBER: AK067618
  ref <309>: DATABASE ENTRY DATE: 2001-12-06
tcaagcgcgtgcggtattgttctcaaggatgtcagtcaaagcattggcaatctggtcacaagttcaagtgcaaacaaatgaaaaaatcaagccctgctgacaagctatcaggtggaggcgaggaagacagaaataagttatctggttttggtcccatctcattagtacctgcccgtagaaaattaaacaaggtcatctttccatatgatgaatttctaaagctgtgcaactggagggaccttgattatttaccttgtggccttttgaattgtggcaacagttgctttgccaatgttgttttacaatgtctttcatgtacgaggccacttgcagcctatctcttaggaatggaccatagcagggaatgttataagagacatgaagattggtgtttcttgtgcgaactgcaatgccatatccaaagggcaagtgaaagtatgcatccatttgcgccgaagaacattctttctcacctgccaaatataggtgggaaccttggctttggtagacaagaggatgctcatgaattcatgaggtttgcaatagataagatgcaatctgcttgtcttgatgaatttggaggcgagaaggctgtagaccctagcacgcaagaaacgactcttattcaacacatatttggtggtcgtctgcaatcccaggttcaatgtactgcatgtggaatggtctcaaatcgctatgagaatatgatggacttaacagttgaaattcatggtgatgctgactccttggaagaatgcttagataagttcactgcagtagagtggcttgatggtgataataagtacaaatgtgatggatgcagcgactatgtcaaagcacagaaacgtcttacagtttatcaagctccaaatatcctcacaattactctgaaaagattccagagtggtagatttgggaaactaaacaagagagttacattcccaatgaagttagacctaacgccatacatgagtagcactgatggaagtgaccaatacgatctctatgctgttgttgttcatctggatatgctcaatgcttcattttttgggcattatatatgctatataaaaaattaccgaggacgctggtataaaattgatgactgcaaggttatggctgttgatgaggaggaagtacatgctctaggtgcttatatgcttctatatagcaggagaacagctcgccctaggccactaattgcagtagaagaactcatgaaacagcagcaacagttgaaagtatgccctttgaatggacaaaatcatttgatacaagaggatgtgccattagaaggcgtgccatctttgaaaccctcagaagatctggaagttgattttgaatccaacaacaaatctttacatactatggacagagagccagacctggattttcatgtgagctttgatagagataagttcactaacaatgatattatgcacccaccagtttcaacggtatcgcatgcccttgatgaaaatactagaggagattcaggttttccattggaagaatcgaacaccatgggatctgtgcaatttggcaactccacatatgaaacatctttagtgcattcccctgcagagcagtgtgaagaacctgcgtcatgtattgattcagttgactacatggaaattgacactgaagctggcgttaaagttgaaagatggagcaggcctgccttaggtgattcagttggagtgatggggaatggtacattggtcccggcattggagaatggtttggcgggtaaaccaattcctggttttcccgacaaaccctcgagaataaattcattctttgcagaaggatgtcaaactggtgacaatggtgctggttcctcgcaagagttgaatggtcattgcaatggagaacccagttgcccagagcaaggagttctgaccaatggtggcaacacgccctctccaagcacacaatgctatgaaaataagtttgcaacatccaccaacggcaactattctattgggaatggtgatacattatctagcagcaactcattacatgcgggcaaacagaatgctggctttacctataatggtttcaatccaaaaccttacaaagaaccatcaggaagcaacacatatctgaataatacatgcaatggtaaaccatcggaagataatcacaataaatgtgccccaaacctgccggcaaaagattgccaagggggcatgccattcttacatcgtggcttccttctaaggccttgttctaggggaaatccaggcaaatgtgatgatggcttgtcaattagtaatggcacatcatcatcctttgtgagtagtaacagcaaatcaagtaatatttcatcatctcgaaatggtgaaggaggcacaccattcttgtctcctagttttcgcacaaatcattgcagagagtcagctgccatggacacctctgcaagctctgtccatgatttgaaaaccagctataacatttccttggagcaaaaatctattggtgctgcagtaccgtcagacctgataaaagaaagttggggtgaagatggcacgacttttggcactgtttaccaacaaagagcaacttctgttgataatgtaagcagccgccatgatgaaaatgggcatgtgattttgggtgccaataattccagttatggaggagaaaacggcagtaataatggaattcttgatatgaatagcagcagtagccaaagggacgcagcatctagtaccatgatggcttctgagaaaggcataggacctaaaacagctgaccaagtcaattacatatctgatgcacttgaacatgatggtttgcgacgaagattaacctcaaattttcctgatcagaatggtattgatgctcaataaactgtggtcaccactggagcgcataaactggaaggctatgagctcaagttgtccgggttgaatggatataaactgaagggcaatgagctggaaatcggaagaatgcctgatctcatattggttggttgattcaattgattacttgaaactgtaattggagcaaacattgtttgcttggcagtaattttgcctcttttccacatggcttcctcctgtgaggtggaggggtgtctctgggcttccacacaatttgcagaggctcagatgctcccctgattccatgttcttgttgcctttagggtacatagcagattgtaggcttaccttgttcccaccatgttggtggatccatagctcaaataaacctgaatgctgactccgttgtcaagaaagctgaatcaactgtagagtgataaaagaggaagattctgatcgctttcttcatctgatgcccgttttgaccccaattggtgcaaacagatttatgatctttacaatgcaaccacgatctttgttggtcggaccagaactgtaagcaactgatggttctcatttttttggttatcacgaaggtgtatgtttgcttaattgcattactgtaactaccacgatcagcaaaagatggttttacgaacatgcccttgtgtatgttcatcaggcttaatttgcagtgcggtaatcgc

SEQ ID NO: 17158 - DNA, 2820 bp, Oryza sativa
  ref <308>: DATABASE ACCESSION NUMBER: AK067619
  ref <309>: DATABASE ENTRY DATE: 2001-12-06
gaaaattcgacgaagaaaaaaaaaataaaattcggcggtaaataagcggggcgaaggaagaagaaaatcacggaaatgccactaccggcgttcgtggcggcggcggcgaggctcgccgtcctcgtggccgcggcggcgacggcggccaatgccgcctcctacgcgcggtaccggcggcgccacctccgccgcatccccagccccatcgacgagtccgccgatcccctcgccgacttccgcgcctttccctcctccgacgctgacgactcagaggaggataatttcttctttgggctagcaacagcgcctgcgcatgttgaggacaggctagaagatgcttggctccagtttgcaactgaaacttcctgcgatgacaatggaaacgtgcgcgaccagaggccagtagatgcactgatggcatctgctgctggtgatggaggctcccagcaatcttggaggtcaacaggtggggaaaatattggtgatagagagcagaggaaaccacttagggtagccatggaggctatgctcagggggtttgaaattcttgctgagagtggagaatctgctggcggcgataactgcagccacaatgttgctgcttggcataatgttccatgcccgcaagaaaggcttagattttggtctgatcctgatgctgagttgaaacttgctaaggagaccggcatcagcgttttccgcatgggggtagattgggcaaggttaatgcctgaggaaccaaccgaagaattgaagagctcagttaattttgcagcacttgagcggtatagatggatcattcaaagggttcgcgaatatggaatgaaagtaatgcttactctgtttcatcactcacttccaccttgggctggaaaatatggcgggtggaagatggaaaaaactgtcacctatttcatggattttgtgagttggggctgtgcaggcttgttgttgatcgtgtatccaatttagtggactactgggtgattttcaatgaacctcacgtttttgtgatgctaacttattgtgccggtgcttggcctggtggagaccctaatgcaattgaagtagcaacatctactctgccaactggtgtatacaatcaggctttgcattggatggctattgcacattctgaagcctatgactacatacattcgaaaagcaagaacgaaaggaagccaatagttggtgttgcacaccatgtatcgtttacaaggccatatgggctatttgatgttgctgctgtcgcgctagctaactcattgaccctttttccttacgtggatagcatatgtgataaattggacttcattggaatcaactactatggacaggaggttatatcaggacctggtctaaagcttgtggataatgatgagtatagtgaatctggtcgtggggtttatcctgatgggctgttccgcatcctgattcaattcaatgaacgatataagagattaaatataccttttgtcattactgaaaatggagtttctgatgagactgatctgatacggaaaccatatatactggaacacttgttagccacatacgctgccatcattatggtcctttcttaacctttaagcaaacatgttttagtctgtgctcatggagatggaacttccaacacttaaacaacataatgttttatagggtgtccgtgtacttggttatttgttttggacaacatcagataattgggaatgggcggatggctatggtcccaagtttgggcttgttgctgttgaccgtgctaataacctagcacggaaacctcggccttcatactttttattctccagggtaactttttcgttttagcaaatcatgaaaccatggtacattgtttacctattatctcagtctcttacgttgtctaactcctaggtgaatttttgtcttctgttgaaatattgaaaactaactagatctactccttgtttctgaagtttaaagttcattcattttcttttatcagagtaattttatggctagataaagcactaaacgtgtctagacctgagattacctccagcattttttttgccactttttacgttcatgcatgtggtggctatataactagcatgataagatgcatctgaactccaggttgttacaactggaaaaattacaagacaggacagaatgtctgcttggagggagctgcaacagctgcagttcaaaagaaaacacgtccatttttcagggcagtggataagcatggtcggatgtatgcaggtggtctagatcggcctattcagaggcccttcatattgcgggattggagatttggtcactataaaatggaaggcttgcaggatcctttgagttgctttataagatgcatttttgcaccattttcacgccaaaagaagattcactacatagaagatgatgttatttcttattctattaactgatgccctgctactatagttgctactttaagttcagtttcttatgttgcaaccaaaaacacatccatgttttggttattacttttttcttgatgaagtaaataaaaagagtcttggaaatggaaagttcaacttcttcagctatgtcctgcacttcttaattgaagatgcttcctgggaagtgtttgggtgaacagatgggcacctgcctaccttatttagatctctgaccctccaggctacatccagatctgtgcgtgtagacacgttcaagtagtgagttaatggttcctattgtttcctcatatagatttttttacttttctattgtaaaaaaaaacacttttcacccactgtatataggaaatgaataaattcttttcatttatagtgg

SEQ ID NO: 17159 - DNA, 3200 bp, Oryza sativa
  ref <308>: DATABASE ACCESSION NUMBER: AK067620
  ref <309>: DATABASE ENTRY DATE: 2001-12-06
ggggcgaaaaagaaaaaaaagaaaaagaaaaaaggttcgcgtttctctctcttgggcagccatggcgtccccgcggccgccgccggcgagcctgcggagcttcctggacgcgcacttcgcctcccccgaggacctcgcctccgcaccggcgctcgctgagctcctgcgccgcgagtgcgtgggcctggatgcatccctccgccgcctcgaggcgcagctcgcgtccgtatccgcctcctggctcgcgcgctccgccggagctcgcgcatctctccgccgcatccgctcccgagtattattgcttcggggattccgctcgggtttcaacggattttatcggtggtaggcgggggattcggagtggaggaggatgatggcgaggagacgctgcggagcgcggagctgccggcgcttgtgcaggagatccatcggatcgacgccattcgactctatgcggaagctgctctacagttggaagcttttgttggtaacctagaagatgcaacgttttccatcgttagacaggcctcaaagttgaacttgtcctcggtatttaggccagcatctaatgaaatgcaatggaagcaagaaaagttgctccaggctgttgatgccatgagggatattgaactagagttgctacggatcagcacgaataggccacaatggaccaatcttatcatggctgttgattctagagtggacaaaaccctagcaattttgagacctaaagcactaacagattatcgagctctacttgcagcacttggctggccaccttccttgtcttcaccagatgcagcaaataataagtactcggaaattccaaaccccctcatcttaatgaatgaggcaaataaagagaagtattcacaaagttttctagcactgtgtgctctgcaacatgcgcaagccaactgtgaagcgcgtcaatgccaagcgaaaggagcaagtgctagcatgtcagattcaaagtactttgataaaactgctgcatgctttgataatggactttgggcaattgatgagttggttcagcctattgcttccaggttggaatatcattttgctaaatggtctgaacagccggagttcatttttgcccttgtttacaaaatagcaagagattttatgggtggtgtggatgatatattgcagcctttgattgatcgagcaagacttgtgggattgagtgctaaagagtcttgggtaactggaatggtgaaaatgcttctaggttaccttgagaggcaaattttcccagtccttgtcacatcttatcaggctactgatgacaaatttgaagtacattcctcatggatgcacttgaatgacctgatgattacttttgataaaagaatgcagttgcttgcagattcaggaatacagaagatagcttcaatttctgaaggcctgtccaggtccttatctgtcttttccatatatagcgagcattctgattggcttcacatgtgggctggtgtagagcttaattctgcacaacataagctcaaatctgagatggaggatgagataaattggtcatatagtattaaagagcttggtctacaagagatcactagtaattttcttctgtctacaagagaagattacaaagctccaacaatttctgaatttgtggtcaaaactgcatctgctatgattgaaagaggccatgctctgccaaataggggattaaggattcagtataacagatcctcttcagtccagttcctgagtgatttctttcttgtcttacgtgaacgatgtgaagccctacaactgacaaatacagctttagaagatgattctttactaaaagcttcatttgcaattaatgctgctcgatattgtgaatatgttcttcgggaatgggatgacgacatagttttcctggagatgggtgcccataggaaacatgttgatggaggccagggacaaggccacaaacacagtgcccaacatccatgttctttctttggcgatgaaatcgccttcttggctaaattggggaccgattatctggaacagattatgtcttccgttctgctcgagtttgaagatctatcctgggactatgtccaaaacattggattgcccaatgagcagatccatccagttgatgaggtcctggatgaagaaaatctcggagtatctcctggatttgttgcctctctagaagttgtgagagacagaaccaccaaactgatgctacatcttaattcgaaggatttccttgatctgtggaggagtatagcagaaggcctcgactacttcatctacagcagcatacgatggggggagttgacattctctgaccaaggagttgtacagctaagagtcgatacgaaggcccttctccacatctttaggcccttctgtttaagacctgaagccttttttccattcataagtgattccctgaggctgttagccatgagaaagacagatgcacgatacctgttggaagtgctcaagaatgccaaggagaatgacagttgcctgaggcaacaaggactgcaacatgtaaatgcaagccaagctatgaaaatcttaggtagcaaaaggtctgatggataatcttcttaccttagcgtagaagacctgctggagatgatcagaatatgattttgcctatgctgggctgctctatgtcactatgatgacggcaatcttccgcctgtcctccttccaggaaacatctcttctgagaagtttaacacgtggttagtggttaccggctgcaattccaggcccactccaaggataatgcgcctgttggaacgcaggatagcaaaacagtttgcgtttcaagattgaagagacttatctggtgttcgcagcagcttcgcgttgaaactagttttggcatgtactacattctctccagggtgatgagacctgcgagtcttggacgacaaattggagatggccgctttgcaacgcaaaagtccgccgccgccgccccctgtttatcgcttctttgaccggctcgatcgtaatcaacccaaacacatcatgttgcatgcaaagctagcagatgtaacaacaaaatattcaagatctcgtctgcctcaaattctctgagtaatatagtcaatgttcaccgtctcgcagactatgattatgtcgcatatctcatgtatgccgtgttaatcctgatccgtaccttgaaaaaaaagattataatcttaatcttg

SEQ ID NO: 17160 - DNA, 3897 bp, Oryza sativa
  ref <308>: DATABASE ACCESSION NUMBER: AK067621
  ref <309>: DATABASE ENTRY DATE: 2001-12-06
tctgggataaaataaaataaaaataaaaacttattttttttcctcccccactctccccgacctccaccctctgccaccccggccgcctcaccgccgcgccgtcctcctgcacggcggcgccgccgccgccaaagctgagcctgctctcttgccgaccggcgcccaactcccagcctcggcctccacccttccgattcttgcgtctcggcatcggaagcgatggggaagagggtgaaggcgaaggccaagaacccgaggaaagcacagcaacaacaggagccgacggcagcggcgccctctgatgctggatctggggatgcggcggcggcggcggcgcaggactcggggaattcgacggaggaagctgctgctgctgctgctgctgccgcgtcggccagcggcagggagcagtgcggacactacggcggcgacagcgcccgcttggacaaggtcctcttggagatcatgacgtccaagcatttcgcgtcgtgcgagcattgccgggatgatgcccctaggaagaaagggggtggcaaggagaaagggggtaagcagcagcagaagaagaaaggaggtggaacgaaaggttccgcggccaaggcgaaggtggagaagagtgacatgtgggtgtgcttggactgcggtcggcatttctgcgggggtgaggttgatgtgaccaagccgtacggccatgcccgaaggcatgccaagcaggaccggcattggtgggctgcacggtttgatgatccgactgttgcgttttgtttgtcgtgtgagaaggaggtgtcgatcgagatgcctagaatagagacagttgccgcagtgccaacagaggtggctggtgcagctgacagagatctaggtttggttaactctcatggtagtgtaatcagagggctgccaaatcttgggaacacatgcttcttcaatgcagtgatgcagagcctcctcgcgcttgataggttgcgcagtaagatgttgggaccagatgttccaacgggggctcttttgatgtcattgaagaaactcttcatggagacaagtgcttcaaatgatgtaggaggtgcgctgagtccaaagaatctcttctcaaatatttgctcaaagtacccgcagttcaggggcttccagatgcaggacagccatgaattactccgctgttttcttgatggtctgcacacggaggaaaatgaagcacggaagctagcggatgaagcttcaagtgcaaccattcctacaattgtcgattccatctttgggggtcagctgtctagtacagtgtccagcacagaatgcacacacagttctgttaaacatgaccaattccttgatctgtcactaccagttccatccaggaggcctccagccaagagtgtgtcatcaccaccagcaaagaggaacaaacaatccctaagagataggaataaaaatcggagatatgggaagatttcgacccgagtgactcctacaatagaggtgagcaacaaagaaaagattcaaacagttgctgaaggcaataattccctgattcctggttcagagtcaggacaggttgtcagtgagaaagagcctgagccttctgaatgcagtgagtcatgtgcttctgtgcctaatctagaacaaacaggtacttcaaatgtggaggatggcacttgctggttggattacattgatgatgcagatgaagcaaaatcagagattcttgattctgcagattctattgaagcgggacagatctgggaagacaagggtgttacttatggtccatttcttccacaggatgatgccttatcgaaagagcaggtcttgggttctgaacactctggtgaaaaccctattgatgatgcaacatcttcacagcctgttatcttgcttccttacaaagaatttggttccactgccaatgaaatggatggaaccacagaaaattcacagaaaccagaagatgcagttgctcctccagctgtttctcccttgccagaagataatgcacaacctgcatctgttggcgatggggatcaagatgactatgttggtcttggtgatatgttcaatgagcctgaagttacttctgaagtcaagaaagaaataggtacagttgaagatattgatgtgatggcctggagtagcaacagtgctgaagacgaggtggatgatagtaatgctcccgtatcagttgagggctgcttggctttgtttactgaaccggagttgctctctgaaccatggcactgtgagctctgctctgactctattgcatgcccaaacaccaatgatggcaaagatgatgagatggcgactagtgtcaatgaaagaaaggatggtgaggagatgatggcaggtggtgatgaaacacaagacggtgataagttgatcgctaactgcaccgaaaaggagggcattgatcagattatggcaactgacggttgctcagataatttaaatagtgatatgaacagtaaagaaggtggttgtgcaaattcttctttggttggtgctgacaactcagttgatgctaactttccagaaaatgggaaagttgctttactgaaaacaggttcgtcacttgttgacacaactgaacaggcagacagcaaagcatatcgtcgagagattagggatttgaacaactcagcagtggaatatacatcttcgagtaagcaacctcatgattctgcccagcataaggatgaacataatgtggatgtagcctctgaagaaacaactgcaccagagtgttcttgtgacaacgaatctgcctcttgcagcacaaccaataagaatgaagctgaatgtggtgttggtgctgaagaaattgttactagtagccttccatctgagacgcaaagaatcttaccaggtgaaaaagacaatgaagatgttgtcacgcggaatcatggcagaaggaagcgaatgaagatggttggcaaggcacatcaagggcaagataaccaaaatgaacagaaagagaatggaaaaaaggttttcagatctgcaatgagaaggatccttattagcaaggcgccacctgtattgacaattaatttgaacagattcagtcaggactcgcatggtcggttcaagaaattgaaagggcatgtgcactttaaggagacacttgatgtgcggccattcatggacccaaggtctaaggagaatgacaatacaacttatcgtctcgttggcgttgttgagcacttgggaaccatggcagctgggcattatgttgcatatgtgagaactggcaagattgggggtcggcagcagaggagcaccggctccaagtcatggttttatgcaagtgatgcacaagtcagagaagcctctctggaggaagttcttaactgcgaggcttacatactgttttacgaaagggtgggagactaagaaaattatgtctgccatccagcaacatcaatcagtctctatcagggcatgttcaaatggcaagcaatagataagaaacgtcattttttggaaaatcagaggctcagttagtcttcatactaattactatccatcaagtccattttgtttctttgattgagtccagttggccttgttaccatttgtctactcagtcaaagagatttttcacaagtggacttgagcagttaatctgttcatactgcctacagcctttttgtcttttgaagcatattttggaggtgtgcaaatgttcagaattggcgagctgctcatacatatcttggcaagggctctgtggagaagcccatagatattgttttacaaccaaacaaacaatgttcaccttagtactacatattttttgattattatgtctccagtctccacccctaaattttgagtgatgggggtgtatactgtaacgtgccttaggtccatttaaaagtggtaattacatacttttacccc

SEQ ID NO: 17161 - DNA, 1856 bp, Oryza sativa
  ref <308>: DATABASE ACCESSION NUMBER: AK067622
  ref <309>: DATABASE ENTRY DATE: 2001-12-06
gaagaacctggacgcagagcaagaaaatggacaggaagagggttggcatcatcggcgccggtgtgagcggcctagcagcatgcaagcactcactggacaaaggattcaacccaatcgtgttcgaagcagacgacaccatcggtggcgtctgggcacacaccttggagtcaacaaggctccaggcaccaaccacggcattcaggttctcagacctggcatggccagcaactgtgacggagaagtacccaagccataggaaggtcatggagtacctgaggtcatatgccagcgagtttgatctcctcaagtgcatcaggttcaatagccaggtgcttggagttgaataccttggtgcaaccgagggagagataatgcagtgggagcactggtctggcaatggtgaggcatttggtgctcagaaagatggggtgtggcgcctcaccgtgaaggacttgaaaattggtaacattgaggtttttctagtggattttctaatcgtgtgcattggaaggcacagcggaagcccaaatatcccagaatttccggcaaacagtggcctagagttgttcaaggggaaaatcttgcactcaatagattactcttacatggataatgcagctgaatttgtcaaagggaagaaggtgactataataggctctggaaaatctgcatttgacatcgctgcagaggtcgccaaggtgaatggtgaaacccagccatgtaccatgatatatagaacaaggcactggttggtacacaaatctagtatttgcggagttgacctcagttacttctatcttaaccgtatttcacagctactagttcataaacccggtgaaggatttctatattatgttttagccactgcgctctctcccttgagatgggcaatctcaaaagtaattgaaacttacttcaagcaaagcattcctttacaaaagcatgggatggttcctgactacagcttctcctttgccatgtcgtcttgcttgattgcaatgctaccagaggggttttatgataaggttgatgaaggcagcattattctcaagaaatccaagaggttcagcttctttaatgatggaatcatcctggaagatggaaatgaacacataaagagtgacattgtaattctagcaacaggatttaggggagatcagaaacttagagacatcttcacagcaaactggtgcaaagagaaagtggcagggtcatcagctactgcggtccctctatacagagaatgcatccatcctcggattcctcagttagcaattgttggatactctgagagccttaccaacatatatgcctcagaaaggatggccaattgggttacgcatttcctgggtggtcgcttcaaattaccaagcataagatgtatggaagagagtgtagcagagtgggctaaatataaggatctttacaacggaaagtactttcgcaggtcctgtataagcaccgttaacatttggtttaacgatatcttatgccaagacattggatgcaaccctaaaaggaagaaaggagtactggctgaatggttccagccatatgggcctgctgattatgcgagtctttactgacgactaccctacaagtatattcataggaaaagaacacaagtactgcctccaggatcctactgattgattagaaaggttttatatctttcaagtttgttgttatcataacaatataaaatagaatctaccatgttctttacacacttctactttcagagagagagagagagagagagagagagagttagttctcaatttatgtgaatttatgcttgtacttcagttaatatcatgtaaatctacctaaagtccaaaacatttgcaaaagcc

SEQ ID NO: 17162 - DNA, 871 bp, Oryza sativa
  ref <308>: DATABASE ACCESSION NUMBER: AK067623
  ref <309>: DATABASE ENTRY DATE: 2001-12-06
gtcctgttttcccgagctgagaagaggacagagcaagccgcatccatggcgtcagcggcgacccttccgaagcttcggttcaggccaaaatgccacggccacttccaggcaatctatccggttcatgtccatatcaagaactgcaatgcttgcaagtgtcagattcctacccacgggttgcttgtttccagcgcgagaagtcgtcctgtcctgccagtgtcggcagttggatcaggcgggggctcatcggttgctgaggacgagaggaggagtggcttgtcgctgcagaacgccaagacatccgttgtgtcacgcgacgatgaaacgatcaatgtaagagtggatttgcctggaaaggcgacacagaaggtgtttgatgaagccttgacaagcttggctcgtgatgcaccgccagttccaggttttaggaagtccaaaggagggagaacatcaaatataccaagcagcattctgctgcagatgcttggcaaaagccgggtcaccaagttcgttcttcaggaaatactcagcatcactgttggtgattttgtaaagaaggaaaacctgaaggtgaaccctgaaatcaagacaacccagtcagaagaagagctcgagtcatcgtttacgccgggttcatcattcagtttcagtgttgttctgcagcttgagaagcctgaatctgatgagacctcagagaactctgaatctgacgaggcttctgagccctcttcttgatagtagtagttcagagaagtgcttcacatttgtatcactccttgctattctcgctagagaatgttcttcagaagagcaagcaaacaatttcagatgagacattgcagttgatatgcaggttgcaagtgacacatcc

SEQ ID NO: 17163 - DNA, 2584 bp, Oryza sativa
  ref <308>: DATABASE ACCESSION NUMBER: AK067624
  ref <309>: DATABASE ENTRY DATE: 2001-12-06
gaggagcgccgctctgttcctctgctctcgttcttcttccctgcctgtttgtcatagccatggccgctctgcagagtggtgtggtggtattggcggacgccgctgacaccgtcgccgccgaccggccgttgtccggcaggcagaggccactggtgtccaaccgcggcaagttcgcgctaggtttcttccagccagaaaactcagagcattggtaccttggcacctggtactaccaaatctccaagcacacgccggtctgggttgcaaacaggggctctccaatctcgaatccggacacctcacaactaaccatagcaaccgacggcaacatggtattactcgacaattcaacaactgcaatttggtccacgaacatctccaacttcacctccaattccacggtcggtgtcatcctcgactccggcaaccttgtcctcgcagacgcatcgaacacctccatcatcctctggcagagcttcgaccatttcggcgatacctggctccccggcggcaagctcggccggaacaagctcaccggcgtgagcactcgtcttgtcgcatggaaggcacgcaatgacccagtccccggcgtgttctccctcgagctggacccgaacggcacgagccaatacctgctccaatggaacagtacactgcagtactggacaagcggcaactggaccggccgcatcttcaccggcgtgccggagatgacgccgaccggcagctacccgaattcgctgtacaccttcgactacgtcaacggcgagaacgagagctacttcgtgtacgacctcaaggacgactcggtcctcacgaggttcgtcttgggcgagatggggcagatccagttcttgacatggatgaacggcgccaacgactggatgctgttctggtcgcagcccaaggcgcagtgcgacgtgtactcgttgtgtgggccgttcagtgtctgcaccgagaatgcaatggcatcttgtagctgcctccgtggcttcggtgagcaaaacgttggcgaatggttgcagggagatcacacttcagggtgcagaagaaacgtggagctgcagtgcagcagcaatggctcggtggtaggaaggagtactgatcggttctacacgatggctaatgtaagattaccaagcgacgcagagagtgtggtggccgcaggtattgatcagtgtgaggaagcatgcctaagtaatgttcttgcactgcctactcctacaatggcagctgctcactgtggtacagagacctcatcaacctgcaagatgtgagtgtcattggtagccaaggcagcagcgcagttttgattcgattggctgcttcagaattgtctggacagaagcaaagcataccaagaagttgatcactttttctgtccttgctactggtgctgtactactcatgatagctgttttggttgtcatcttgagaagaagaatggtgaaggcaacaacacgagtggaaggttccttgatatcattcacataccgtgacctgaaatctgtgaccaaaaatttctccgagaagctcggaggaggcgccttcggttcagtgttcaaagggtcactgcctgatgcaaccatggtggccgtgaagaagctcgaaggttttcgtcagggggagaagcagtttcgctcagaagtgagcacaatcggcaacatccaacacgtcaacctgattagattgctcgggttttgttcagagaaaactcgaagactactcgtctacgagtacatgccgaatggttcgttggacaagcatctttttggaagtaaccaacacgtcctgagttggaacacgaggtacaagattgctcttggaatcgcgaggggattagactacctccacgagaaatgcagggattgcataatacactgcgacatcaagccagaaaacatactgctcgatggctcgtttgctcccaaggttgcggacttcggcctcgccaagctcatgggccgcgacttcagccgggtgctgaccacgtcgaggggcacggtggggtacatcgcgccggagtggatcgccggcacggccgtgacggcgaaggcggacgtgttcagctacggcatgacgctgctcgagatcgtgtcggggcggaggaacgtgcaggagcagggtggcgcggcggtggacggcctgctcccgttgctggcggcgagcacgctcggcggcggtggcggcggccgggatgagctggtcagcgccgtggtggacggccgtgtaggcgtcaacgccgacatgggcgaggtggagagagcatgcagggtggcgtgctggtgcatccaggacgacgagaaggcgaggccggccatggcgacggtggtgcaggtgctcgaagggcttgtggagatcggcgtcccgccggttccgagatcactccaaatcctcgcggacctcgcgaatcagtcgaataacttgcggtttttctccgatttaccgtcaaagtgaggcggttgcaggcttgacgccagtctgcgtttgggcggctaagcgttaaaatcgccagaacttgcatactcacgttaccaaaacttgctatacttcatttaactaacatgcttaacatgtggccaat

SEQ ID NO: 17164 - DNA, 1209 bp, Oryza sativa
  ref <308>: DATABASE ACCESSION NUMBER: AK067625
  ref <309>: DATABASE ENTRY DATE: 2001-12-06
gatagttttggcgactcggcgagtaaccgttccaaatcgctctcaaccgcgccatggccggctagactgcatgctaatgctacacatttatattgtacaaccccgccggtggggaggaagagagagcgagagagcgaatcatcatggctagtcatgtcttcatgatccggcaagagacggcgccggcgcagtggtggttcctctcgctggctttcgtcggcgccgcctacgccgccaccgtcacgctccgtttcgtcgcctacctcgcgctctgccggtgtcaccggccgaaggacgacctccgccgccggtacggcgaatgggccgtcgtcaccgggccaacgtccggcatcggccgtgccatggcgctggagctcgcgcgccacggcctcaacctcgtgctcgtcggccgtgacccagccatcctccgggagatctccggcacggtcaggtctctccacaaagtgaagaccaagaccgtggtgtttgacctgtccctcgtctggacccccgatggtgatgagccgctgcggcggctgcgggaggcggtggaggggctggacgtcggggtggtggtgaacaacgccggcgtggcgaagcccggcgccgtctacctgcacgaggcggacgtggaggcgtgggtgaggatggtgcgggtgaacatgtcggcagtgacggaggtgacggcggtggtgctacctgggatggtgtcgcggggtaggggcgccatcgtcaacatcggctcggctgggtcggagtacatcccgaccttacctctctacaccatgtacgccgccaccaaacggtacgtggctcagttctcccggagccttcacgtcgagtatgcaagtaaagggatccatgtgcagtgccaggcgccgttcttcgtggatacgaggctgatgttcaggttcgaggaggcggcgggcggcgtatcgctgttcacggtgacccctgacgcgtacgcgcgcgcggcggtggcgtggatcggccgcggcggcgcgctgtgcacgccggccgtccggcaccagctgctacggcgcatggccgccgccgcgccggactccgtccacgactggatcctcctgcgcttagccacctggaacagaaaacgttgtttcagcggatctgagtgacagatgacagattatgtgatgctaaagaattgccaacaaataaataatgtgtcttcgaaaagtgcaattgccg

SEQ ID NO: 17165 - DNA, 2326 bp, Oryza sativa
  ref <308>: DATABASE ACCESSION NUMBER: AK067626
  ref <309>: DATABASE ENTRY DATE: 2001-12-06
ggaaggactcacgccgccgctgccgcctgcccgtacgcaggcacgagcacgaggcagagctccagctccgcctccgcctccgcctcctctctctctatacgcttcgagctccgggaggcccctttcatggtttcctccaccgttcatgggccatgccttccctctccttcctccgcttcctctccgggaggtcgctcgcggatgtgtgtgatggggtgaagaggaggcttggattgggggatgatgaaggccgggacgaggaggctggtctggccgcggagcaagcgcgtgcagcggtggaaccggtggatcctgctggcccgcgccgccgcgctggcggtggacccgctcttcttctacgcgctctccatcggccgcgccgggcagccgtgcgtgtacatggacgccggcctcgccgccgccgtcacggcgctccgcaccgccgccgacctggcgcacctcgcccacgtcctcctccagttccgcgtcgcctacgtctcccgcgagtccctcgtcgtcggctgcggcaagctcgtctgggacccccgcgccatcgccgctcactacgcccgctccctcaagggcctctggttcgatctcttcgtcatcctgcccatcccacaggtcatcttctggctagtcataccgaagttaatcagagaagagcaaatcaaacttatcatgacaatgctgctgctcttattcttgctgcaatttctccccaaggtgtaccacagtatttatatcatgaggaaaatgcagaaggtgactggttacatctttggaacgatatggtggggattcgggcttaatcttttcgcctatttcattgcttctcacatcgcaggtggatgttggtatgtccttgcgattcagcgtgtcgcctcctgcctccaggaggaatgcaagataaagaacacttgcaacctaacatcacttgcttgctccaaggagatgtgttttcaccttccttggtcagataagaatggactggcatgcaacttgacttcttttggccaacaaaacattccagactgtctaagcggcaatgggccctttgcttatggaatctacaaaggggctctgcctgttatttccagcaattcacttgctgttaaaatactctaccctatattttggggactcatgactctcagtacttttggtaatgatcttgagcctacaagcaattggcttgaggtgattttcagcataatcaatgtacttagcgggttgatgctcttcacattgctgattggaaacatacaggtcttcttgcatgctgtcttagcaagaaagcgaaagatgcagctgcggttccgggacatggaatggtggatgcggcggaggcagttgccgtcccgcctgaggcagagggtccggaagtacgagcgtgaacgctgggcggccatcacgggagatgaggagatggagatgatcaaggacctgcctgaagggctcaggcgagacatcaaacgctacctctgcctcgagctagttaaacaggttcctctgttccatggcatggacgatctcatcctggacaacatctgcgacaggctgaggccgctggtgttctccagcggcgagaaggtgatccgggagggcgacccggtgcagcggatggtgttcgtcctccaggggaagctccggagcacgcagccgctggccaagggcgtggtggcgacgtgtatgctcggcgccggcaacttcctcggcgacgagctgctgtcgtggtgcctccggcggccgtccctggaccggctgccggcgtcgtcggcgacgttcgagtgcgtcgagacggcgcaggcgttctgcctcgacgcccccgaccttcgcttcatcacggagcagttccggtacaagttcgccaagcgagaagctcaagcggacggcgcgctactactcctccaactggcggacgtgggcggccgtcaacatccagctcgcgtggcgccggtacaaggcaaggacgacgaccgacctggcgtcggcggcgcagccgccgtccgccggcgggcccgacgacggggaccgccggctccgccattacgcggccatgttcatgtcgctcaggccacacgatcacctcgagtgagagcagccgtggattgggaccgagagtgacggggcatatgcaatgcaaccgtacgcgcatggagcggaccaccctgcgccggccatatatcattgattccattgtagtacgatcgtatcctgctgccggtcttgacaattgattagcatttgtcattgtataagatgaccaataatggttatgatgtagttccaacaaaataatgcaatgtgctccttggttggcgcc

SEQ ID NO: 17166 - DNA, 2169 bp, Oryza sativa
  ref <308>: DATABASE ACCESSION NUMBER: AK067627
  ref <309>: DATABASE ENTRY DATE: 2001-12-06
gacccgccagccagccagcgcctcctcccctctcctccccacgcaacccgatccattcccaaatccctcctctcatcaactcgactctcggtcggcgtcaccggcgtcggaggcggaggcggaggcggcggccgcgtcggcaaggtagtgctgtgctggatcgagtcgagcagctggctgcgcgcgcggtttgtggctctctgtgtgagtccggcgctgctgcttcaattccttcttccccagggcacctcccgtgagccgccatctccctccctcacctacctctggattcgctccagatccgcccatgagtaggcccccacgcccaccgcctgctcgccatcgcgcctccactccaccacaccatgccgatccccaccacctctgacactactccgcccctccccctctctcattcccatggaggacctcgccctgcccgccgctcctcctgcccccacgcttagcttcacgctcttagccgccgccgccgccgtcgccgaggccatggaagaggctctgggcgccgcgctgccgcccctcaccgcccccgtccccgcccccggagacgactccgcctgcgggagcccgtgctccgtcgccagcgactgcagcagcgtcgccagcgccgacttcgagggcttcgccgagctaggcacttcgctcctcgcggggcccgccgtcttgttcgacgacctcaccgccgcctccgtcgccgtcgcggaggctgccgagccgagggctgtgggggccactgcgaggagcgtgttcgccatggactgcgttccgctctgggggctggagtccatttgcggccgccgcccggagatggaggacgactatgccgtggtcccgcgatttttcgaccttcctctgtggatggttgccggcgacgcggcagtcgacggcctcgaccgggcctccttccgccttccagcccatttcttcgccgtctacgatggccacggtggcgttcaggttgccaattactgcaggaagaggatccacgccgtactgacagaggagctgcgtagagcggaggacgacgcgtgtggctctgacttatctggccttgagtccaagaagctgtgggagaaggcgttcgtggattgcttcagtcgtgttgacgctgaggtgggaggaaatgctgcgtctggagcaccgcctgttgctccagacaccgtggggtcaactgctgtcgtcgcagtcgtttgctcgtcaaatgtcatcgtagccaactgcggtgactcgcgtgctgttctctgccggggcaagcagcccctgcccctgtcactagatcataaaccaaatagggaagacgagtacgcgaggattgaggcgctgggtggcaaggttatccaatggaatggttatcgagttctcggtgttcttgccatgtcgcgatcaatcggggacaaatacctgaagccatatataatcccggtccctgaggtcacagttgtcgctcgtgcaaaagacgatgattgccttattcttgcaagtgatggcctttgggatgtaatgtcgaacgaagaggtctgtgatgctgctcgcaagaggatattactatggcacaagaagaatgcggccaccgcatcaacgtcatcggcccaaataagcggtgattcttcagatccggctgctcaagcagctgccgactacttgtccaagcttgccctacagaaggggagcaaggacaacatcactgtcgttgtaattgacctcaaggcacataggaagttcaagagcaaagcatgacattgcctccatgaacaataacaatagtttataggaagctagaaatgtgggaaatccaagacaatttatttagctgctgcaccggtacaatttgtttagctgctgttcagtactggtgctgctgcagctgcagctgcttctttgccctcgccatttatttctgccgagggatgtactactagtatactgtatttttctacacggtacagactcccaaatctgattcagggtcgaggacataaggtggatctgggaattttggggtctctcaagacaagacagaaaacataacaaaatctgtagatgtaggtaggagtcctaggacagattgggtttctgcctctggcattaatcgtttttgttaaccggtaaagatactgctacttgcaattgctgtttcatatatactcc

SEQ ID NO: 17167 - DNA, 2165 bp, Oryza sativa
  ref <308>: DATABASE ACCESSION NUMBER: AK067628
  ref <309>: DATABASE ENTRY DATE: 2001-12-06
gatcagcttcctggccattattatctatcagcataggttggagaagtagtactggcaaccaggagtccaggacatctcctgcccatcatttctgctgttcttcattattcttgtctctactctagtaccaaggagaatttgcatttccttctgttcttcagaccctttgctgagttctgtagaagctgggggattggagttgggagagagagtgaagatttctcatcatccagaccaagctgaatcatggccttcttcttctgttctgctcattgctagctacactgcatagcaacagctcatgatatatcagcctggttcttggtgactgaaggtctaggaatccatggaagacgcagcatcagaggtgttcatggaaacaaccatttgttgtgcagaaacaccaagagctagccattcatcttcttatctgcagcaatgtcactcgagaagcgttgtaagcacacatggaaatgtattggacatatcgcctcgactctcttatcacaaacctacaaccaacaaagataagatgctccgcagaagatattctcttaacctgccagagcatttgcctgagcatcacgtgattacaagtgcagaacaaagtgagaaaaccatatcaaagtctattgcagacttagtttgggagatagcagcccttgaggaggaagttgttcgcaaggaactgcatttgctttccctctacagggcagcatttgatcaacacctaggtgtatcccctcgtgtttctacccaggtggatcaagaaatacaccatcagaaaagcagaaagaaagctgatgaaggtgccctccgattgagaaatatcaaggagtcagcatcctacaacttgccaacagtatcaacagtttcagattctaaacatgggctgtcgagatcatcttcaggacattctagccttgcaaatttcttgagtgcttcaatcgctgaatatgtgccaaagatctcttgcaaactttcggaggacatcgtaagatgcatttctgcagtatactgcaaacttgcaagccagccatcacaaaatttggcggattttgagactttatcaactccttcattctcctcttcatcaagtacattttctttaaagcaccgtgttgatagttggagtccccgatgccattacaatgtcaacacaagctctgacaaatatgattcattgaatgagaaaagtgaacaatacaatgggatgataatatgcccaaggatatatatggatgcagaaaagtttgaatatgcctctaaaatgctagagactgtcagatcgctgataaaacgacttgagaaaattgacccaacaaaaatggcacatgaagagcagctctgtttttggatcaacatccacaacgctttggtgatgcatgcttttatggcttatggacttcaggagaaacgcatgaaaaacacagacatgattctgaaggctgcatataatgtgggtgggctttcagtaaacgcccaaattatccagaactcaattattggatgccaatcccatcgcacttcagtgtgggtacggactctatttactccactgaaaaaaatcggcatcagggagctccatacatccatatgctcttcatcctccagagccacttgctcattttgctctttccactggagcaatttcagatccacctgtgaggctgtacactgccaagaaagtgaatcatcaactggatcaagccaggactgagttcattcaagctagtgtcatagtcagaaagcagacaatcttcctacctaaagttctccatcattatgcgaaggatgctgctctcgagttgcctgacttggttgagatggcatgtgagatcatgcctgaagctcaacaaaaggaaatcagacaatgtcttcggagaagaatagacaagtgtgttgagtggatccccttcaaatcatctttcagatatactatacataggagtttggctgagtaggcactgttttcccactttccccaattgtgcttgtaagtaatgaacaaataacaaatgattggtgtatatgtgtagtgtaaataggtgattgtgatagcttccaaggataggaatgctgtagtaatgtcttccccttactgctgtagtggtacaactcacttgggcatttcaactgagaagagcatgccgacaagaaaatcc

SEQ ID NO: 17168 - DNA, 3301 bp, Oryza sativa
  ref <308>: DATABASE ACCESSION NUMBER: AK067629
  ref <309>: DATABASE ENTRY DATE: 2001-12-06
ggcatgcgccatctctgccgcgcacctcgcctccgccgcattcaatccgtcgcgcatcatcgccacaacgacaaatcctcatatccgacgctctctcccaagcgtcgtcgctgctacctccactccgcctcggtcctcctcgcctcctcgctcctccctgcgtggcgccgctccgccgtcgtccccttgcttcgctccccctctcctcctcctcgcctcctcactcctcctcgcgtggcgcacgccgccgtcgtccccttccgccgccgcccagacgccgccgtcgtacccttccaccgctgcccggacgccgccgcccatacgttgccatcgtccccttccacagccggagccgcggtcttccccatcggccacacaaatcgcgccatggcaactcacaaaattccccacgcgtggaccaccaaggctccatcgcgctaatcccgcggtggctcccctaatcatgataacgccgtcgccgcgcctttgaacgctgctgcaccatccgtcatcatccgcacttccgccgccgtcgtcaccgcaatcagtatcctggtggtccagggtttccaccagtgccgctaccccgtctcgccctggttgtgcatactcccaccagcgtcgcagctccgtcgtcgccctgcaatcggtgcctcagtggtccagggctccgctggcgatgccaccccgtcgagccacggtggtcaagccttccgccgacactgagcctccatctttgtcgctgctctgtgagtcctctagtgttgccgccattggaaggggatagactcagcagctaggcctcccagccgtgtgcctccctctcttatgttggtgatacctgattcaactcaaatcgactcttttcaatccccatttttcctctttgtgaattttccccattagttctctagctgaattttcttattcaagcttaatggtatgcatctccttttagttatgttattcggttcttctttacctttgtggataattgcaggctatatattacgtgattggtgctgcagtttcatacatactaacattatagttgtcatgttgaatatcttgcagattgtcttacagagagcaaattcaaccatgcctagtctcttatcttttttatttagtcgaaaaataacagttcctttcttactgaaatggaaaatgcacgaaaccctacactgcaattttctgcaatgacagggtaaatagccatatcaagcccgtttgttgctgttgggctgcctgcctcttatttttcttttttatttctgtgatcatcaacaattactggattgtcgtcccttatggtctttcatttgattcactgcacggttgataagttcactcatttgctgccaattgttgttgactaatttctttttcatattttcttttatctaaatatatttattctgtacttctattgggccatatatagtctgatttagtgtttgtcatttcaggtgacattgcttcttagccaattggagcacaaaagaaaatccaataaacaggaaaacatgatttagtattggacatcatttctgaaagcttttgcacttaagaaatgcaaatggacaagaataaggtatgcggtaaacatgatacttctgtgtggcttactacttcactggtcctactactttagagctatatatttttgtgtgactgtagatgggttccattaatggatggctgtgagaactaacatttcaattttgtatatatggtagagcttcctcgggtggttggtagcagaacaagatagtataagttttcaagtggatagaactaaagcaaagctaagaattaaacatgtgtaatggaagtatcaggaattcagaatggtagttggcgcatatggaatggatttgatgactgaaaattgtgtaccctgtgaagaattcattgctggttttaagttttaacttcataccgttatcatttcaaggaaagaaggtcttgcaatcgatcttctgaagagctgagaaaggtacagcttaaaaccattatttgttctatagtgaagttgatgtgtgtatactaaataacatcgtcagaatgagcaaacgctataaacgaaaatcaaccttcaaatataatatgtataagctttaaatgttaatggccacttatgcaaaatgcactaggtaatgttgttcttcattttcaggagcgatttgtaaattaggttaatgaaacaaaatattccacgttttgcccaatttctataaatttgagtacctgaattcactcacaccaaatggattgccacatcttttaaaggtcaaatttaattgtcttgtcatattgctgcgcaatctcgacccgcacaacgggttgtgcaatggaactaggcttatgattagagcatttcagaattattccattagtgctgagattgtcagtggtgcacatgctgggaagagggtcttcataccacggattccattatacccctcggaggatctttcattgccttttaagttcaagcggaagcagttttccatccgtcttagttttgcaatgactatcaacaaagctcaaggacagacaatcccaaatgtggcaatctatctccctgaacctgttttctctcatggtcaactctacgttgcactctctaggggtgtctcgaggggaacaaccagaattttggccaagccaaggatagacattgaccccactggaaaaagcacaaagaacattgtatatcgagatgttttattctgaacagattgtctaaggttgattagagagtaccatgttcagattcttctgaaggcccagttctttatattattcattggactgttgagcttggttgtttctggaggaccaggttgcatggatggtagaatgtggttgcattgagagtactatgttcagattcttctgctggccctgttctttattttttttttttcactggactattgaacctggttgtttctggaggactacggagcatggctggagtatcatattgtttgcaccaagtgttcgatgatatctagaatatcatattgtttacaccaagtgttcgatgatatctggaggataacctgatgtggattatgagcttggctttgtcttgacaaataatagatgagttgatgcttgtaagagaggtctcgatgatctgctaattgccactgtttagttacatggggtgaaataattttgtgcaaacataactgatgtatatgacaatacgtctctgatttggatcttgtaaacttatttgatttgggaaggactgcaacactcgaaatttttattggaaggacaattc

SEQ ID NO: 17169 - DNA, 1523 bp, Oryza sativa
  ref <308>: DATABASE ACCESSION NUMBER: AK067630
  ref <309>: DATABASE ENTRY DATE: 2001-12-06
gtggatcagaaagagagacaagagaagagctagggtttcatctcatctccagccatggcgtccgccgcctccccgccgcgctccggcgacgcctccccgtcctcccctctcctcccttccccgacgtcccccgaccgccgcagcggcggcggcggaggcggaggacgcctgcttccggggctgcgcggcgcggcgcggttcctgggccgcacggggagccgccgcctgatgcgggagccgtcggtggcggtgcgggagacggcggcggagcacctcgaggagcgccagaccgactgggcctactccaagcccgtcgtcgtgctcgacgtgctctggaacctcgccttcgtcgccgtcgccgccgccgtcctcgccgcctcgctcccggagtccccctcggtgccgctccgcgtctggctcgccgggtacgtgctccagtgcctcttccacgtcctctgcgtcaccgtcgagtacaggcggcgccgggaggcgcgcggcggcggctttggggcggaccagggggctgcggctgatggggatttcaagctcagtattgtgaagcacctggagtccgcaaacacgatgttttctttcatatggtggatcattgggttctactggatatctgcaggtggccaagctttgtcccatgatgctcctcaactttactggctctccattgtgtttctggcatttgatgttttctttgtagtcttctgtgttgccttggcctgtgtgattggcattgctgtctgttgctgcctgccttgcattattgctatcttatatgctgtaactgatcaggaaggagcatctgaagaggacatcaacaacctgtccaaattcaaatttcggacaatgggtgatgcagacaagctggttgctggaattgcagcacctgtgggtggagtaatgactgagtgtggcaccaatcctcctgttgaacacttcctttctgctgaggatgctgagtgctgcatctgcttgtgtccctatgaagacggtgcggaacttcgagaactcccctgcaatcatcatttccactgtacctgcatagacaagtggcttcacataaatgcaacatgtcccctgtgcaagttcaacatcatcaagagcaaccttggtccagaagacgtctaggtttcacaggacgagcaatctgttgaaggattgatatgctccagttgcgttctttagctatgggttccttcaggtgtaagtatggggtataggtgatgcacagctggttgatcagtattcgctcctgaatgaaatgttttagcagtttcttgatgccggtagagatgtacattccttctctctaagtcaattgtgtcgcagattctcattttagccttgtaggaagtatttgaattgaggattctcatgtacgttgtgttagcaagtgttgaataaatacatggaaatgcagaggtttgtaagaagaaaaatggttgtggaattggagctttgttaacagcacatgctgtctccttaatatgcagtagacgtacattctaccc

SEQ ID NO: 17170 - DNA, 3298 bp, Oryza sativa
  ref <308>: DATABASE ACCESSION NUMBER: AK067631
  ref <309>: DATABASE ENTRY DATE: 2001-12-06
gagttcgcccgccgccgccgccgccgatccccatccatcccgcgaggcgcgagcgagcagggcgccgtcggcgccgtcgttcgtcatgctgcttccgccgcatccaggcagaacattaccagcctatcatggagacaacagatttcttcttggagcttgtttcctgagtaaactgcctatgctgcgcccaatgaagttgtctttggtatgcagtgctaatcccaacaaccataggtcaagaagttcggatatcacacgccatcagaagggtggatcagctcggaggaaaagtaagccttaccaggagaaagatgactctgagaatattgatgaattcgatactgatattatgtcctccaaaaatggaccacccatctctttgacaagcaattcccgtcctcaagcaacatcagtcccaggggaaagagagaaggagatagtagagttgtttaaaagggttcaagcacaattgcgagcaaggggaaaagggaaggaggagaagaagcctgaacaagcaaaagcacagggtgagaggggcagtgttgactcccttctaaatctgcttaggaagcactcagtggaccaacgaaggaagagcggtgatgagaaagaacagagtgttgaccaaacaaagagaagcaatgaatctggaaataaacaaaattcaagcatcttcataaagaatgacactcaggaagaacagaaaaagccacatcctgcagccttcaaaaggccagcttcaaattttaggcgaagatcccctgttcctaatgtaaagttccagcctgttaccaatgttgatgccgaacgagtcatcaataacatcaatgatgccgtacaagaggctaagccaactttggaaaataaggctgctacagatgaaccagactcggtttctacattcgaacctaattctgtaatagaaccagaaaacctatctttggatgaccttgatcatatttcagatgatgaacctgatgcttctgatactgatgaacccagtggagaatatgatgagccatctttgcaaatcccaagtgttccaattattgatgaatctcatgatacgactctgaaatcttccttaggaggtcctgatttaagcactttgaaggtcacagaactaagagaacttgcgaaatctcgaggaatcaaaggatattccaagatgaagaagaatgacctggttgaactgctgagcaacatggcttgatccatcagcagccctgtcaacttggctctgttttgtcccttgttagtcacattgtcttgggcatatgcactatcttgccattcctatcttatctagatgaagttcttttaggtagaaaactgtaaatgagcaaggtaaacaatgttctgttctggttttatcgttgccctttctgttacctagcctctagttaccattgtttttgcgtaaatccttcatcagaattgaaccctggattggccataagactggcaacgattcgacgtcatgctgattatgttctgatgtgtagtgttctattcttatctctgttgtttctcctttctcatggcagctcttgtctgctgttgcatggtttctctcgtttacatccatggttgttactgaacgtttgatgcacaagtcttttgtgtgttcatgaaaagaataagcagaagcaacctataatggatttctttggtgttcaatcgtttactgtctttgttcagagccaaggtactgattgggaggatttcctgggaattgtctgcctcccgattatcaattcaacaatcagcttcattaaggaaaacaatgcaggcgatgcagctgctgcactcatgtcccggttggcgctaaaaacaaaggttcttagagatgagcagtggcaagagcttgatgcttccacattggtacctggggatataatcagcatcaggtttggtgacattgtccctgcagatgcgtgcctacttgagggagatcctctgaaaatgaattgccacacgccgttcatgcgaaagatgtcgatcactggaatgtcagactagttgctccgtgtaaataatttgatcacatttttgtttgtccttcatcttgtagtcagctctcactggtgaatcccttcctgtcaccaaaagaaccggggaccatagtgttcactggctcaacatgcaagcatggtgagattgaagctgttgtcattgcaactgggatacactctttctttggcaaggcagctcatctagtggactccactgaggttgttgggcattttcagaaggcaacttctgtatctactcaatcgccattggtgtgattgttgaggttataatcatgttcccaatccagcaccggtcataccgagatgggattacgacttccctctgtttatggttctgatcatagccatactaaatgatggtgacgatcatttctctctgaattttactgtttctgaagcataaatatataggttcggcatctgctttgatcaggaactatcatgacaatatcaaaggatcgcgtgaagccatcaccaagcccagatacttgcagctggagttgtcatcgtagcctaccttgcattggtcaccatgctgttctatttgtaactcctcaataggcttcatgtctgcacattaccagaagcaaattttcagatgattgcataaaatagataacaaaacaaagtatgatgatcagcaaggctgatatcagctttgcgttttcttctccttatcacaaagaatgcaaggactgccccagagcttccaccaaaacatgaaccaccattgtcttgacctgggctgtttggacggtttggtggaggggggagctgtatatgatggaggtggtggatttccgtcaattctgtacacaaggatcataatagagatcagcgagtttcagctactagttccatggagctcgtactgctcgtgcgtgtgtacttcctttaggtggtataacttgcgacagaggttcttttgctcctcaagtacaggcccaagttgggccacaagttgcgtgcccacaagcaaaaaaaaaaaaatcacctgtgaaaaggtaatgccaagtgctaacgacttggattggtcgctgtaaactcacgaaatgcatagtaatatgcatttgtgctttcacgtcagtaagatgtgatgggtgcctaacccaggccgtgctaatcctatctgttagtttatctgttgactactgtgcatcattttgtccaactttttttagaattacactattttgtccattttgtgtgtgcgtgcattggtctatgacgtatggatgaccataatgaagttagtactgttg

SEQ ID NO: 17171 - DNA, 1704 bp, Oryza sativa
  ref <308>: DATABASE ACCESSION NUMBER: AK067632
  ref <309>: DATABASE ENTRY DATE: 2001-12-06
cagagctcaaaaccccgcaacaacccaaccctcgtgaccaacccatctccccaccaaccccggccgccgccatgaccggcgccgtctccaagctcgccgccccgaggccggcggccgccgcgccgctcccgccggcgtccgtccgctccgcgttcctcgcctccgccccctccccgcgccgcttctccgtctccatcgccgccggccgcgccaggagccccatcattgcgatggcttctgacaaggaaggaaatggtgccccaacgaagaggacaacccttcatgatctctatgatctccagggtcagtccccgtggtacgacaacctctgccgtcctgtcaccgatttgctgccccttattggcagcggcgtccgtggagtcaccagcaacccatcaattttccagaaagccatctcgacttccaatgcatacgatgaccagttcaagcagcttatattagctggaaaggacgcagagagcgcttattgggaacttgtcatcaaggatatccaagatgcgtgcaaactttttgagcctatctacgaccagaccgatggggcagatgggtatgtttctgtggaggtctcccctaggctggcaaatgatacccagggaactgttgaagctgcaaaatggttgcacaaagtggtcgacaggcccaatgtctacataaagatccctgctaccgcagaatgtgttccttctatcaaggaagttattgctaatggcattagtgtcaacgtcacacttatcttctcgattgcaagatacgaggctgtgattgatgcttacattgatggacttgaggcctctggtttgagtgacctatcccgagtgaccagtgtagcgtccttctttgtcagccgagttgacacacttattgacaaaatgctcgagaagatcggaacacctgaggcacttgccctcagaggaaaggctgctgtagcacaggcaaagctagccaaccagctttaccagaagaaattctctggcccgaggtgggaggctttggtcaagaaaggtgccaagaagcagaggttgttgtgggcatctaccagtgtgaagaaccctgcatacccagacactctttacgtggatcctctcatcggacctgacaccgtttctaccatgcccgaccaagctctgctggcattcatcgaccacggcacagtttcgaggacaatcgacgcaaacgtttcggatgctgaaggtgtatacagtgccctggagaagctgggtatagattgggatgaggttggcaagcagctagagctggaaggtgtggactccttcaagaaggccttcgacagcctgcttgggagcttggaggagaagggcaattccctcaagaagaccgtgagcctgtaggtgcaaagatagctgaaatgttttgaacgctggcaatggcaagtgaacgattactaaataaatgctctaccttgctggctctctccctctctcaaactctcttgtgatgtgctgctctcgaatttctgggtcagcttttgtattctaggcgctcttggctgctatttgtgtaactgaggttgcgaactgctatgcattttctgataaattgttgggcaagttgatttcatgtgtacatctagactgtaattttttttctggtcaacattgcgagactgaattaatgatgcatctcggagaggttaaaatgacatgtaaaatactgtaataaagc

SEQ ID NO: 17172 - DNA, 1081 bp, Oryza sativa
  ref <308>: DATABASE ACCESSION NUMBER: AK067633
  ref <309>: DATABASE ENTRY DATE: 2001-12-06
ggcgtccgcccatagatcccacacaaatccgtccgagtccgactcatcccaaattccccggccatatccttttcttcgcctgagatcaccacctcctcctaccagcagcgagaacaaccagacggaggagggttaccccctgcttctgcttgcgttcgcgcacgcatggatcccacaaccaccacgacagattccgagtgcgacttcatcaagaagatccctagttggatgataaagaattcgccaatgcattgtatggaggccggccactttggcaaggatgccgccgccgccgccgccgccgccaccgcggacgccatggaacatgcactcccctgcagcgatcttcaccacctgagagtgggcaagacggcagagcagagctgctcggtgtgcctcaagaatttcgaggagggcgactacatctggtcgatgccctgctcccacactttccatcagctctgcatcttgggcgaccgctcctgcagggtctgtcacccggctgctcccccatccacggaggagaaaccggaggcccctcggactgttaattgattgaatgaattctcgcggaatcagtgcttgtttaactgatcaatgtcgtggcgtgcaacaaatctgcatttctctgaaaattgcaacaaacctgctactctctgaataatctgaattttttgtctccagttttcctgggaatcccttatggaatatttctttttgtctccagttatctgtgaatcccttatggaaatttgtaaccggatgtttaaattcacatagttatatatatttacttctgctttcttgatattcagttcaatgtctgtaatagctctttgggtcttagtatatgttagcctggttttcttgggccaagccaataagagaaacaaaagggatcaacagatttgagaattcgtaattcagtgtatatatagttcctgaaaataattcagggagggtgtccataaaaatgttacagccggtgatgattgttatcatttttttttaaaagtagctatgcctattttcattgtattactgttttatgtatgacaatgacagtgtcccaatatttccc

SEQ ID NO: 17173 - DNA, 1251 bp, Oryza sativa
  misc_feature (547)..(547): "n"=any one base of a, t, c, or g
  ref <308>: DATABASE ACCESSION NUMBER: AK067634
  ref <309>: DATABASE ENTRY DATE: 2001-12-06
gggactcaaagccaaactcccccacctcgccgcccgatccgacgcgccggcggccgcacgcagctctccggtggccgtcgaaccatccgcgcgggcggccacgtcgctcgccgtagccgcccacaaacgaaggattcggcgcatcccgccggctcgcggtgatctgacaggaggaaggccgtaggcgttagctgctagtctctgcgttgggcgatgtcgagggttcgcgacaggaccgaggacttcaaggagtccgtccgcgtcgccgcgctcggccatgggtacacggagtctcagttagccgtgctcatgtcttccttcatcatccggaagccggcccccaaattaccctttacaaaggctgcaatcaagacgcttgagagtatcagggaactggagaagtttattgtgaagcataggaaggactatgttgacttgcatcgcaccacggagcaagaaagggacaacattgagcatgaggtcagtgtttttgtaaaagcatgcaaggaacaaatagatatcctaaagaacaggatccatgaagaanaaggtggaagtacaaagacatggcttggtacaagcgatgagagctcccggttggatttgatagctcaccagcatggcgtggttttgattttgagtgagcgtcttcactcagtaactgtgcaatttgatcgtcttcggaccatgcgttttcaagatgctattaacagagcgatgccaagaaaacggattcagaagaaacgagaaaccaaagctgctgaaccatctaagccaaaccttgtattaaaatctgatgtttcaaaggttgaagatcaggaggtctctactgcaccactaagagttcaagaacaactcttggatgatgaaacaagagctcttcaggtggagttgacaaatcttcttgatgctgtccaagaaacagagacaaagatgatagagatgtcagcacttaatcatctcatgtcaacacatgttctacaacaagctcagcagatccagtatttatatgaccaggcagttgaagctacaaacaatgtggagcgtgggaacaaggagctatcccaggcgatccagcgcaacagcagcagtagaaccttcctcctacttttcttctttgttcttaccttttccgttctctttctggattggtacagcaaatgaagcttatgtaaacgccgtgattttttttcccattctgaaagtggatcaagttatcagtcaatccatgtctcgctaggtttactggcc

SEQ ID NO: 17174 - DNA, 3609 bp, Oryza sativa
  ref <308>: DATABASE ACCESSION NUMBER: AK067635
  ref <309>: DATABASE ENTRY DATE: 2001-12-06
gactgggagtctgggaggagcaagaagaggagagaagagagccatggccaagaacaccgagagccccaaaacctagggaaagagaggaaaaaatcgattttcttgggtggtggttgagcctgcagtgaagttcatcagggaggaaagggaggggattaagggaaggagatacaggaatcaatgggaggccaagaacaggtggccatggcggagaggaggccttgttactgtcgcaacaatggcttcttgctgctgctggtacaagttctcctcttcttgttcttgtttcttgattcgtccatggtcgccactgccgcgtcggcgccggcaccgctaaatacgactcaggtatcgatcatgaaggagctttctggcttggttactgccagtgccaagtggaacacgagcgattcgaatccatgccgatgggatggagtgagttgctcttctagctccaattccatatcagttgtgaccaaccttactttgtctgggtatggtttgtccaactccaccatatttgcaaccatatgctctcttgacaccttgcaaatccttgatctctctaagaattccttcaccaattcgatagagcaattcttcacctcttcttgctccatgaaggctggattgcggtcacttaatctcagcagcagccagctatccatgcctcttagtaatttctctggttttccccttcttgaggttcttgacttgtccttcaattctttcagtggtgatgtcagaacccagttgagttctttgctcaagctgagaagcttgaatcttagtagcaataacttggctggtgatgttcctacaagcatgaccccgtctttggaggaattggtgttgtccatcaacaatttcagtggtagcattccaatagctttgttcaattaccaaaatcttactatgctggatcttagtcagaacaatctaaatggtgatgtaccggatgagttcttaaagttacccaagctcaagactttgctcttatcaggtaatcaactgagtggcaatatacctgtgagtgtgtcaaatgttgcaagccttgctcggtttgcagctaatcagaacaattttaccggtttcatccctagtggtatcaccaagaatgtgaagatgctggatctgagttacaacgaacttagtggagtgattccctctgatattcttagtcctgtgggactgtggactgttgatctcactcacaataagctcgaagggcccatccctagcagcttgtctccgaccctctatcggttgaggcttggtggaggcaactctctcaatggaaccatcccggccaccattggtgatgcatcgaccttggcttatcttgagctggatagcaatcagttgacgggaagcataccattggaacttggcagatgcaagagtttgtctttgctgaatctggcatcaaataagtttcagggtccagtgcctgatgcaatcagcagccttgacaaactggtagttcttaaactccaaatgaacaatctggatggacctatcccaagtgtattttctaatttgacaagcctgatcacattgaatcttagtggtaattcattcactggagggataccaagagaaatcggcaagctgccaaagctttccattttgaatttgcaatgcaacaagatcagcggcaccattccagattcactccatttattaacttctctaattgagctcaatctggggaataatatcttgactggtaccatcccaacaatgccgaccaaattgagtactgttcttaatctaagccacaacaatctcagcggatctattccttcaaatattgacttattgagtgatctagagattcttgatctttcatacaacaacttgtatggtgaggtgccggcctcacttgcaaagctagaaagcttgacgcaactagtgctttcttataatcacctttctgggtccattcctatatttcgtcaacatgttgatattgctaccaatggaaatcccgatcttacaaatggtacaagaaattatgacaacgcccctacaagtggtaagagaaggacacacaatacagtcatcatcgtcgttgccattactggtgctcttgttggattgtgcttgcttgctgctattgttacaatttcatattctaagagaatttatcgtgttgaagatgaaggaccatcaactgaggatgttgctcgaatcatcaatggtcacctcataactatgaatagtatccatacctctgcaattgatttcgtgaaagcaatggaagcagtctccaatcacagcaacatttttctgaaaacaaggttctgcacttactataaggctgtgatgcctaatggctcaacctattctttaaaacagattaattgtagtgacaagatattccaaattgggagccaagggaaggttgctcatgaacttgaggtacttgggaagttgagcaattccaatgtaatggtgccattggcttatgtgttgacagaagacaatgcatacatcatctatgagcatgtgcacaagggcacggtgttcgatttccttcatgctggaagatcagatgttctggactggccttcacggtatagcatagcttttgggctagcccaagggctgacatttcttcatgggtgcactcagccagttctgcttcttgatctgtcaacaaggactgtccacttgaagtcaatgaatgagcctcagattggagatgttgaactttacaaaattgttgatactttgaagagcagtgggagcctttcgaccattgctggtacagttggttatattccaccagagtatgcatacacgatgaggttgacgatggctggcaacgtttacagctttggagtaatcttactggagcttttgactgggaaaccatcggtcagtgatggcatcgagttagccaagtgggctctgagtctttcaggcagccctgatcagagggagcagatccttgacaccagggtctcaagaacttcagctgctgttcacagccagatgttgtcggtcctgaacatcgccctcgcttgtgttgcgctctctccagatgctcgaccaaagatgcgcaccgtcttgaggatgctattcaacgcaaagtgatctggcatgatatgttttggtagcttaggtaggttctgaatggagtttgatcattttgcttagtttgtggatgtcagcaatcagtatacggggtccttgtatagtaccagcaccatagttcaaggtagagtagtagattatgatatggctgatcaatttagtattcagatatctattttggaatgaatgaccaatgggtttatctatgctgtatcatcatatattcacacatggttattagcataccttgtacacggcaattccatataacaatagtagtgaaatagagccatagttaaggtagaacagtagatagactatgatatatatccctgaacaatttagaagccagatatctgttttggaatgaatcaggaattgtgttcttctatgctatatgatcatatttgtaaatggttggttgtgtacatccatgtgggatgtcgaggccggattggcatccattatctaacaaacatatatataaattgttattacttattagcc

SEQ ID NO: 17175 - DNA, 907 bp, Oryza sativa
  ref <308>: DATABASE ACCESSION NUMBER: AK067636
  ref <309>: DATABASE ENTRY DATE: 2001-12-06
gagaaattgcatccaacagcagctgccatagttgcaagtgagctagagctcagagaagaggaggaagaagaaggcgtcaatggcgaccaccatagctgcgatggccatgcttaagccgtccaagatcgtggcgcggtcatcgccggcgccgtcggggagcggcagggtgcctagcatctcgctcaagagcctggccaagaagggcatgtcggtgtcgtcgtcgtcggcggcggcggcgcccgtggcggcggcggcgatggcgggcgcgttcttctcggcgctggcgtcgacggacgcggcgctcgcggcgcagcagatcgcggacgtcgccgcggcggcggcgggtgccgacgacaaccgcgggctggcgttgctgctgccgatcgcgccggccatcgcgtgggtgctctacaacatcctccagccggcgctgaaccagctgaaccgcatgcggtcggagcaggtgctcgtcgccgggctcggcctgggcgcggcggcgggtgccgggctcgcgttcccgcccgaggcgtcggcggcgcaggaggtggcgaggctggcggcggaggcggcggcggcggagggcggcgacaaccgcggcctgctgctgctgttcgtggtggcgccggcgatcgcctgggttctctacaacatcctgcagccggcgttgaaccagctaaaccgcatgcggtcagactgagagcttgagcttgaagattgcatccgtacatgtgtgtacgtggtgtgttttgagggtggtggagtggagtggagtggtagtgacgtggaatgtggtgtacttatgccttaattaatcctgttcctaatcctctcttcccttgaacaaaaattcagtacagctcttcttcttatttgaattcatctagttaatttatttgtcttattgatc

SEQ ID NO: 17176 - DNA, 2623 bp, Oryza sativa
  ref <308>: DATABASE ACCESSION NUMBER: AK067637
  ref <309>: DATABASE ENTRY DATE: 2001-12-06
ggtcttgagctgagcagaagcccgcgacgtgccctgcactgcacgcggaagcagagctccgagccgtggcggcggcgggcgcggggcggcgtccgatccagatccgcgccgccggcgtgggcggccggcttacgaggtggtgggcgactggttggcatcatggactcctcccgcttccggagtgcggcggccacggaggcggcggaggaggaggcggcggggtgggtgacggtcgaggagtgggcgggctcctccgccgccgcgctctcccgcaccgccgtcctcaccgcctccccctcctcctccctcgcgtcccgcaggttcggaagccggtgggggcgggtcggcggccggctgctcggcgccttcgtgcccgagggctttcctgggagcgtcactccggattacgtcccgttccagatgtgggataccttgcagggtctctcgacttacatccgtgcaatgctgtctactcaagctcttttaggcgctattggagtaggtgagaaatctgccacggttataggtgccacttttcaggtaaatttcgatttcatgtcatggtttagccttctgcagtttttcttaggagctaggcataacgtaaatggtttctgatgagcatatgttaacttctttttgtgtcttaaatttgtgcatatatgaaatagattgcttaggttgttgttttcattgccctgagctgcagtcagctggtagtaacttgctctgcagtctagtatgtgttttcccccctcaattttcttcttttatgggcttagtttcaatttcctcatcatctttaattacatgctattcttgcagtggtttctcagggatttgacaggaatgctcggtggtatactgttcactttttatcaggtgtcaaattctcttgctaactcgaataggcaatgccatcttattgccattgatagtttgtttactgatgagataacttgcttggtcagtattttatttgtctatagggtgtactaattctttgtgctttcacttttcccagggatctaaccttgatagcaatgctaaaatgtggcgcctagttgcagactttatgaatgaccttggtaatatagtctatatcagtaatcgctgtattaattctttgaatgcgggcgtctaatttaaaggtcctgcaatcgtttggtatttatattcaagactaagcattcatttttcttttgaggtattctgctatagtaggtgaatattaaatagcatatgtgtcacatgcccctgcaaatgcatttcacatggaatctggatttaaaaaatcctttgtttaatgcgaattccttgtagtatcaaagtatgctagcagagtttgtttgttggttttgcagggatgttgatggatctcttaagccctctgtttccttcatcattgattgttataatgtgtttaggcagcctatctcgatccttcactggtgttgctagtggagcaactagagcagcgttaacccagcattttgcacttgccaataatgcagctgatatatctgcaaagctgcagaagcatactcaacttttcaggagggcagtcaggagacacttgcaacaatgttaggaatgggactgggaatgcttcttgcccatgttaccagagggcatgctttgggtgtatgggtttcattcctttctctaacgatattccatatgtatgcaaattacaaggcagtgcagtcactttcactcacaacactaaattatgagagaagttccatcctgctgcagtacttcatggacaatggtgaagtcctcacaccacaacaggtttccaagcaagagcatattcttccatattggtcaagctggcggaaatttcttagaattaaactgccacatgagcatgtacatttaggtgctaaagcctcaaggcttacacaccctgatttgtaagtactaagttttgagttatgcttttatgtgtttatcactctatgggggaagaaacatttactctgtttgtcaaatttgataggctgcagattgcaaaaacaaggccctactatagaaatggtataactcgtctcttggttaatgtaacactaaactaactgttgctgacttttcttttacttcacaaatctattcagagaactatttcttgctggataaggaaggcagtgttcacattttcatccacaagcaggcagcggcaacagatattttgatgtccttcatacatggactcgtgttagcacatttgatgcagaagagcaaatctgggcatgcggaggctcgccaatggattgatgagaaatataacacttttatctcaaagttgcaagttgaaggttactcaacagagcgacttctttcacactcgatcgtgtggagggcacattgggttcatggtccctctgaagagaagctcgagtaggaggaagcaggcgaaggtagcagtatctgttcaacgcgatattattagagcaattcgacatactgcataggatgctttgcatatctcgtttgtttccgttcggaattgccacttttcaccatggagttgcactgcatcttgtaatcgcatgggatatactttaaaagctatacttgataataatactattaaatgatatagcaaatggtttcgttg

SEQ ID NO: 17177 - DNA, 2275 bp, Oryza sativa
  ref <308>: DATABASE ACCESSION NUMBER: AK067638
  ref <309>: DATABASE ENTRY DATE: 2001-12-06
gcccggtacagccaagtcctaaacacctttgtaccttttggcatctcaattctttggttcttcacaagctacacatggagaatcagcctgtgctcttcagtgctgtttttatcctctatgttagctttcttgggcccttctgcgccagctccggcgaagagagctttgtctactccggctttgccagcaccggcgcagccaacctcaccctcgatggctcagccatggtcaccaccacagggctccttcagctgacagacagcatgcccaatatccaaggccacgcattctacccaactccgctccggttcaagaagcaatcgaatggcatagtccaatccttctccgtggccttcatgttcggcatcatctccccgtactccgatgcgagcaccgacggcatggccttcgtcgtcgccccaaacaagggcttccccgatgccaaggcggcgcagttcttgggcctcctcaacatcagcagcgacaacagcacaagcaaccacatgttcgccgtggaaatcgacaccgcccagaacaccgagttggacgatatcgatggctaccacgtcggcatcgacatcaacagcctccactccaagaaatcccaacacatcggcttctacaatgaccagcatggtgggctcttgaagaacctgaccctcacgggcagcaactgcaagccggtccaagtgtgggtggactacgatggagagaccacacagatcaatgtcactttggctcccatcaaagtgaccaaacctacacggccactgctctcagtccccttcaacctatccacagtgctcactgaccaagcatacattggcttctcggcagcaacaggtccgctcacctcacattactacgtgcttggatggagcttcgctatgaatgctcctgctccgcctattgaaatctccaggttgccgaggctcccttgccctggagataataggttgcagaagatcttgcagatcctattgccaattgtcgctgtagcattgatcttcattgtagtcatgatacttgtgaggaggcagcagagatatgcggaattaagggaagattgggaggtcgagttcgggccacaccggttctcatacaaggatctgttcaatgccacagaaggtttcaagagtaagcacatactcggcgtgggagggttcggaaaagtgtacaaaggagtgcttcggacatccaaacttgaggttgctgtgaaaaaggtatcacatggttcaaaccaagggatgaaagagtttatctctgaggttgttagcattggtcaccttcggcaccgcaaccttgtgcagctacttggttattgtcgacgaaagggcgaactcctactagtgtatgactatatgccaaatggtagccttgacaagtatctatatggtgaagacaacaaacctgttttaaattgggctcagaggatgcaaatcatcaaagacgtggcttctggcttattctacctccatgagaagtgggacaaggttgtcatccaccgtgacatcaaagcaagcaacgtgctcctggatagtgaaatgaatgcccggttaggcgactttggtcttgcaagattatatgaacatggcaccaacccacagaccacgcacctggttggaaccatgggattcatagccccagagctggcacgcacaggaaaggcatcccctctcaccgacgtgttcgccttcggcacgttccttcttgaggtcacctgtggccggtggccgatcagcaacagtgcgcaccacggccgaaagatgttggttgactgggttctccagcactggcaccagggttcgctgccagagacagtggacccgaagctgcacggcatctacaacgtcgatgaggcatgcctggtgttgacacttgggctgatgtgctcacacccaatacccggagcaaggcctatcatgcggcaggtcatgcaataccttgatggagatgcaccgctgccggagtttacaccggcaaccctgaactccagcttgctggcaataatgcacaatgaaggggtcgacccatacgtcgcacagtacccgtggtcagggaatagcttgggcacaatgacaccagacatcttgtctggaagatgagacctgcacataatgcatttgttagaactttcaagtgcttgcctgcttaggcaaatgacaggcaattataaaatgtcctttgttgtagtatcattagatttaccttacttgtagaagtgcagtgtattttgattaactgtaaatctgtgcaagttactgtgattggatcg

SEQ ID NO: 17178 - DNA, 2643 bp, Oryza sativa
  ref <308>: DATABASE ACCESSION NUMBER: AK067639
  ref <309>: DATABASE ENTRY DATE: 2001-12-06
gagtaactgcttcgcccagctcgagtcgtagcaccaaaagaagcaagcacgcctagctcgttatcgatcatggcggccacgtcgccactgccacggtgggcgccgacgccaagtccgtcgcggccgctctggcgctggggctggggcggcggcgccacgccggacgcccgggcggacggaggtgtcaccggttggacctcgtcgttcttcgccgccgtcttcccgtggacgaggagacgacgtgtcgatgacagatgggcgccgtcggccggcggcggagtggggacgttcgacggcgtcgaggtgccgctgccggcggcgcaggcagtttcgcttccacgggcggcagcggacgtcgtcgacgaccccgcggtgttcctgacgtgggaggacgtgcgcgtgacggtgcccggccgcactcgcggctcgccgccggcgaggatcctcgacgggatcaccgggcacgcgcggccgggggaggttctggcgatcatggggccgtcggggtgcgggaagacgacgcttcttgacactctcgcaggacggttaggacaagaaatgaatcaaaccggtgtgattttaataaatggccggcaggaaaagcttgccttcggaacctcggcatatgtaacccaagacaacgtgctcatgtcgactctatcggtgagagaagccgtctactactcggctcacctgcagctacctgacacgatgctggcgtcagagaagcgcgcccacgcggagcgtgtaatccgggagatggggcttagcgacaccatggacacgcgcatcggcggccgtatcaccaagggcatcagcggcgggcagcggaagcggatgagcatctgcattgagatgctgacacggccgcggctgcttttcctcgacgagcccaccagcgggctggatagcgccgcctcctaccacgtcatgagccacatcacccgggtcgctgccagggaagggatgactgtcattgccgctgtgcaccagcccagtggcgacgtctttgacctcttccatggtctcttattgctagcctatgggaggatggtattctttgggacagtttctaatgctactgagttttttacccaaagtggttttccatgcccacacctgaggaacccatccgaccacttcctgagaacaatcaacaaggactttgatgagggaactatggaaagctccaaggctaacagaaaaacagcagctgaagcaacaaatattctaacaaatgcataccactccacttattcagagaaaacagccaatgagatagttgagatgaaagggatgggtggaactccatttagaaggaaagagcaagccagcttcttgacaaagctccttgtgctaacaagaagatccttcctaaatatgcacagggacataggctactactggatgcgtttgggcatttatttgggcattggcatttgcctcggcaccatcttctaccaagttggttacagctacagttctatccagagtagatgtgaagtaataatgtatacaaccgcgcttgtaactttcatggcaattggaggattcccttctttcgtagaagacataaagttattcagaagggagagattgagcggccattacggagtcatggaatttgtaatctcaaacaccctctcagccaccccttaccttgccgtcatcgctgtgatccccggagcaatgatgtattacctcacagggctgacccgaggtgcggaacacttcgcatacttcgtcgccacactctgcatgtgcacgctgctggtagagagcatgatgatgatcatcgcagtcatcgtcccagacttcctcatgggaatcatcatcggtgccgggatacagggcatgatgatgctcaatggtggcttcttccgcctcccgaacgagctcccgaagccggtgtggaagtacccttgctactacatctccttccacaagtatgcggtgcaggggttttacaagaatgagttcatagggctgtcttttccaagtgatcagctcatcgaggccaatgccactatcagtggtcttcaggttctcaaggaaaggctgcaagtggagatgggctattcaaagtgggtaaaccttgctatcctgtttgggatgatggtgacatacaggatgatattcttcgttattgtcaagattgcagaggagctcaggctaaaactgagagggattagatttagacggcttaaatagtcgtcttctctcttggaaaacccggccaggaggaagggatcattaaacacaaataaaatttgaagtacagaatgtactacagtagtgtggacttatgtcatttgagcttgataattcctaacgggtattttctggcattttagtcctttgccaatggaacaaaattgtaaaggattttttaaggtaaaccaagttatcgtgaacggttcgttgcacagtgttaaagggctaacattgctcctatcgcatcggtggtaagatgtcatttcttcatatttcaattttcttaatgccaagtattgcattccaaaaatgaatatatggagcaataatgcctaatgtaagcaccgacatattttaatgttcttcctgaaaagtgacagcaagagtgaaatgtgaagaaataatgaatatttatacagtgatgtattt

SEQ ID NO: 17179 - DNA, 2096 bp, Oryza sativa
  ref <308>: DATABASE ACCESSION NUMBER: AK067640
  ref <309>: DATABASE ENTRY DATE: 2001-12-06
gatcaaacccaaaccctcaccaatggcgtctccgccgccgccgcctcgcctcctcactcccaagcccgaccccgacgcccccctacccccgctcccttaccccgaccccaacctcgtccaaagcatgctcttctccgcccagtccccgcaggcgcagccgcaggcgccgccaccccacatccaaccccccgcctccgcctccgccgaggccccctccggcgacgagaagaataagaagaagaagaagcgggcccgcgcctcccaggagatggtgcgcatcaccaaccttagcatcgccgaccacctccactaccgctccctcgtccgccgcgcccgcctcaccttcgaggccctccgcgccatctaccaacgccagggcctcgccaccgccgggggaatccgcaaccgcttcgacctccgggcctccagcaagatgctctccaagggcctctggatgcaccgcgacatccgcaccgtcggctccatccccggcctccccgtcggggactccttcttctaccgcgccgagctctgcgtcctcggcctccacaccgcccctcaggccggcatcggctacatccccgccagcatcgtcgaccagggccaccccgtcgccaccagcatcgtctcctccgggggatacctcgacgacgaggacagcggcgacgtcctcgtctactccggcagcggcggccgcctgcgcaaccgcctcgaccacagcgccgaccagacgctccagcgcggcaacctcgcgctccactacagctgccactacggcatcgaggtgcgcgtcatccgtggccacgcctgcgaccacagccccagcagcaaggtctacgtctacgacggcctctacagggttgtcacctccaccttcggccctggcaaatccggccgcgacgtctgcaagttcaagctcgtgcgcatccctggccaggacgacctcggcagcaaggcctggcataccgcagcggagctcaaggatgcactggattccaagatccgcccgcccaagtacatctcgctcgacattgccaagggcaaggaaccattccgcgtgcccctctataacaagctcgacgacgacaggtcacccctcttctacgactacattgcctgtcccgacttccccaccacccagcagctgctcaaacgccagacccagaggggctgccactgtgccgagctgtgcggctccaggtgcagctgtgagaggaagaacaggggggccgacggccctgtgtacacctccgatggcatccttctcaggggacgccccttggtgtacgagtgcggacccctgtgtggatgccccatgacctgtcccaacagagtcacacagcaagggatgaagcaccgcctcgaggtgttccgttccaaggagacaggctggggtgtcaggacgcttgacttgatacagccgggtgccttcatatgcgagtacgccggcgacgtgctctccttggacagccactcaggtgacgcccctctgcctccgatggaggacgggagctccatcatcgacccgaccaagttccccgagagatggagggagtggggagatgcatccgtggtttacccggacagggtaccccatttccccctatttgcaggggcgcgctaccgactcgacgtgtcacagaggaggaacgtggcttgctacattagccacagctgcagtccgaatgtgttccttcaatatgtaatccgtggcaatgaggatgaatcctaccctcacatgatggtgtttgccatggagaccatccctccaatgcgggatctgtccatcgactatggcttggactagggtccatgaggggggaggagggatcaatggctggtaactggttttggcgggctgaggcaacgttaggaagctgcaaatggccccacagacagttggctcgtctttttggatattttgtaggtgagcaggtatctctttttgggtacccatagtgctctcattttggggtaactagggtgcaattgatgagtttgttctaggattggcatgaatgaagaactttgctaggtagcaaaaggggcgcatcaatactgcatcactggaaagaactattcaaaaccattagttg

SEQ ID NO: 17180 - DNA, 1117 bp, Oryza sativa
  ref <308>: DATABASE ACCESSION NUMBER: AK067641
  ref <309>: DATABASE ENTRY DATE: 2001-12-06
gggggaccaaaaaggaaagccgaggaggagagggaggggagagaagggagagggggtcggggagaaagaagagcgagcgagcagctttggctacggccaaaccctacagcgcctccaccaccactccttgccttttttggccgcagccgctcgtgtggttggttggttcatcggcgatcgaagatggtgcgggggaagacgcagatgaagcggatagagaaccccacgagccgccaggtcaccttctccaagcgccgcaacggcctgctcaagaaggccttcgagctctccgtcctctgcgacgccgaggtcgcgctcatcgtcttctccccgcgcggcaagctctacgaattcgccagcgccagtacgcagaaaacaattgaacgctataggacgtatacaaaggaaaatatcggcaacaagacagtacagcaagatatagagcaagtaaaagctgacgctgatggtttggcaaagaaacttgaagctcttgaaacttacaaaagaaaactgctgggtgaaaagttggatgaatgttctattgaagaactgcatagcctggaggtcaagctggagagaagcctcattagcatcaggggaaggaagacaaagctgcttgaggagcaggttgccaaactgagagagaaggagatgaagctgcgcaaggacaatgaagagttacgcgaaaagtgtaagaatcagcctcccttgtctgctcctttgactgtccgggccgaagatgagaacccggaccgtaacatcaacaccaccaacgacaacatggatgtcgaaactgagctattcatagggctgcctggcagaagtcgctccagcggcggtgctgcagaagatagccaagcgatgccccattcttaagtaacaggccaggaataagctggatctctgcgttgagaaaggagatgatgctaggcatgcaatgacaccaaaccatcctaaaaacagaccacgctgtatattttacttacccgtattgtcgtccatggatgcgaaatgctagacgcatatgcacccacccattcagcaccaccaggcagaaacccttcgatcggcagactccactacccatctaaatctaaatcgagagatctcaagtgcg

SEQ ID NO: 17181 - DNA, 1662 bp, Oryza sativa
  ref <308>: DATABASE ACCESSION NUMBER: AK067642
  ref <309>: DATABASE ENTRY DATE: 2001-12-06
gtttttgttttgcgaataattttggcgcctcaagttagccgataaagttgggagtagtacactagtagtatactagtagtagagtgagctcaagacaagaagcagtagcgagtccaaggcaaggcaaggcaggcgaaagcaaaacaagaaatggcgaagccgatatcgatcgaggtgtggaatccgagcggaaagtatcgcgtggtgagcaccaagtccatgcccggcacccgctggatccgcctcctcgccgacaacgactgccgcctcgagatctgcacggagacgaagaccatcctctctgtcgacgacatcctcgccctcattggcgatcgctgcgatggtgtcatcggccagctgacggaggagtggggagaggtgctgttctcggcgctgaagcgcgccggcggaacagccttcagcaacatggccgtcgggtacaacaacgtcgacgtggaggccgccaataggaacggcatcgccgtcggcaacacgcctggcgttctgacggagacgacggcggagctggccgcgtctctgtcgctggcggcggcgcggaggatcgtggaggcagatcagttcatgagggctggcctctacgacggatggctcccgcacctgttcgtggggaacttgctcaagggtcagactgtgggagtcatcggagctggtcgaatcggctcagcttacgcaagaatgatgatcgagggcttcaagatgaacttgatctactacgacctgtatcagtccacgcgccttgagaaattcgtcacagcttacgggcagttcctgaaagcaaacggagagcagcctgtgacatggaagagagccgccaccatggaggatgtcctcagggaggccgacgtgattagtctgcaccctgtgttggacaagaccacttaccatctgataaacccggaaaggctggccatcatgaagaaggaagcggttcttgtgaatgcaagtcgaggaccggtgattgatgaggtagcactggtggagcacctcaaggccaaccccatgttccgcgtcggtcttgatgtgtttgaggatgagccttacatgaagcccggcctcgctgacatgaagaatgccgtcgtcgtacctcacatcgcatctgcctccaagtggacgcgcgaaggaatggcaacacttgctgctctaaacgttcttggcaagatcaagggttatccggtttgggggaacccgaatctagtggagccatttctcaaggaggatgcaacgccgccagctgcttgccccagcattgttaatgccaaacaactcggcctgccatcgtcaaagctctaagaactggagctcggtccatcatattatatctgtcggttcaagatcatactccactacatgaagtctagatcgaggtgcatatgcttgctgttctagcggagcgggcaacaagctgtcagccagacttttgatatctaatttcacacacacacacacacacacacacacatatatatatatatatataatatactagctagcttcaattccttgttattataccactagtacgactgtaattttgtgagtcttaaaacatgcgagctacatgtatgttattacacccgtactagctactactgtagattaattactgttacgaaatgaagataccctagctgcctgtttggg

SEQ ID NO: 17182 - DNA, 2606 bp, Oryza sativa
  ref <308>: DATABASE ACCESSION NUMBER: AK067643
  ref <309>: DATABASE ENTRY DATE: 2001-12-06
ggtagtccacacgcgtccggttcggcctccacatcatcatctcctctcctctctcgtctccgcgcgccgtgagccgtccgatctcgcgcgggcggccgtgatccgctccctcccccccacccacgtgctaggccgccatgccacccctctccccttcctcctcgccgccggcgacggcggcggcggttctccgctgcggctccccgtcgtgccgccccgtcacacatgagctgttcaggcagaagttgagtttcatggtgtcatttcaagctcaacatatgagatgtgctcctcatttgatcaaatcagttgttaaaggtattagagcaaatatcactgatggcgagaatggagcaactgaaccagctagggagctattggagcggctgtttgcgaagacgcaaaggttggataccagtgcttcccaggatagtgagctgagtatgagcattgatgtactgaagtctgaatttgaggccgccttgtctaccttgaggaagaaagagagggatctccgagatgcggagaatcgggtttcagttgatcaggtacgcctgaaccgggcgaagaaggatcttgatcagagagagcgtgggatcaatagagcatatgcaaggcaacaggaaatggagagatcactgggtaaggcaagtagagatctggttttacaagtgaggcagatcgataacctgaagcttcttgttgatgagcaagacaagaaaattgccagctcacaagatttgctttctcagaaggtaactgaagtggaaaagcttaagcaagatatgttgaagaagaatgaagaagtaaccttgatgcgttcagagatcaagtccaaggaacagctgcttcttgaagctaatcaggctgctgagcagcaagaagcaacaattaaggagctccggagtgaaattaaaagaaaagaaattgatttttccagatcgaatgaattgagaaaggccaatgaacagagactaaaaatcgccgagcaagaacttgagaggcagaatatgggatggttagcagcacagaaagagttaaaggaagtggcgcaactagcatgcaaggatatggatggtatcaaggatacagtcagtgacttcaaacgtgtgaggtctctgctggatgctgtacggtctgaactaatcgcttcaaaagaggctttctcctcctctcgaaaacagatagaagatcaagcagtgcagatgcagaaacaagttcaagaactctctggtcaaaggctattgctttcatctttcaaccagaacttggaagctgctcggttggagattcaaggcaaggcaaaggagctcaatgctgcacagtctcgctgtcatgaacttgaatcactgttacttcaggaaaaggagaaggttgagtctctggaagcagtgttaacaaaagaaagagagagcttagaagagaaaaccaaagaagttgagttgcttcaaaaggcgctcgttcagaaggaaaatgagcacagcaattcattaaagcttgttgaaataaaagaatctgagctgttagaagcccgaaatgaagtccaagatatgaaatcaaaggtggaatctatccaaatagctgttcaggagaaggattcagagctttctgaaacacaacgcagacttgctgaagtgaacagtgaagttgttgaactaaagcagctgctagatagcaaggaagatcaacttgttcaggttagaaccgaattacaggataaagaacaacacatacagacactacagaataaattggatagcatgaaattcagttgctcacaagctgaatctgtggtgcaaaagatagctgaactcactggcaatcttgctagttcagtagaaggcgaagagatggacatttatgcattgctggatgatgagatttcgagcacaggtacagccctcaagtccaatttgcacaagcataatcaactggaggctgacatagagatgttaaaagaatccttgcatcagaaggacatggatttaagagctgcccatgaagcacttgacgcgaaagatcaagagctgaaggcggtaatgagaaggtgggatgtgaaggaggaggtagacaagttggaagggttcctgaaagatcctagtgacatcaagagaccttctgatttttccgttcatatggggctccaaaatcttcaaactgaagctgcggaggtggaggcacttgctgctactactacattgaagaaacttgcagatatggctaagggattcctgagaagtggcaaaactgattctggcatcaatctggttgcatcgccaagtgtaaacagtactagaattgtttccaagaccaaaccaaacaaggaaatggatatgattcttgatgctgaaaaggaaattgccgggctcttttcgttgacagaacagctcattaccgaggctggaatagatgttgctcaccaagcatagcttcagaacccagaaatgtatatcatattgcagttttgcaacatttagatagttgctgtgaagattcagctgaaattgttagcgttttcatttcttttgctttgggtctcatcgccctgtttgctgttggattgctctgctccaagtgcgaaagggagacatcgatgttgatatgcc

SEQ ID NO: 17183 - DNA, 1755 bp, Oryza sativa
  ref <308>: DATABASE ACCESSION NUMBER: AK067644
  ref <309>: DATABASE ENTRY DATE: 2001-12-06
agctttttttcccctctacatcttccttcccctttcctcctcctcctcgtcttctcctcctccccaccgcgtcaaaccccaccccgaagcaaccgccgccgccgccgaatccgccaccggcgaccccaatccgcgccgccggggcccgatccccactccgatccgccgtaatccggccggcccccccgcgcgcgcgcggccggcggcggcgccgccttcgcccccgatgtacagcaacttcaaggagcaggcgatcgagtacgtgaagcaggcggtgcaggaggacaatgccggcaactacgtcaaggcgttcccgctctacatgaacgcgctcgagtacttcaagacccacctcaagtacgagaagaaccctaagatcaaggaggccatcaccgccaagttcaccgagtacctccgccgcgccgaggagatccgcgcggtcctcgatgaggggggtgggggtggtggcgccaacggcggcgacgcggccgtcgccacgcggcccaagaccaagggtaaggatggggaggggggtggggatgattccgagcagtccaagctgagggctggactcaactccgccatcatcaccgagaagcccaacatcaagtggaacgatgtcgccggcctcgagagcgccaagcaagcgctgcaggaggccgtcatattgcctgtcaagttcccgcagttcttttgtatggtccaccaggaacaggaaagtcttatttggctaaagctgttgcaactgaggctgattctacatttttcagtatatcttcatcagaccttgtttcaaaatggatgggagagagtgaaaaacttgttgcaaaccttttccaaatggctcgagaaaacgctccttccattatcttcattgatgaaattgattcattgtgtggtcaacgaggagaaggaaatgagagtgaagcttctaggagaatcaaaactgaacttcttgtgcaaatgcagggtgttggccataatgatgacaaagtactggttcttgctgctacaaacacgccatatgctctagaccaggctgtgcgccggcgctttgataaacgtatttacattccactacccgacctgaaagcaaggcaacatatgtttaaggtccatctcggggatacaccacacaacttaaatgaaagtgattttgagaacttggctcgtcgaacagacgggttttctggttcggatattgctgtttgtgtaaaggatgtgttatttgaacctgtccgcaaaacacaggatgccatgttcttctttaaggctgatggtgatatgtggatgccttgtggaccaaagcaatctggtgccgtacaaacaaccatgcaggagctcgcatccaagggccttgcagcaaagatccttccaccaccaatctcaaggacagatttcgagaaagtcctcgccaggcagagaccgacagtgagcaagaaagacttggaggtgcacgaaaggtttacaaaagaatttggcgaggagggttgacaagattatgcgcactcacttatgcatagctgctccacagaaatgtatattttatgacttcgattgttctggttggaagttggattcactgatttgtacaattgatagcctaactatgattaattacaacctgtttattgcgttaggctatcattgctcctctgtcgtcaacttatttcatttttactgtcacttatacttgaaattttccacaagtgtattaattaaggaataatacttaacgtggagcccttgtggtgc

SEQ ID NO: 17184 - DNA, 1521 bp, Oryza sativa
  ref <308>: DATABASE ACCESSION NUMBER: AK067645
  ref <309>: DATABASE ENTRY DATE: 2001-12-06
ggacatgagcagaggcagcagcagctagtcattggagaggcagatagtctgaagaagccaaggttgtctcactcccagaagaccatacacacataatccaatcaagtctttggttactacaaatagaggcactgaaaaaggctgcagaggatcttatcactactgataaatgtgcagcctactacaagcagacagacatttcagtgcatgactggaactgaacagatgatgtatcatcagcaacaggttcagagtgatagccagcacctgtcttcaaggccgggtttgcctccggagaagcaatttctcctgcaaggcggagcagattcatcatcagggcttgtcctctcgaccgacgctaaacctcggttaaaatggacatcagagttgcatgagcgttttgtggaagcagtaaatcagctgggagggccggacaaggcgacgccgaaaacaatcatgaggctcatgggaattcctggattaaccctttaccatcttaagagtcatcttcagaaataccgacttagcaagaatcttcaatctcaagccaatgcttcccgtgcacaaggtgtcttaggttgtagtacgacagagatagataaaccatgtgaaggaaatggatcaccggctagtcacttggacctagagactcagacaaacagttctatgcacataaatgaagccctccagatgcaaattgaggtgcagagacggctgcatgaacaactagaggtacaaagacacctgcagcttcggattgaagcccaaggaaagtacctgcagtcagtgctggagaaggcgcaggaggcactcggcaccatcgccatagcagaaactgctgcaactgcaaacgcctcctcatcgaaacgcctccaaaacgagcacacccagcttcaccatcaccagcagcagcagcaggtcggcgatggatcggtggacagctgcccgaccgcctgcgaccgcgagggctcgcatcactcgcgctctcatggccacagaggagagcaggacatcctgtccatcggcttgccgccatttgagccggcagcagcaagatcaggcaaggagcaccactacctgctgttccccaacgagccgagcaggcgacgatcgtgttcggatgaacggcgccgcgagatgagcacgctgcaggcgtcggagctggacctcagcatcaatggcaggtcgtcgtcccactctcacaggcgcgaaaacatcgatctgaatggtgcaggctggagctgaaccaacttaactgatcgatggagaaaagcaggtagtagaaaattagcaagcagcaactgggcaagtgattcatttcttgctatgagcacgatgaaattaagccaaagatggtggtggtgcatcgatcgatcgccatgtatgatcaataaggaaggtgctttaatttctctgaatatatgtaatctagttcatgtagagactgatcgggaggcagttttttttaacgcatgatttactgtaaccgtgtattatattagatgaagttatttttgtcat

SEQ ID NO: 17185 - DNA, 2890 bp, Oryza sativa
  ref <308>: DATABASE ACCESSION NUMBER: AK067646
  ref <309>: DATABASE ENTRY DATE: 2001-12-06
gggcgacatcttctccaaatccctcacctttatttcctcctcgtctcctcctcctccgctctctcctcccgcgtctaaaccctaaccctaccgcagccgccctccatggccgccgactaccgcacacccgaccgcctcctctccgccgccgcccccggcgaggagcaggcgcaggatccgcccaagccggtgctcgccgtcgccgcgacccatgacggcctccggttctggcagtacatgctcgccggctccgtcgccggcgtcgtcgagcacaccgcgatgttccccgtcgacacgctcaagacgcacatgcaggccggggcgccgccctgccgcccggtcctgtcgctgggggcggtgctgcgcgccgccgtgtccggcgagggcggcgtcagggcgctgtaccgcggcctccccgcgatggcgctcggcgccggccccgcccacgccgtctacttctccgtctacgagttcgccaagtcgcggctctccgaacgcctgggccccaacaaccccgccgcgcacgccgcatcgggggtgctcgccaccatcgccagcgacgccgtgttcaccccgatggacaccgtcaagcagcggctgcagctcacgagcagcccgtacacgggcgtctcgcactgcgtccggaccgtgctccgtgacgagggcctcggcgcgttcttcgcgtcctaccggaccacggtggtgatgaacgcgccgtacacggcggtacacttcgctacctatgaggcggcgaagcggatgctcggggacatggccaccaacgaggattcgctcgccgtgcacgccaccgccggagccgcagccggcgcgctcgcggctgcagtcacaacgccgctcgacgttgtcaagactcagctgcagtgtcaggtgaggatctcttatgaattttatttgtgctttgctgaaagtgtgtattttaactccatataataattttgaggctgatctgagtgtgctgtggtgatttgctcagcaaacggatgaatttttatgtctgtcaatcgtttttataaatctccaagattgttggagtcaatccgtacaatgaaggaagtggcgacttactatgcttagggtgctctgtagcatatatttatagagtgaaccgatttagctatgaggcaccaaatgaggtcagttatatcttagggaactctggctcattcaaaactccagtattctgacatagcatatatcctaagttggcctcttctaaaacatagcctttcaccaaactgctgttgtcactttatttccttataggaaaaatgaaaattagctaacttaaactcgggtgttaaagctgtttaccattgtatcctagtggaaacaatatggcaatagtttttagctgatctacagtgtttactgaaattataaatgtaagtttacttgtcatctgttgcaactgttgatttttttttcatcacaatttattttggtcatcgcaatttgcaactgttcttgttaacataagtagtgtctttttacttcgattaaccaactggctcaggtatgccatgcatagttaaacactatgtcatcagtagttctatctctctttcccattttaaggtgtttgggttttgaatagattcatacatgtatgcatgtatgtgattcatatatgtgtcaaaaatctatttcgatgtttgtgaatctagacgaggaatggagaggccaaaacgtcttataatgtggaatggagggagtatatgttggtcgtgtttcactgttggtctttaggaggacaagccaaaaaggctgtatgctcccccatctgtcttcccttctgcatcaaatgtgaatcccaatgtctacactgattcctctataacctatgaccatagaggaagaaacacaaatgattgcacaaaaaagtcacatcgaccttgaaacttctcaggtgctagtagagtaattgggcctctctatatgctgtcattgagttgtgcactgcatcttgttattcttcacttccactataggttagattctgcagtagccacatggcttgcggctcacatatgcttccatctacctatttgacttgatattttctgtacctaatttgcccacctatcgtcctatcatagttatggtttgtccacatccacacttgcctgtagtcatagttttattatatgaatacatctgtaagatatgcctgctcttgcttttatatttttctaacacttatcaatttaaccgtggggtagtttcttcagtttttgtttttcctgttttactgcgatcacctgtttccattttcaagatagtaataatacccattttgatcctcagggtgtgtgcggctgtgagcgcttctcaagtagctcaataggtgatgtattcagaacaatcataaagcgtgatggatatgctgggcttatgagaggatggaagccaagaatgctgttccacgcacctgcagctgctatctgctggtcgacgtacgaggcctcaaagtcgttcttcgaaagattcaacgagaaaagaaggaaataatctgaacattcaaggctcaaagcccatgtattttcttgaagtcaatgtacttctatactgcaccatacatcctcagctgacagaacgaagcagcccccaagatgctgttgtggtgatgcaggcctgctagtgatccatgtggaatgatgtactgtgcatcaaaacatgtccaaagatagatctctgtaccttgtatttcatttcagccaagttaatgtattattttgcctgctgggtccagataataattacaaggataatttttgcccaaatttgatcagaatcactcagtgtactgtatccttttgtggccgtccttgtgccagattattgataaaaatgagatttttgttttgctatg

SEQ ID NO: 17186 - DNA, 1505 bp, Oryza sativa
  ref <308>: DATABASE ACCESSION NUMBER: AK067647
  ref <309>: DATABASE ENTRY DATE: 2001-12-06
ggctatgaagtgaagaggccattgttggggccaaaagatctaccgctctgcatcaataagctgcccccgatgatcgatcgtgagcctgcgggtagtagtaggcacggaagtaatatggatccatccatcaacataccggtcaacagagatgccatcaccgaagaagtcgccgccgcgttcgcggaatccgaggtgatccccgagaggtattgccgacctgatgaggtccatgacggcatcgtcgttggccatgacgatgacgaggcctacgagctgccggtggtggacatggagaagctgcttgacccggagcttgcggaggcagagattgcaaagcttggttctgcatgtcaagattggggtttctttcagttagtaaaccatggagtcgacgaacaagtggtgaatgaaatgaaagacagcacggtcaaattcttcagcttgccactagaaagcaaaaggacagtggaaatccaagacaatggctttgaagggtttggccaccattacagaagggcatcaggtaagctggactgggcggagagcgtgatcctccttacgcagccaatccaagagagaaacccggaaatgtggcctacaaacccatcgtcgttcagggatgcacttgacaagtactccgccgagatgacgaagctggctatgaggattgcgagcatcatggctaccgacctcggggtcgaccaggaggctttggttggcgcctttagggataaacagcagagcatggccatacaccactaccctccttgccgccacccagacaaggtgatcggcatcacgccgcactccgatggtctcggcctgacgctgctgctgcagctcgacgacacgcccggcctgcagatcaggaaggatggcaggtggttaccagtgcgacctcgcccgggcaccttcatcatcaatgtcgccgacatactcgaggtccttaccaatggcgcgtacaagagcgtcgagcacagagtactcgcggacgcagagaaaggccgaaccaccatcgtgacatttcatgaagcctatgtcgatggaatggtgaagccgatcccggaggtgctcaagctcaacggagcagaggcacgctacaagtccatagaaagaattgagtatatcaagggaaactttgtggcgctttctgaggggacacgatttctggagagccttaagatatagcttgtgaaagttacgcaggcaactagaagatctctatggaacccaattaatcatggatgctggaaaatactgcgcctcctatatattatccagttcaatgtaatgtggaggaaggattattatcgaaaaatgttaaatgtgtttgttaagaataaaccttgtgtgctgattagtagtagctctatatggttagctgttcatttttaggtgcatgtttgcatgtgtcggcctgattggaggctatgtctgctttccttgtaacagcttattttaagcaatggaatatagtctggaaaagctgtcaattcagcagcacc

SEQ ID NO: 17187 - DNA, 2482 bp, Oryza sativa
  ref <308>: DATABASE ACCESSION NUMBER: AK067648
  ref <309>: DATABASE ENTRY DATE: 2001-12-06
ggtcactcgcgccggcccacacccctcctcccgcctggcggcgatccggcagatcccgccatggcctcctggctcaaggtcgccgaagacttgcttgaagttgtcgaccggagggcgaagattgtggctaccgagttgtcagatgagcagtctagccctcagccttcaggttcaagcagtcaagaaggtcaagcgaagaagggaaagctgagggagaagggtccattgaagcttgcaactggggatgctggtagcaggacggctgctcagaaagagaggaagagtaggcaaccaccgcgggaacggattaagattgagaagatcaggccttcgccacctgttgattcatcaagcgtcgacgctagtgccagtaaacctgatgtctcctcaagtgatgttaagggactggatgatgatggtggagcagagaaagaagagaaggtcgtcgttgatcgtaagaatgatataggtgcagaggttgttgatactgaggttgaagtccaatcaacagagagaagtgctgaggatgcagccattgttgtggatggtgctgcagattctggaaattcagagggtgctgctgaaagctctgctccttccgttccagatgaaagatgtgagccaagcatcagtaaccaggatgctgagatcgtttcagctgttaatttggaggagaaagactcagctatggaagttatccatgagaaaaatatcaaggaagtaccagacacacaagtttctggaaaatcccaagattccaaacgagagggtttgtctgactcaccggagagtacggaaaatcagcaggaacataagcttgattctggttctgtgaaagaccaagaccaacttgaggaggctcggggtttgttaaagaatgttgtgaaaactggccaatcaaaagaagctaggttagctcgggtctgcgctggactttcatcccgcctccgggagtataaatctgagaatgcacagctggaggaacttcttgttcaggagagagagaaatgtagctcatatgaagctcatatgaagcaactacagcaagaactgtcaatgtcgagagtagaaggttcacgagctgaatctaacatggttgatgctttgactgcaaaaaacgctgagattgagtctctagttaagtcactggactcttggaagaaaaaggcagcagcttcagaagaaaagcttgcagctttacaggaagatatggatggtctcaagaggaaccgtgaacttactgaaactagggtcatccaggctttacgagaggaacttgctacggtagagcgcagggctgaggaggagcgtattgcacataatgctacaaagatggcagctgttgagagagaagtcgaattagagcatcgagctgttgaagcatcaaatgctcttgctagaatccagagagctgctgatcaaagctcatctagagcaatggaattggaacacaaggtggctgtgcttgaggttgaatgtgcatcgctgcaacaagaactacaggagatggaagctcgtaatcgccgtgctcagaaaaagccttctgaagaagctaatcaagttattcagatgcaagcatggcaggaggaggttgagcgtgcacgccaaagccaaagagaggcagaaaccaagatatcatctttggaggctgagttacagaagatgagagttgaaatggctggaatgaaacgagatgcagagcattattccagacaggagcatgttgaactggagaagagatatcgtgagctcactgacttgctgtaccacaagcaaacacaactagaatccatggcaagtgaaaaggctgcactggagtttcaactggagaaatcaataaagcagtttcatgaagtgcagatggaagcagaaaggagtagagttgctcgcagatcagcatcagcatgggaagaagatgctgatatcaaggcactggagcctcttcctctacatcatcgacacatggcaacagcaaatcagcagttacaaaaggctgcgaagttactagattcaggagctgtacgtgcaactagatttttgtggcgtcaccccgttgctcgagtcagccttctattctatctggtgtttgtgcacttattcttgatgtacttgatgcaccgcctgcaggattttgcatccagagaaggtccgacagccatgggggggttggccaactcagatttgccatagcctttggggtactcctctttctgtctgattcaagcattgcttcctggcgctcgctctagacgctcaaggtgcccccccccccccccccttggtttgatgcagtattaaccccccacagttttttttttttttgccttcattgtttcctccccttttgtaaagtcatgttctttgcttccatgggctacaatccattctttcacacttcaggagttcattatattgatcacagaatgtacaacactatggatagcttgacccaatataccatgcaatacaaacctcttgagcc

SEQ ID NO: 17188 - DNA, 1698 bp, Oryza sativa
  ref <308>: DATABASE ACCESSION NUMBER: AK067649
  ref <309>: DATABASE ENTRY DATE: 2001-12-06
gacacgcgcactcgattccccactcctctcgcgggtcgcggccacttcgccgccggcgctcgcatcggtcaactcgacgccacggccacacacgcaccggccatggccgcggcggcggagcagcagcagcagcagcagcagcagggcttccgcccgctcgacgaggcgtccctggtggcctacatcaaggccacgcccgccctcgccgcgcgcctcggcggcagcctcgacgccctcaccatcaaggaggtcggcgacggcaacctcaacttcgtctacatcgtcctctccgacgccggctccgtcgtcatcaagcaggcgctgccgtacatccgctgcgtgggggattcgtggccgatgacgagggagcgcgcctacttcgaggcctccgcgctgcagaagcaccgcggcctctgcccggaccatgtccccgaggtctaccacttcgaccgggccatgtcgctgatcgggatgcgctacatcgagccgccacacatcatcctccgcaagggcctcatcgctggcgtcgagtacccgctgctcgccgagcacatggcggattacatggccaagacgctcttcttcacctcccttctctacaactccaccactgatcacaagaaaggagttgctcagtactgcgataatgtggagatgtgtaggctcacagagcaagtcgtgttctcagacccatacatgctcgccaaatacaatcgttgcacatcacccttcctagataatgatgctgcagcggttcgagaggatgctgagcttaaattggagattgctgaattgaaatcaatgtttattgagagagcacaggctcttcttcatggagatctccacactggttccatcatggtgacaccagattctactcaagtgattgatccagaatttgctttctatggcccaatgggttacgacattggggccttcctggggaacttgattttggcatatttttcacaagatggacacgctgatcaagcaaatgatcgtaaggcttacaagaaatggatcttgaagacaattgaagattcatggaatttgttccacaagaagtttgtcgaattatggaataaacacaaagatgggaatggggaagcatacctgccccctatatacaacagctcagagcttttgtgccttgcacagaagaagtacatgacaagcctatttcatgacagtcttggatttggttcagcaaaaatgatcaggagaattgttggaattgctcatgttgaggattttgagtcgattgaggatgccagcaagagagcttcgtgtgagcgacgtgcccttaattgtgcaaaggcaatcctgaagggaagacgccagtttgaaagcatcgggcaagtgattgtgcatgtacaatcgtttgatcgggactgataatgccaaccatctacacgacctttctgattgaggagacaaaagttttcatctgtttaccataagcgattatctgtgcctattacaaagcagaattggccagttatttgtgcttttagtactttggatcatgaaaagtgtgtgcactctgcaagatcgatgttttttttcaccacttggctaagccttccaccagcttccgggcttcttagtttatgagctgaataatggaagttcagcacaaacgtttgtccatggatatggacgagtgtgttattacaaataaagttgatagttttcggc

SEQ ID NO: 17189 - DNA, 1108 bp, Oryza sativa
  ref <308>: DATABASE ACCESSION NUMBER: AK067650
  ref <309>: DATABASE ENTRY DATE: 2001-12-06
gtccactccactcgctctccgttcaccactccaaacgcgtagcgctagcgccgcccgccgcacgatgagcgcggtgcccgtcgtgtcctccgcgctggccggaccagcggtcgcggtcgcggtcgccaggcccgcttccgggtccgtcactcgcctccgtgcgccggcgccccacggcgtgccggccggctccgtgcccctcgcgtccggacttgccaactgctaccgccgctccgccgccgccgcccggaggcttccgatcccgtctgcagcggggggcggcacagttggggatgcttttgttatagaagacacaacaaatgtgaaatttcctcgagagatagctgttccgggctacaccgagcctttggttattcttggaacaggttacagagagaagttctttctaaaaatatatgctgctgcattctatgttgattgctcaatcggcgttgacactatgcgatggagagaaaaggttggtattgagacctttgatgcttcctcagtttttgactccatttttaaagcaccggttgtgaaatcattgagtataattctcgttagagatgttgatggcaagacgtttgtgaaggctctagatgacattattgctcgtcaaataaaaaaaccaagtgctgaggaagaacagagcctgtcaactttccagaaaacctttctagggcgtagtctgaaacaaggaacaactgtctatctaacttggcttgaaccctcgaaacttctgatctcaattgcaggaaaccaagatccatgtcaagttgatgctgaaatcacatcagccactgttaattatgcgctatacgatggcttcttgggtagttctccagtatcccctactctgagatcttctactgcactactgctggaggctattcttacaaagtgacagaaaccgaaatcatggttcgctaagacaaagcatgcgctgaatcctgatgggtgaacaattctagtttggccatcagctcatcgccgactacaaattttcatcttagagtttatttttaataatttttaatgtttggttatatatatgaatatctaattaaactcaaatacatttctaacatgaacattggtgttatgt

SEQ ID NO: 17190 - DNA, 2384 bp, Oryza sativa
  ref <308>: DATABASE ACCESSION NUMBER: AK067651
  ref <309>: DATABASE ENTRY DATE: 2001-12-06
gcgtgatcgccagtaacgcccaggagcttcgagagaattccacaccattcccccctaccaccacgcggcgcatcatcacaatacacagcctctgcttcccccggcaacccaaccgattcgcgctcacgccacctgcaatccgcgaccagacgcgcgggccgttgagatcaacaaacacatcgcacgcgacgccgcgtgagcccgtacgatcgccccctcccgcgccgcgcctccgcactctggttggttgcctcgccggcgatgtcgacgcagtccatctcgcccgccgcggcggccgcgtccgcgcagtactcgtacccggctgccgcggcggcggcggtcccgtcctacttccccgtcccgttccacctccagaacgtgcagcagcccgccacctggccagcggcgcccgcggcgtacaacgccgtctaccccatgccccaagtccagcaggttcagcaactgttccagaaagattcacagataatcactcctgaagctctagctactgtgaaagctgctattgcaaatagtgagaaagacaagaagattgaagcaaacaaaaaggcagtacctcgaaaggcagctgggcaatcttgggaggatccaactttggctgactggcccgaaatgtgactttcccctcgtctgaacttgtctgaatgtctgttatcctcacgtcaacagaccatcaaacaccttcaattccccaggcaagatctaatgttcgatctatgtattctaataagacaaactttcccctgtttccttctgttaaaggtggccgaggatgtgatatgtagcccaacaggtttcagagttgatgcctgtctcgtggaattaggtgggctttgcagatgatatagtaaacatttcctgtgcctttgccattagtttacatgcgttgtcatctcgtttttgcatgcctaatttgattatatgaatatgatatttgaaaatttttcatagagttatacagagaaatatgttctactgcgcattttggtgcaaactattccacttatattttttattctaatgttcctggtgtaattttgatgatacacttaccatcctaggattaatatggtgatagattcttgttggggactgtccaaataaagatcttcccttatatatattgttatcaacaaagcatgaacattattaaaaagttttgttccatatattagtgattgcataaaggatgaggcttttagccaatcaacttactttccacaataatctgattttatcaattcgtcatgttgcgttcctgttagtcaatataacatgtactgtagctcagctcttgcagattgtttgtcatccttatttttagatttttgtacaattaaatatattaactgtatttagcatttttggctacagttttctagttttacatgcttagctgacgtatcagataccactatttagttgtaatacttcatgatgtgtcatccatcatgtaacatgtctaagatgtagcagccttgctgagttgatgtataataatttagcagcagcatgcaatgttggcagcgttaaatacttatgatgctatattgtctttggaatttactagcacctgacatgagtatgtatttgtgctgtcatgtttcgtcataatttgatagaagcaaatatattattctactttagtctgtagcaatgaccaaaaatggtgctataacagttgtttttctcaaatgtgccctctttttatttcaaagcattcacacttacatctgacaaattttccccatccacagatgattttcggttgttttgtggcgatcttggaaacgaagtgaacgatgttgttcttacaaaggcattttcaaaatatccatccttcaacatggctagggttattagggacaaatggactggtaaaactaggggctatgcctttgttagttttgctaatgcgtcggatcttgctgcagcattgaaagagatgaatggtaaatatgttggaaacaggccaatcaaactacgcaagagcacatggaagaacagaatcgactacgaggcattacagaagccgaagactcaaccacagaagaagttcaaagcgcagaaaaaaagcattctacacaagtgaagtaaattcactctctagagagtgatccctagtgtcatgttgcacatgagtcctttgttgctcctgcaataaacgacgttaaagccttcagcgcccggcggtgcgcttgtcacgtttggcctagtgattgttctagggtagtatggctcgtcccaatttgtaatggaaatttaggtgtaaatattctaatgactggtaccgttgtgaacggtacgaagttctcttatgatgaactcctgtagcgtggagcaattcgattataaatattttcttc

SEQ ID NO: 17191 - DNA, 2509 bp, Oryza sativa
  ref <308>: DATABASE ACCESSION NUMBER: AK067652
  ref <309>: DATABASE ENTRY DATE: 2001-12-06
gtctgcctcttctcgactggagcggcgcccgcgccgccgctgctcgtccagacgcgcgccgcggtgggccacgcccgcgccgccgctgctcatcccatcgcgtgccggcggtgggccgcgcatctactcgcgccggcgcctgccgtcactttggcctcctcctctcgccggaaacgacgccgcctctcgtcagatctgccggagttcaacaacggtgtggccttctccgttcggtctccaccatccaggacctcgtccccaacaagaacctccaggacctcgtcgtcatcttctaccagcttgtctaggtatgccaaattccatccttctcctgaattgattggtttggtggttgggaaggtgaaatcttgggctagatctgatcgattatgttgcggatagttaatcttgggctaggtaatcttgtgctaattttacttgtgaaatctctaggcataatctgtgcagctctgtataagttgtggctctgtgtattaattcctgatgctcgtgtggataaagcttgagcatctctgttgatccatgatatactcttaatttttgccctaacaaacttgatacggtttgtgtattaattagaattcttcatgatcctgtgaagcacccaaacttgctttgtcaattcctggaattaaaatgggtaatttactatgggagatgatagtaacaaattctagatgtctgacataatgttcattcgaaggaaaatattttcttcctttccttttatgttgatcaagatatattgaaaggagagtaatcaggttttgtccctttatttccgaacagatatttttgtggttcattgctatggatttctgaaagaacatgcatctgttcatttattatatttctgttgaaggttacacttcaacgtagtaactgacagtatgctgcatttttctttcattctctggatatatagttaatcaggtcaatatacacatagaaattagagaaaaatctttatttagccttgcagaatggaaattaacactcacattaccacatggaattaagtcattctctgaatcgacggaattgcactattagtccttcaaatgtaaaatagaagaaagctctgttgtttatcaaagatatgctctgctgtttatcttttttatgctttgtaatctaatctatagaagtacagaatagccattactacctttgacattaactgcaaccttctgttatctgttaattttttgtagtttggtgcttagaagattcttttttttgttaacatttgtttgcttgatatcacacttttatgtgcttagaagtcatctcacacatgtcaacagttcctggaattaaaatggattcaagggctaaacgtcggaagcgggaggaagaggatgatgatatgattcttttccttttccctgctgtgcatcttttggatagtggtggtgggggagagagaaaacacctaggcatgcatcaacccagactggtgcagaaaaagtgacagaggtacttgaagggcatgtcatgaattgccttgtggcgtaccgtatggaaccggaggtcttcaaaagtactgcagaatttctaagaaggaagaacttggtccgtgacactaggggagttagagtggaggaaaagcttgctatgttcatgtatatgctatcccataatgcgagctaccaagatatgcaatatgaattcaagcatagtggggcgacaatccacctacatattagggcatttttcgatatagtccctactctcacccatagattcattaagccgcctcttgcaaaccaaactcattcaaagatcacatcaaatcctcgcttctacccatacttcaagaattgcttaggagcaattgatggtactcatgttcctatcactataaaccctgagatggcagctccatataggaatagaaagagcacactaagccaaaatgtgatgttagcatgtgattttgacttaaacttcacattcatttcttgtggctgggagggatctgccacggatgcccgggtgcttaggtctgctcaactaaatggttttcgcataccgatgggcaagttttaccttgttgatggtggatatgccaacacgccttcattcctcgcaccttaccgtggcgttcgataccatcttaaggagtttggtcgtggtcaccggcgcccatcaaactacaaataattgttcaatcaaagccatgcattattgcgtaatcacatagaaagggctattggagttttgaagaagcgcttcccgatcttaaaagtaggcacactacaccctattgaaaaccaagttaggataccagcagctgctgccgtatttcacaacctgattaggaggtacaatgggaatgagggatggttggatcttgatcatcagccacatgatccacaccatatatcacctgaagattttgttgatgttccagcgggaggtgatgagtatggcaatgatgtcaactcactgaataatcaaactcatcaaggaaatgttattaggg

SEQ ID NO: 17192 - DNA, 3306 bp, Oryza sativa
  ref <308>: DATABASE ACCESSION NUMBER: AK067653
  ref <309>: DATABASE ENTRY DATE: 2001-12-06
tttgctgatttatctttaactctggcaaggctcccggtattctacaaacatagggacttcctgttttataggccatggacttttgcacttccaaatgttctcgtgagaatccctagctccctgtttgagtcgataatttgggttgcaataacctactacaccatggggtttgcccctgaagctagcaggttcttcaaacacctgcttgtagtcttcatgcttcagcagatggctgcaggactgttcagagtcaccgctgggttatgcaggactgttgtggtaacgaacactgcagggtctcttgcagttctgatcatgtttgtgcttggaggattcatcctaccaaaagatgcaatccctaaatggtgggtgtgggcttactggtgttcaccccttacttatgcatacattgccttttcttccaatgaaatgcattctccaaggtggatggacaaatttgtacctgatggaaagagattgggagtggcagttctagaaaattcaggtgtcttcaccaataaggaatggtactggattgcaactggcgcccttctagggttcaccattctgttcaacgtgttattctcgctatcacttatgtacctgaaccgtaagtagctacactgtacttagtaataacctgttatgagttgcatctgacaacagattatttccttaacttcgccgattggccttttcaagtgagcaggtagtgcaattagtatagtattacatatatagtgcctttgtatgaatgttctctgcaattccaaatattgattcatgtagatattgaaaatctaaaacttttaacttcataaatttaaaatcatagatgcccaaattataagattgtattctgcaagcccaattaaattctggattcttgattccattttttatttcttttacagttcttgggaagtatttctttcattagcacacttctttttttagatacttctctccagctatatacctaaaaagaatgttttggtcattttgtcctttcttatcagctgtaaataaatacatttgatacgtataatatatccaatgtctgtgataaataggtattgtccttcaatttcaatgacatatttttgacattttgtaacggccatttattctattccttgaattagctgttggaaaaccacaatccatcctccctgaagaaaccgatagtcaggagaacattcaggaaggaaaaaacaaggcacatataaaacagataattacagttgaaacaccagaacctgtatccccgaactcaattatcaccctggataaggtgattcaacaattgcgtggatattccgcaaacacttctgataggtcgcgctcatacattaatgctgctggcagaactgctccaggaagagggatggttcttccatttgaaccgctctacatgtcctttaatgagataaattactatgttgatatgcctttgagtcagggagtaactgccgataagcttcaactgctgtcagggatatctggagcttttcgacctggtgttctgactgctcttatgggtgttagtggggctggaaagactaccctcatggatgtcttatctgggagaaagacaggtggatatattgaaggggaaatctatatatcgggttacccaaagaaccaagcaacatttgctagaatatcaggctactgtgagcaaaatgacatccactccccacagattactgtaagggagtccctacttttctctgctttcctgcgcctgcctaaggaggtcaatgatcaagaaaagaagatctttgtggatgaagttatggaactggttgagcttactggtctgaaagatgctattgtgggcctccctggtgtgaatgggctgtcaacagaacaaagaaagaggctgacaatcgctgtagagcttgtggcaaacccctcaattatctttatggatgaaccaacttctggtcttgatgcaagagcggctgctattgttatgagaactgtacgtaacactgtcaatactggaagaaccgttgtatgcactattcatcaaccaagcattgacatttttgaagcttttgatgagttgttgctactaaaaagaggaggccaggttatatattctggaccattgggtacaaattctcataaagttgttgagtactttgaggcaattcctggagtcccaaagatcgaagagaatcgcaacccagctacatggatgctggatgtaagctcagctgcatcagaagttcgattggaaattgattttgctgaatattacaggtcatcgactatgcaccagcgaaccaaagcattagtaaaagaactgagcaatccacctcctggttccgatgacctctacttccctagtcaatactcgcagagcacctttaatcagttcaagctctgcctctggaaacaatggtggacttactggagaagccctgattataaccttgtcaggattttctttgcattatttactgctttaatgttggggactatattttggagggttggtcacaagatggagagttcaaaagatctcttggtcatcattggatcaatgtatgctgccgtcttgtttgttggttttgagaattctgtaactgttcaacccgttgttgctgtggaaaggactgtattttacagagagcgggcagctggaatgtactcggctataccatatgctctagctcaggttgttgtggagataccgtatgtgttcgttgagactgtcatttacacacttattgtctacccaatgatgtcgttccaatggacaccagcaaaattcttctggttcttctatgtttcattcttcaccttcctctatttcacttactatggcatgatgaacgtctccgtatcaccaaaccttcaggttgcttccatattgggtgctgccttttacacccttttcaatctcttttcaggattcttcatcccaagaccgaaaatcccaaaatggtgggtttggtactattggctttgtccagtggcatggacagtatacggccttattgtgtcacagtacggagatgtggaggattttatcacggtccctggacaatctgatcagcaagtcagacctttcatcaaggactattttggctatgacccggacttcatgggcgtcgtggctgcagtgctggctggctttactgtcttcttcgcttttacatatgcttactccatcagaaccttaaatttccagcagagatagaaaatcctgccatgtattgctgtgtgttgcagttcacatgtaagatgtaacgctagttttcacccaggtatatattctatcttattgattgc

SEQ ID NO: 17193 - DNA, 1147 bp, Oryza sativa
  ref <308>: DATABASE ACCESSION NUMBER: AK099007
  ref <309>: DATABASE ENTRY DATE: 2002-08-28
gccctcccccctcttcgcctgagtcgagtcgcctcccccaccgccggccaaccatgctgccgccggccgcccgcctcgcggcccgccgcctcctagggctcgcgacctcctccgcctcggaatcggccgcggcgcgacgcttgtcccgttctccgatctcctacgccgccgcgggctgctcctccaggctgttctccacggcgcttaactaccacctcgattcgccggaaaacaaccccgacatgccgtgggagttcacggaggccaacatgaagaaggttaatgagatattgtctcactatccaagcaactacaagcagtctggtattattccaatgcttgatcttgcccagcagcagcatggtggatgggtgccagttgcagcaatgaatgctattgctaagatcgttgaagttgcaccaatcagagtatatgaagttgctacattttacacaatgtttaaccggactaaggtgggtaaatatcaccttttggtgtgtggaaccacaccttgcatgattcgtggttcacgtgaaattgaagaagccttgttagaacatcttggagttaaacggaatgaggtgaccagtgatggtttattttctgttggagaaatggagtgcatgggctgctgtgtgaatgctcccatgattgctgtggccgattattctaaaggttcagagggttacacatacaactattatgaggacctcactcctaaacgagttgttgagatcgtcgagatgctgaaaagaggagaaacccctcctcgcggcacacaacacccagagcggaaaaactgtggccctgctggagggaataccaccttgcacggtgagccgaaacctcctccgtgcagggatctagatgcttgctaggtttgctttgaattacaggcacacaaataagttgggccacactatgattatatggtgtggaaactggaacaaagcaaggcgatgtgttgtttgtattttgatcttgttttgtttacctctgcccgcatcttttttctctccttttgcaccatcagagaaatggtacattgataatgacgatatgttattttgtcagctgacatgaggcggcagtggtaaaaagatttgtattcgtctttcggcaaagataaaactcttggacattctcg

SEQ ID NO: 17194 - DNA, 2239 bp, Oryza sativa
  ref <308>: DATABASE ACCESSION NUMBER: AK067654
  ref <309>: DATABASE ENTRY DATE: 2001-12-06
ggctgctgcgcgactcgccgtcctccacttccgcagcgggtgggtagcttgccgcagaactcgttcggctttcgcatataccgccgccgccgcctacctagtacaaggtgtcactgaatggctagaacaatgggttcaacacctacctactgctcttaccaaacaaatggtgttggcgctttaaagcaatcacctcatatgcaattccaacaatcgtacaactatggagttaggttcctaaagagggataccctttctgtgcggattaacaaacatatggccaaaagaatagcaacaagcactggaatttgcactaagcctaggaggtttcacatgcctatagtatgctctgctggaatgacaataatttttattgcaactgaatgtcacccatggtgcaaaactggaggcctcggtgatgttctagggggactgccccctgctcttgctgcaatgggacatcgtgtcatgacaatagttcctcgttatgatcaatacaaagatgcatgggatacaaatgtccttgtcgaggtcaatattggtgacaggacagaaacagtgcgcttcttccactgctataaaaggggagttgaccgtgtttttgttgatcatcctatgtttcttgagaaggtatggggcaagactggaccaaaattatacggtcctaccactggagatgactaccgggacaaccagttgcggttctgccttttatgcctcgctgctttggaggctccaagggttctcaatctcaacaattctgaatatttctcgggaccatatggtgaaaatgttgtcttcgttgcaaatgactggcacactggagtcctgccatgctatctcaagagcatctatcaggcaaaaggaatgtatgtgaatgctaaggttgctttctgcattcacaatattgcctaccagggtagatttgccagagaagactttgaacttcttaatctaccggacagtttcctgccttcatttgattttattgatgggcattttaaacctgtagtaggtagaaagattaactggatgaaggcagggatcactgaatgtgatctggttatgacggttagtccacattatgtcaaagaactcgcttctggcccagataaaggtgttgaattggatggcatccttcgcacaaagccccttgaaactggaattgtcaatggcatggatgtttatgaatggaatccagcaacagatcagtacatcagcgtgaaatacgatgcaacaacggtaactgaagcaagggcactcaataaggaaatgctacaagctgaagttgggttgcctgtggactcgagcattcctttaatagtttttgttggtcgtcttgaagagcagaaagggtcagacatactaattgcagccattccagagttcgtggaggggaatgtccagataattgttcttggtacagggaagaagaaaatggaggaggaactgatactgctcgaagttaaatatccaaacaacgctagagggatagcaaaatttaatgttcctttagcgcatatgatgtttgctggggctgattttataattgttcctagtaggtttgagccatgtggtctcatccaattgcaagggatgagatatggagtggttcccatctgctcatctactggaggacttgtcgacacggttaaggagggcgtgaccggattccacatgggtttgttcaatgtcgagtgcgaaactgttgatccagtggacgtcacagcggttgcttcaactgtcaaacgggctctgaagcagtacaacacaccggcattccaagaaatggttcagaactgcatggctcaagacctatcttggaagggacctgcaaagaagtgggaggaggttcttcttgggttgggcgttgaggggagccagccaggcatcgagggtgaggagctggcgccacttgccaaggaaaacgtggccactccctgaaattctccatgacggtgcctagcttgctggcttgtttaggtgacaggcagcctgataggatcccatggacttctgagctcgccaccggcaaagccactatttgtatccctgcaggcttctgccatttctctcgtctacttcacgtgtaatataatcgcagatgttacttagagatgatgggccagatggcatgcatttgcctgtttctctctcgctccttctgcatgtgtaatagtatatttggctgtgaagttctggaccctgtcagtcgctgtcctcgtactgcatttcttgt

SEQ ID NO: 17195 - DNA, 2571 bp, Oryza sativa
  ref <308>: DATABASE ACCESSION NUMBER: AK067655
  ref <309>: DATABASE ENTRY DATE: 2001-12-06
gcgtggatcggttttaccgggatcaccaaatggaccgtgttcttctgagctctcaattgtcatcacaaacggttgttaacacaagggttcaacaaggaagcggtggtatcaacagcataggatttgctgttatcagaaaggggagcttaaaattgagatgttatgcaattggtggacttgggggaggagagaatttgaatgatcctttaaaggaaagcaataatggacctgttttgcaaggattcaatggatctagtgcttcctttcggactgttggtgctaaaatcactcaggaaactggtgatttctttgttagcgatgcagagggtgacccagacaaaccaactgatggtttttcctctattgatgaggctataggcgcattgcatgaaggaaagatgatgaaagcggtgataatgaaggggatcttgtcatggcagctacgctggcagacccagaatctattgcattcatgatcaggaatggttctgggatcatctcagtgggcatgaaggaagaggacttaacaagattgatgattcctatgatgtctccaattgcagaaattgaggatatttcagctgctgcttccacagtaacagtggatgccagagtgggcatatcaaccggcgtctcggctgcagatagggcaaaaacgatttttactctagcctcccctgattctaagccaactgacctcagaagaccaggccatatattccctctaaaataccgaaacggtggtgtgctaaaaagagctggacatactgaggcatccgtcgatcttgtcgcgttggctggcttgcgccctgtgtctgtcctgtcaaccgtcatcaacccagtggatggttcaatggcaggaatgccagtgctgaaacagatggctttggagcatgatatcccaattgtttcaatcgctgatctcatccggttagtataccttaaggtgaaccctttgtgaacttatagcttgttttcttctttctttcggtgaaacttcatagccagaattgttcttctttagaatgcactgctgaaactactctccaaggtggaacctgaaataagaaaaatgggaattacctaggaggaactaggtatttttaatcatggaaaataaccgtgtgaatttgaagctaagatgctcgaaccagaaatgagatgccattggtcatggaactaggacagtatatgttaggatttttcagatatgcaaacatcttttgtgaaatctcatctcattcttttggtctgattcaggtatagaaggaagagggagaagctggtggaactgattgctgtatctcgtttgccgacgaaatggggccttttccgagcttactgctaccaatccaagcttgatggaaccgagcacattgctgttgcaaaggtgatatacattatgctcttttcccttctcctgggacttgaaattgggcagaaaatgcaaattatgttcttgtttgatgtgtcagaagagcagattaactcatcaagtcatcgctcatttcagtaaaattttctgcaaattcctgctcttttcccttcttctcctggactagaaattgggcagaaaaatacaaattctgtccttgttcgatttgtcagaaataacaaattggcagaatactccatcgtttcatcgtttatttcagcaaattttctgcaagttctgttcttgtttgatgtgttagaaataacaattttttttgttagataatgggttagaaataacaattgggcagcagaatgatcgatcagttcatcgctcatttcagcaaatgcaaaaattttgtggctgatccgcagggcgacatcggcgacggcgaggacgtcttggtgagggtccattccgagtgcctgaccggcgacatcctcggctccgcccgctgcgactgcggcaaccagctggacctggcgatgcagctcatcgacaaggccggccgcggcgtcctcgtctacctccgcggccacgagggccgcggcatcggcctcggccagaagctccgcgcctacaacctccaggacgacggccacgacaccgtccaggccaacgtcgagctcggcctcgccgtcgactcccgcgagtacggcatcggcgcccaggtagtgcaccgacatcaaccatggcgcattctgaattcaattttgcatttgcatttgcattttgatgattttgatcccatttcagattctgcgggacatgggggtgcgcacgatgcggctgatgacgaacaacccggcaaagttcgtcgggctcaagggctacgggctcgccgtcgtcggcagggttccggtgatctcccccatcaccaaggagaaccagaggtacctcgagacgaagcgcaccaagatgggccatgtctacggctccgacctccccggcaacgtcccggaggaattcctcaacccggacgacatcgccggagaccaagacgaagacgacacccacaactgaatgcaacaacaaaattcacaaccacagattctccacatctcattttgtgatcaaattgcatctcaaactgcaccgatcttgttatactagtaacaaatcttgatttggaaccg

SEQ ID NO: 17196 - DNA, 3270 bp, Oryza sativa
  ref <308>: DATABASE ACCESSION NUMBER: AK067656
  ref <309>: DATABASE ENTRY DATE: 2001-12-06
gagtgtctaggccaggtcctctgtgatatgcattgtgagagatcccttattacttagtgattataatagtcattgtgagggaacacatctctgatctccctagcttcattcattttcctcattgttgatggtctatctttcccctatgcacccatgtagttgtgatcatctcctaggttgtgaactatgctttctccagtcctcttccttctttttcagctttaattttgagggaacgcagttaatattagaacataaatataactatttttttaccaatatgtgcatcactgtggaacttcccataaacaatacaacttatttattgagttcatagaattttggtgtctcacataaggtgcccatatgttagatattctcatagcacctcttgttttacatctgaattttggataaaataaaatagaaaatactttgctgtctcaattttgatgtgacatgtatctcttccctcagttaaactacactatgttgtatgggaaactatgtgatgccttctatatgataggtttatgatgattccattcgtggtcatatttaacattccagacaatgtatgggacatttgtgtatccccgtatttgctttttaccttaaaaatgtttgctggcgttatgtttcatttagttttgtaacttcgacctctatagttgtctagcattccatttgtccaagtatttttattccagtggaaggaatggtacttgcagataactttgcacttattctctgcaaagagagctttattctgtttacgccatccccattgtagtgctttttatgctgtctatcttgcaacgtttttgatacttatttccttggaatacggtgcagtgacactgattcccctgcttcctctggcagttatacatgcttacgaattctgattttgtagtcaaaatttgtaggtaaattccttattataacctgtcattttgtagctgatacctgatgcaattttattttagttttcttaattaatctccatgaacttagagtaacctactttgtttctttatgtttctattctcagtggtaaagttactcaacagtgaggatttctaaagctcaacagaactagatgatacttgcataatgtggccctcagatatttggaaggcgcatgcagggtcatcacagtcagagggatcagcactggatatggagagaaacggatgcaaccataactgttgcccatctcctctccaaccaattgcatcaggtggtcagcactctgaaagcagcgctgcatatttttcttggccaacatctactctaatgcacgggtctgccgaaggccgcgctaattactttgggaacctacagaagggtgtgttacctggacatcttggccgcttgccaacagggcaaagggccaccaccttgcttgatttgatgattataagagcattccacagcaagatcctacgtcgctttagtcttggtacagcaataggctttcgaatcaagaagggtacattgactgatactcctgccatccttgtttttgttgctcggaaggtgcacaggaagtggctcagccctacacagtgccttccggctcaccttgaggtatacggatcatgtggtttagcaatatatttaggtcatatgcaattacataatgaatttactgtgtcatacatagggaccggggggagtgtggtgtgatgtcgatgttgttgaattctcttactatggggcaccagcaccaactccaaaggaacaattgtatgacgagcttgttgatggtctgcgtggtagtgatccatctatcggctctggttcacaggtagctagccttgaaacatatggtacattgggtgccattgtgaagagtcgaactggtaataagcaagtaggcttcctgacaaacaggcatgttgcggttgacctggattaccctaaccagaagatgttccatcccttgcccccgaatcttgggcctggtgtatacctaggtgctgttgagcgagcaacatcatttatcacagatgatgtttggtatggtatctatgcgggaacaaatccagagacatttgtcagagctgatggtgcatttataccgtttgctgatgattatgacataactagtgttaatacctcagtcaaaggagttggagtcataggtgatgtaaaggcaatcgatctacaatccccaattagcagtctcatcggaagacaggttgtcaaagttggaagaagctctggtttgacgacagggaccgttgtggcatacgctcttgaatacaatgatgagaagggcatatgcttcttcacagactttcttgttgttggggagaaccaacaaacatttgatcttgaaggggatagtggaagccttataatcttaacaggaaaagatggcgaaaagccacagcccatagggattatatggggtggcacagccaatcgggggaggttgaagctcaaaagtggtcagggtcctgagaactggacaagtggggttgatctcggacggcttctggatctattggagcttgatctaatcactacaagtgaaggactacaagaggccctagaggaacaacgaattattctagctgctgctgcagcagcagctaattcaactgctggggaatcgtcacctgttgctggtcctcaagaaaatgagaaagttgacaagatttacgagcctcttggaatcaacatccaacagcttccaagagacaattcagccacctccacaggacccgatgagttccatgtcgacacggtggaaggcgtcaccaacgtcgaggagcgccaattcctcattggcatgtctccagcacgcgaaggccaagaagccaatggcgacctgaacaaccttgcggagctagagaattcacctgaagacatttgcttctccctgcatctgggcgagagggagcccaagcgactccgctccgattcgtcgctggacatagacttgcagaaatgaaatgaagctgtgtgctgctgttccatcaccacccagctctgtataacctagtgaaggcagttccattctatgaacccaatagaaataaatatgggctaggtatttgtttccggaaactatctagataggtatccggataatttctatcgttttcacaggatacaagccttactgtatttgtttctgtttttaaaaaattttctgaattcgtttctgttttaggtaccatccaaaattatctttccgacactggccgttttgaaaaggtgactggatggttataaactatcgaaaccgatttcatc

SEQ ID NO: 17197 - DNA, 3802 bp, Oryza sativa
  ref <308>: DATABASE ACCESSION NUMBER: AK067657
  ref <309>: DATABASE ENTRY DATE: 2001-12-06
ggttggcgtaaaagaaaatctcccgtctcgtctcctccgctccttgcgccatcccgggctgaacagggaggggcgacgatctccttctggcgagcagagcaagggaggggaggggaggggatcctggtgatactatgcgtttgatgtcctctgttccttgacttggatgtaaccagttatctgcctcgtcagtaacctttttgatccttcaaacaaaaagtcagtagtacttgcacgtgattggcaaaattagtcaagacgggtgctctttgctgcgtggccgcgaggccacatgggacaaagtctaatcttgcaagcagagactgttctatggatcctaatgaaccttgctggcggatgaattcaagcttctctcctccaatgtcaaggagatgggactgcaggaatccatctgatggattgccacacaggattcatgatgctccaccttatgtatcatcactgtcatcccatagtaaaggaagtagaagtgcatttggcagtgaccagtacttgaatcaccagcattctgtatcagatggggcactgtcttattttggtagtccagctgatagtctccaggctccacgatggacgccctctcttcaaagatttgatctcggcgagttctctacacctgcaggtggtacacacttctccctggttacatatggttgatatcttgaactcactacacatggtctatttgcttaatatgcttatatgtttaccagaatttttgacataaaatagctactcgactgaagaaagaaagaatagagaagatgcaaaagatgaatgaaaacattcagtgaaaaaaaaactgcatcaaactctaagccaatttatgtcaggagaacatttggaaggctagcatcatcctgtaacatagggtagttattgttaatttgttatatgaaacaacataacttggtaatcttaacttctgcacacaaatagttagtgttaaaggtgagttctagctctctcaatactggagctctgtattcttgcttgatgaagctacacgttcaaatgaagcatacacacaacacaaaagcttatgaataaactatgttttttttttctgaatttagagagatcgacatgattttttcctgtaaagatacattccatcagtttttcttctaatattatgtttagagaaaacaggtctataccaagcaaatgcctagttttgatatatactgttggaacctatcagttttctttagtgccacttaaagttgacttcatgcatatgctgctgcatcacaattactgaactgatatcatctcccccattgtgaaaaaaaaaagaagatctgtgcgcagtatgcacactctgctcctttgctcctcttcaacttccaacaatcaagaaactgctattgttgtaaacgaggaatataactagcaggcatgcgaattgcttaatttcccttgcatgctttctgtctggtcaattggagagggggttctgatctgtgacagcgcctgaagagggagtggtggaagacttgtcggtggcggccacagtcattgctctgcagcagagtgacgtaggtgtccttggcaactggcaagggtggcaccatgagcaagcaagagaacagggaagagtgtaggcactcagtttgatcttgttgaggggaaacaacgattaggtcgagaaagtgatctggtgataattaagcgattttctttatgatctactccaagcatgtcttctcattagcaatcagaacacacctgtgagttttgtctgagagtattaaccacttaaattttaacttttaactctatcatgtatcaagaattaacacataaatgctgtttagacgggcttttttttttaaagattgtcctggttatgccgctggggtacgtgttggccgttctcttttaaggttcatctaatctttcacatcaaatgctttactaaacagcatgccagtctgtatacagggatcacatattatatcgaatttatctgtcttgtgaatcccggaatacttgaaccggaagaataatgttcccatgagaataaagatgaatatatggtgtggaacttgggtgtaaaatccgtactgatatgtgatatacaaacataagcacgagttggagaactacaactatatattgcggatcatactttagtcatgcatatcacggatatatacaatttattgactaggcatattagactgttcagaaaaaaaagattagaataagtggttttgcccatttagttatccagttttccattctcactgattttaagcaatataagctaccttggcaactgaaatctaaggaaaactattaaattcctgtaaacatctgtaatgagatgtgcattgctggggtgcaagctaaagacagctgctcatgcaattgctcaaaactatttcttccatcatgctttcctgcaacgatttgaagcaggccacaaaacattccttggaccccttactgttgaattaacatttattttattttgtttggtccaggatcaagacctgacacttctggttatccccaatccagtgagagacaattaactgcagtaagcagtttcagttctgcatcccccttctcagagtcaagtcagctggcatcttctagtaaaccaccatacttacatttaccacgcaatcatctgggaaggcgatctttcatgtcaaaaccagtgtacccgcttgtcttccgtaatccagtgtcggaagcagaagcctctgggatgcctgaagctagtaatattgggcgaacaacacctagtgatgattctcctgtgtggcggcgcagcttggcaagtcctgagctcaagttccacaatgcattgagtgagtttcggaaggtagaggcttcaccagagccaaacacaagctcaaggagggaaggattcagatggagcaatgctagtagctatgattttggatatgatggtgatgccattgacatttcagatcatattagtgtggagtcccaaagatccccgacaagttcagtgaggtttcttaagtgtggcttatgcgagagattcctgcggcagaaatcaccatggacctcaaaccggattgttcaaaattctgatatgccagtagcggcggtccttccatgtcgccatgtcttccacgcagattgtctcgaggaaagtactccaaagagtcaagtccatgaaccaccttgccctctatgcacacgaggcactgatgatgaagggtgtgtctcattctcggaaccattacatgttgccctcagatctgctcgtaggaatcaaggtaatagtttctctcttggtggttctggtggaagtaccagcgcaaatccttctcgtagtgatcatggcttgaagagaaatcagtctgcccttgtggcaagacgcagtggcacgatgttccgaaaccgttttaagaagcagttctccttcaaggggaggtttgggaaagatctcttcggtggtagagttttcaagaaggttggatcatcgtcttcttcaggtcaacaggacgatcgtcaacagccgaaagcctgactgaaaaaaaaaatacatgaagtagctagtatgaaatcgcgcgattataatgtgccctgctgctactctagcccctgtttaatcgagtgtgtcaagaagtcgtagtccatgtataatttatgatagaaggtgaaattctgtatgcatgcggccctgcgctagcacttattaggtggtggtgtttttgttttgttggactggagttcgccttgcatgtggcaccataattatgctctcggcatgaatgcttactgttaagtattg

SEQ ID NO: 17198 - DNA, 2068 bp, Oryza sativa
  ref <308>: DATABASE ACCESSION NUMBER: AK067658
  ref <309>: DATABASE ENTRY DATE: 2001-12-06
tgcggctcacatctgaaccaaatcgtgctcggtctccgtctccacctccgcatatcatcctccgcttcgcttccgctcgatcgattcctcccctccatcaccaccactcctccgccgcgtcgccgtcgccgtcaccgacaagcctcgcctctcctcgccggttcgccgtcgcggccgcctcctttgtccgctccagcgccctcctcggcccggatcggcccttccccagatggagagggcacttgattccttgacgtacaaaggctccattccagacgctatccttcagtcaagaagggataacaaactctttgtagtgtacatatcaggtgaagatgagacttcgagtagtttggaacagtcgacacttgttaatgaaagtgtggctgaagtgataggcaactgttgcgtattcctgcatctaaaacaaggcaacgtcgatgcatcccaattttcagctatatatccacagaaggctatcccaagtatatctgtcattggacagaatggtgttatgctatggtgtcatgagggatacatcagctcgaaagatctgaaagaaaatattgagaaagcttgggctacccttcacctgcagggtacagcagcagcctttctgactgcatcacttgcttcaagaatgactgaacctgtgaataccaccccgaccactctacctactcaaggaggctcatctgctgcagagaatccctctacttcatcaaatcaatctacaggaacttctggagccagtgggtttgctaatcctactgattcggtggcacagccacctagaagcacaagccgtgatgaaactcccagcataagtgaaaaagaatcctcaaatttggattcaagtccaggtaatagaactgttcaagaaaggccagattcagatagtgcgcaagttaaaggttctttgcctgatcatccaaggagctcaaatatagaaggttgtgcaaatccagttcaatcaggcaatacagcatcactaaaacagaaaaataaagtggatgatggtttcaccaaagtttcctcagagtcagttcctaccagagtagctagtagaggtaaatcgtcaaaggtagctgtggatcaagacaaggcaacaaccactagcacccctattgaacctgcccctgtgaggtcaaatgatattcagctggtcgttcgcattcctgatggacctagtctgcagattaaactgacaaaagatgataacttaaggaaggtgaagaattttgtggatgaaaaccgtgctaatggggctggatcttacgatcttgctatgctttatccaagaaaagttttcactgaacaagacatggaagccacgttgcatgaactgggtattgaaacccggcaggctctcactattgttccacatcataaaaccattcgagcagcaaagcgccaatcatcatcatcaccccatgaaggggataacaatatggatgcagacagctcaggtggttcgggatatttcggttatctgagaactgccctatcgtttgtgaatccactgtcctacttgagagcaaatgctgctccatcaaaccctgatcagttggcaaatcaggggtcgccacagtacagaccgagcactggaccctggaatcgtcctggagaggacactgcttcggaaagccgtattcctgatagtgcgaggcaacaggctgctagggatactagctccgggagcaccttgaggaggcggccgagacaattcggtggcaacgttcacagtttgagaagtgatgaccaaggcccatctgatgataggaatgtttactggaacgggaattctacagagttcggaggcgaagataagaaatgagagctgagcaccggcaatatcatggcagagttaaatatatacttggacaaataacacgatctaggtaaataaatacaaacaaatttgagatgttaaattcagtggtaccagtaccacaacatagacttctagtgtaaaatgataatacatctgatgattggctgtgatggttcgtttccgggagccgattcttcgtcagtttgggtagtatggagagatattttcgtttgc

SEQ ID NO: 17199 - DNA, 1183 bp, Oryza sativa
  ref <308>: DATABASE ACCESSION NUMBER: AK067659
  ref <309>: DATABASE ENTRY DATE: 2001-12-06
gctcgccccgattccaattccaattccaccaccgatccatcgcgacagggaggaggcgacgaggagaagcggcggcggcggcggcggcagcgggcggcgatggatgtgagcaggaggaagaagtgggtggcgtgggtggcggcggtcaccatcttcgtcgtgctcatgctcgtcaccccggccatcccgcagaacgaggagtaccacgacttcgccgaccagcgccgcctcttcctcgggatccccaatacgctgaatgtgatttcaaacatccccttcttttttgtgggtgtcgttgggctcgtcttgtgccattacaaaaactacttcaggctaaactcgcaaggggagctctggagttggacactgttctttgctggtgtgactgctgttgcttttggttcatcctattatcatctcaaaccgaatgatgccacactagtttgggacagattgccgatgacaattgctttcacatctgtcatggccattttcattattgagagggttgatgatagggcaggaacaaagtccctagcacctcttgttattgctggtgcactaagcatcatgtattggaggttctttgacgatcttcgcccatatgcagtaattcagtttgttccatgcattgcaatacctgtgatggctattgtaattccaccaatgtatacacattcgagctattggctgtgggcagcaggattttacctccttgctaaggtagaagaggccgcagataaacctatatataaatggacccatcaaattgttagcggtcatactcttaagcatctagctgctgcaatggtgcctgtgttcttggcactcatgctggccaaaaggactgttgaaccagaaagggtaagtttattccagcggtggaaggtcaagttggttgcagtgagagagactcgattcaacaaggacaggaatacagtcgactacaactatattgcagtttccactacacctgaaccatagatgtattgttattatttttcatgactttaatttctgtacacatgtaagagaaatggcaccggccagcatagaaactagatcgatcagtgtacattacaatacgagacgcgtcatcgctgctaatcagaacgtgatggtgtcatggtgatgttgtatgataacccttcataaataaatcttgtgcatattattcttgccc

SEQ ID NO: 17200 - DNA, 3638 bp, Oryza sativa
  ref <308>: DATABASE ACCESSION NUMBER: AK067660
  ref <309>: DATABASE ENTRY DATE: 2001-12-06
gctggtctccaccctccctttctctctctagtcctctagagccgagggttgctgcgaggaaagcgtaggagagagggttgctggctgcagccccggcgagaagcgccattgttgtcgtcgttgggccaagaaccaagaaaccaagaagacaagaggaggaggaggggggaagaagacggaagagagagaggaagaggcactggataggtgcatcctttgcctctagccgctttctctttctccttcctggaggggggagagagagagaggagtgggagaggaaaggagagtagatgggcgagatggtcttggccgggtatggcatggacaaggcggtgaggagcagcgtcagcttcgagacgccgtgcggcaggctgctgcgcgagctcgagcaaatatggactgagattggggagcgcgaagaagataaagatcgcatgttcttagaacttgaaacagagtgcatgcgtgtgtaccgtcgaaaggttgatagtgccaatgctgagagatcccagctccgtcagtcattgatggccaaagaagcagagcttaaagttttagtggcttcaataggtgaaattaccccaaaatttaaggtggatgaaaagcaatcattgaaagagcaacttgccaaagtgacgcctctactggaagatctcaggtcaaagaaagaagaaagaataaaacaattctcacttgtccaatctcaaatcgagaagataaagcacaaatttcggatcacaataatcagcatgacaatggtccggtcaatcattccaaggacaatcatgatttgtcaaccagaaggctttctgatcttcaagcggagcttcgcaatttacagaaagagaagtctgatcgccttcagaaggtcttcatatacgtcgatgaagtgcactgcctatgctctgtgcttgggatggattttgcaaagacagttaaagatgtgcatccaagtttacatggggccaactcagaaaattcaacgaatatcagtgatagcactcttgaaggtcttactgagaccatccttaagctcaaagcagaaaagaggactagagtttcgaagttgcaagaaatcgtcggaaagctccacaagttatggaatttgatggagtcaactgaacaagagaggagacatttcaccagagtagctgctgttcttggatctactgaggaagagatcacttcatctagtgtcctgtcgctggagacaattcaggagacagaagaggaagttgagagactaactaaacaaaaggcaagtagaatgaaggagcttgttcttaagaaaaggttagagctagaagatatctgcagtaatgcgcatatggagcctgatatgagcacagcacctgagaagataaccgcattgattgattctggtctagtggatccttgtgaacttctttccagcattgaaacacaaatagcaaaagcgagggaggagtccctaaccaggaaagatatcatggagaaagtagacagatggctatcagcttgtgatgaagaaacttggcttgaggaatataaccaagatagtagcaggtatagtgctggtaggggtgcccatataaatctcaagcgtgcagagaaggcaaggatacttgttcaaaaaataccatcaatgattgacaacttgatagctaaaacatttgcgtgggaggatgaaagaagtgtgccatttttatatgatggagcccgtcttgttgccattttggaggagcaaaaactcagaagggtacaaaaggaagaagacaagagacgacaccgggaccagaagaaactgcaaagcttattgcttaaggagaaagagttgattttcggctccaaacctagtccaaaaaagacaagcagctttaataggaggacgagcagccatcacccgaatggaaatggagctgggttcatgaccccggtgccccgtagagtttctgcaggcagtgccactcctgagcttctaactccacgctcatattctggacggtacaataattacttcaaagagaacaggaggctggctgctgcaccactgaacttctcaacggtttcgaaggaggatagtatgtcatcctttgcctccatcagcggctcagaacctgattctcctttggttttgcactgagatcccatcgttcgattggacattttcgagaatgtcacagttgatcttttgaggttctgataatcctgatttccaaatgctgcatttctggttagggatgagagacttctcagcaagaaggatggtagtgaagactatccacgacattgggccattgtgtgttaactggttgacattgctaatgagtgacgacaggttgtgacaggatttagataagatttgcctgtagatatatgacctaacatctgcggtgctgttgtacctaaattacgtcgattgatcagtgggttggttaggaagcatgcctaagttgtgcattatattcgttttcttggtattctttgagttttgtatttagtcattgttttgcatgtgaaaaggagttggtgttgatttgcaatccaaaggtgctgtgtaatttcatcctgcagactcaacctgaggcctttgatttgtgtgctgtactgctatggaaatcgtagttcatacttcattcaggaaggtaactcaaaggtcgcatatgttttactaccatttagttcatacttcatacttatctactcccttcgtttcacaatgtaagactttctaatattgcccacatacatttagatgttaatgaatctagacatatgtgtgtttagatttattatctatatgtatgtggataatgttagaaagtcttacattgtgaaacggatggagtacttgattatcggtaagaaataaaactatatgttacaaacctaacaagtgggctaagcaatgcagtagaagcaagtggacttgttaccaattgctgctgcaattgtgggatcaaaactgttggtcaaggactgaagatttgggcgaatattgaattatattgatataagctcctcctaatggagtaaccaagtcgcttacaacgggtaattaaaatacaggaaagaagaaaacaaggagggagcatactagtacataataaagagaaagaaacagaattaaacatgggaggagcccgaagaaatagcaattgagaagacagccttccacccatctagggccggtccatctgcttctttgatgtaaaattcacgcacctgatggtggttgattattgaagataacgttgtttttgtgattccaaatcctccaaaaagcagaggagatagaagctctgataatctttcattgcgatagaagctctgatagtcttcaactgaggaaatatttggccagcacccctattttggaccagaaagaagcaaattaccttttgctgacggagggagtacattttacaacacccttgctgcattttggtcttccaaagatatagggaggcctgacatgtgtaaagaacaagcctgtgtagtagctaaaacgccagtgaacagcagaacagtaaacaacttgagaattacccctttcttagcatgaaacggcaactccaagataaagttgacacgcagtagcaaagttcaattgtattactgtacagtttggcaacacgatttcatcttttgacgct

SEQ ID NO: 17201 - DNA, 2220 bp, Oryza sativa
  ref <308>: DATABASE ACCESSION NUMBER: AK067661
  ref <309>: DATABASE ENTRY DATE: 2001-12-06
gtccgtcgtccccaaaacccgagcaagaatggcggccactccggccaccgccaccttcccgcacctcggcctccgccccaagcccctcctcaggcgccgcctccgccgcatcgccgtctccgtctccccctccggccccgacgagacccccgcggatgacccgccggtgatcccctcgatcctcgtcaagaacaccgagcccgaggacgtcgcccgccgccggagctgggtggagcacgggtgggcgccgtgggaggagatcatgacccccgaggtcgcgttcgcgcggcacagcctcaacgaaggggaggaggtgccgctccagacgccggagtcgcaggaggcgttccggatgctcaccccggcgtaccgggagaaggtggagtccgagcccgggtacgaggagcgcctcttcgccacgcgcgacacgcccgagcccctcgagacctcgtgggccggcgagctcccgctccggctcgtgccgccgcgggactggccgccgccggggtgggaggtggaccccggcgagctggagttcatcagggaggcgcacagggagttcacggagaggctggacatggcggcggtggcggccaagggggtgacgcacgtggacaaggtggagaacgcgccggatgatctggggctggatcgatacaagatgttcttgaagcagtacaaggaatgggtggaagccaatcgggacaggttggaggaggagtcctacaagtttgatcaggattactaccctggcagacggaaaagaggtgaggactacaaagaggacatgcttgaactcccgttcttctatcctggacagatctgtcgtggtcgagtgatcagtgttcacctctatcagggagcttttgtggacatcggttgtgttcatgatgggtgggtaccaataaaaggaaatgattggtattggatccgtcatcacatcagacctggcatggaagtccatgtagagattctggccaaacgagatccctaccgcttccgtttcccactcgaaatgcgctttgtatatcctaacattgatcatctaatattcaataggttcgactatccaccaatatttcaccgcaaggaagatactaacccagagcagttgtggcgtgaaggtggaagaccacctattcctaggaaaaaacctttgaaagatatggagaaagaacctttggtatcagaccacccctttgttgaaacgctttggctgtggcataatgcagagcaaatgattttagaccatgaggaggaaaatccagataaattcaaggatacgacatatgagtccacagttgatagttccattgttcatgaagaaaatagagttcaacatactgaagggtatttcaaagacacactgctgaaaaaggaagttgtgatatcaaggagcttgatctggatgccgctcgtgctgagcgtcagctgataaaaaaactaagaaaggaagcagaggaaagaggagaggaatacaaagtagggaagctccgacgaaacaaagaaatggatgagtacgatctaatgcaatggcgccgttctttcgaagagcgggaagctcttatcagagacatatgctgccgtaaagcatttgggcttcctgtcgacgaacctgggcgatatgacgtggatgagaccgaagtttatggcaaagattactacgacccgagtaagcctatgtaccgctacgactactggggagagcccaagaacaccgagaagaccaagctagagagggaggtggagcttcacaaccagcaggttatcggagacgcgaagaaatggtgcgagatgtcgtacgacgactatgtccggcagaaggtgcggatggaagccgctgaagccagggagaggcagaggaaggcatcggagccacaggaggaggacgagaagtatgaggatgagatggaccttgacttgaagaagatgatggatccccaggcgccacacaatcggtgtttcatcacaaaatgacaggttagaatgttaggcacactatgatttagacatagtagctctttttttgggtgttgtatgtgcaaattttgtaggagatgtaacactgttgatgatagaccagcaatatgctttgcctggcatagccctggatgaagccacagttgaagctagactgctagaggctatgctgtttgcttggtcacctgttcaaagctgtaattttggcaattttatgtgtgatggttttctgaagaatgc

SEQ ID NO: 17202 - DNA, 2325 bp, Oryza sativa
  ref <308>: DATABASE ACCESSION NUMBER: AK067662
  ref <309>: DATABASE ENTRY DATE: 2001-12-06
gctctccctcctcttcattctctctctaaaaaaaggcaaagaaaagcttgccgtgcttataaataagcttccccttctctccccgtgccggctcctcccctctcccccgatccccttcctccacctccaccccccacccgccgatcgccccccgcgagctcgtcccgtcgcggcgggcgatcgctccacccacccatccacctccaccttcccgcgcgattccccgagaggcgaggcgaggcgaggccgctatagctccgctccgctccccgaccaccacgacgcggctggcggcggatcctccactccacccacccaccccgcttccgccgatcggatcgcgtgctccccccgaggtagaggtgatgataaatcatagttagtgacttagcttgcagcagttctttcttgcagctaagacaaataataattggcgttatggcatatagaaatacggtatgcactccccaagtaattgatctagaaactgaacaagggcactctcatattcattctgaaagttttaatcgcactgggaatgattcatctgaccaaggtgcacaacatgctgtcagaggggtaggaaatgctacaaacattggtctatctgatatgcgaagttactatgatgcgggcatgaaccatccacatcaacctgttcataacttgcctccaaatttaggagttgattcaggttttgtcttcccatccagtatgtacaacccctgcatgtcgacaacatctatgaaccaatatgtttctcacactcagagcttcggattgccatcaaaccaagttgttctaggaagcatggatgaaggtagcagaaatgaaaatgctggtgaaagtgctagaggattcattaaaaggaaaaatgctgcagttgcaggaagttaccactgtgctaatggatttgcaagttcaagctcttctcatgcatctctgaatcctacacataggccatgggatccttcttttgagtcaaatgttttgcctaacacttcatcatataacccatcagagtaccatagccagaccagttggccatctatggaaggatcttccattcccagtaatggctttaatttgatgggtgctcacccagaatcagcacagcatggtaattatgcatttccaactagtcacatcagccagtgctttcaacctactagcaatacatggatttcccagtctgcaaatggtattgctgatggaataccacagtgggaatatgtcaatggaatgaataatgctccagcaggcagattttcccgttcaggtatgacagaaacagtgaatggaagcttccgtgaatatcagaatggcccttcaaccttatgtcgagggcctttaccctattttcatcagcatgctggcatgcatgctcataatctgcttgatcatacacaagtgcaagctccttaccaacaatgccacaataatcctgtcttacatggtgtaaatcattctggcaaccggttccatttgggtccaaggattccagttcttttctctaattctgaacgtacttttgggcctccacatcatccactcttggcaaatccagtgaaccacagaaatatacgaatcctgccacctgagcatgctacaataatggatttttcaagattgtatgaagtgtcaaatgttgtagatgagcatagagatatgcggctagatatagacagcatgacatatgaggagcttttagcattagaagagcagattggagatgtaaatactggtctggcaaaaagctacattgtagagaaattgaagactagcttatttgtgccaggatcatcctgcatgtctaataagtcttctgaatcttccatggagaatgatgcttgcataatatgccaggaagagtatcaggttaaagaatgcattggaacccttgactgtggccacaggtaccacgaagattgcataaaacaatggttgatggtaaagaatttatgccccatctgcaagacgacagctttgtcaaccggaagaagaagtggataacgaacaggaataatcttattagttatttacttccgacaaatattcagctcaattttgtatataagaaacggtagaccattctgctacctgtatttgttgctcactttgttgtgatccgggagtaactcagcttcctaaactgtacagccataacattgatcattttcttcggtgtagaatattttaaattactcagttcgcccccatctgtatcataaggcggaccgacaaaaaaactcacaatgtcatttctaggcaaacattgtatctaccatcagattaaaaatcagaacagaacatgtgctcttctgt

SEQ ID NO: 17203 - DNA, 1990 bp, Oryza sativa
  ref <308>: DATABASE ACCESSION NUMBER: AK067663
  ref <309>: DATABASE ENTRY DATE: 2001-12-06
ggttcaaaatgcggacagatttggtgggatttgggcagttgcggtgtactggtcactgttgatacttttttcccctctcatatcaattcaaatttggatggaatatgctaggtcctcttggaattcatattgcaaaattattcgcacggttcagttgtatcaacaagtacagtggcacagcgtgggtcataagcaaaagctccaaaacaaaattctgaacgaaattcttgttttgggttgcagaaacttctgatccccccgaaaccgagaaaagaggggaatctgtgaagagattttagcagcagtgcaatggaggtatttggaaaatccgtgattgctgagcccagcaatgtgatttacttgtccagtattcttaacacagaagggccaatccctagtcacaagtgtgacaagaattgccagaacgagcacgtctttggcaacatgtaccgttgcaaactgaccgggaccacgcacatctgcgacaaaaactgtaaccagaggatcctctacgacaaccacagctcactctgccgggtcagcgggcagctgttcccgctctcgccgctggagcagcaggcggtgagggggatccggaggaagcatgaggtcgacagcaacgaagggtgctcctttaagcgcaggcgaggtgcacaactgcatccatcccctttcgagaggtcctacaccgctgtgtctccaatcccaagccaagttggagacggcatggacctgagctagagataacgagaatccgtcttttcttgcccacagctggctaatgccgttgtttcgacccctttctccctttgacaggatggaactataagagcttccttctttatagacttacgaagggatatgagactctccttggatgcaccgaataaatgtctatgtagtatcagttctaatttatgggaccttgttgtaactcgtaattttggttgaaccgcctattctgaattgcatagtactttctgataatcatttgatgctatcgcttagattattttcctatactgcattaatcgtgtttactctaatggcacttcgccataacccttctattccatgtcttcttaaggatacttatatcttgtgcatgttggtatgatcaacatatcaactatgtgaatagcttgattggatgaatgattttgtaaatttgttatagattaattggttcttatatggggggtgtgaactaactgaaatttctgcaaggctgttagtgtgttgcctggcaggccgctggtaaagtgcgacttatttatggtttcttttcatataaaccctatttattttacatgattctctcttttgcaggttatgtttctaacatttttttcactgttctttgtttttactcttgaaatttattgttttgcagggccttccaggtgctaacttttgtggatatatttttatctttcataaaactatttttgtatgattttttttctttttgagtgttaacccattcctttcttgtgcaggtaaactgctgaactgtcgttctgtcaccttgtgggaggaaaagaactacttacaccagaccacctggatccttttgcagcctaatctgataactacgtctcgtgctgagcagcatgatttccaattccagatcatgacccagaagacatgaagctttggtactacgactagagccactgaaactctaggctggtatcgaagaagagcgctagcctttagctgaaccttgcactttgggtgcccaagcaagctgttgcatttggagggatcaacaaaaagtagctatcatctgtaatttggagtagaaactctctggagacagcagacattcctgcaacttctgtcgctctatccgactagcctgcttcagcacaagcatattttgttctgtatttttttgtttaaaaaaaacaagtgaaaccctggctcttctatttaattatgaaaatactggtgcgctccggcgtgccctttgcaattcatccttgct

SEQ ID NO: 17204 - DNA, 1600 bp, Oryza sativa
  ref <308>: DATABASE ACCESSION NUMBER: AK067664
  ref <309>: DATABASE ENTRY DATE: 2001-12-06
gatcttagcacgctaaaccggcttccaagatgaagctcttaggttggatgcatcgaaagctacggagtaataatgacgtgttcaaagagttcaacaccggaggaggtggggcctgcaactgcatcaccgggcttgcctcgcctgaccacgacaacgactacttctccggcgacgacgccgcccacgcctcgccgccggtcaccgccggcgacctcttcaccttcggcggcagcggccttctcaccatcggcacgctaggcatcgccgccgtcgccattcccagcggcggcgacgacgacgactacgacatcgacttcgaggtggacgccaccagcgacgacgacggcggcttcaccgtcgaggacgacgacgccgacgtcggcggcgccgtcacgcccaccttcaccttccccgcggcgacggcggcggaggcggtcgtcgccaccgtggagaaggcagtggccgcggtggaggcgatcgcggagaaggacgacgacaccaccacggaggacgacctgatggtggtgagcgccgagctggagaaggtgctcggcggcgtcgacgtggcgtcggcgcgggtgagcttcgccatgggcggtggcgtcgactgcccgctccagggcttcctgttcggctccccggtgagcgacgtcgagtcgcgcccggagtacctgcaggcgccgcgggaatcgtccggctcctgcggcggcggcgggcggcgcacctcgctcggcgagctgttcatgcgcacccgcttcgccgacgagaaggtggcgctcgtcgccgtcgccgagggcgaggacggcgtcgccggcgacgacggcgctgctgctgccggcgtcggcggagacagagcggggaaaggcggcggctacaagacgatgaagaagaggaaggtgaaggacgagaaaggcggcggcggcgccgccggcggtggaatgccggcgacggtgacgaagagcaagtttcagaagatccttcaaatcttccacaggaaagtctaccccgagaacacactcctcacaaggaatctgaccaagaagagccgcaaccgcggcgccaccgataatggcggtggcgccgtggccaccggagaccccgacgggcctctggcctcgccggtgctccggtgccggaaggaccatcccatgaggggcttcggctgctgcaccaatggcgccttcggtgcatcgtcaccgggaggcaacgccgagatgaacggcaacaagagcggccactggatcaagactgatgccgactacttggtgctggaattataatggggaaaagaagaggagctatttgtttcatcaagaattaaagcttgaatagtgagcatctcatatatatgaatatgtgcttgctgttacaatataatctctatctgtttggtatagaagggcttgaatgtgctgtatatgtcactatatattgggggggagaggattactatgagatcaactcataagtgtgtggtgtttatatacattgctctgtgaatgtatgacagagatcagaacttaatgtattgtatgctttcttgatgtgattggtgtttatgagcctagctgatggcaatattgtgtgtgggtccacccct

SEQ ID NO: 17205 - DNA, 1218 bp, Oryza sativa
  ref <308>: DATABASE ACCESSION NUMBER: AK099008
  ref <309>: DATABASE ENTRY DATE: 2002-08-28
ggagcagcagcagcgccaccgctcgcgagatctcctactcctcgtcgccgacgagccgcctcctcctcgtcgtcgccggcggcagagcaccggagcagccaccccatggcgtccccggacctcctcttcaacctgcgcaacctcttctacctcggcgcctaccaggccgccatcaacaacagcgacgtcccgggcctcgacgccgacgccgccgccgagcgcgacgccatcgtcttccgctcctacgtcgcgctcggctcctaccagttggtgatcagcgagatcgactcgtccgcggcgacgtcgctgcaggccgtgaagctgctcgcgctgtacctctccggagacaaggaaagtgcgattgtcagtctgaaggaatggttgagtgattcggcggttggaagcaatcctgttctacgattgattgctggaattatatttatgcatgagcaagactacactgaagctctcaagcacacacactctggtggaactctggacctgcatgcattgaatgtccagatcttcattaagatgcaccgttcagactatgccgagaagcaattaaagatcatgcaacagattgatgaggaccatacactgacacaacttgcaaacgcatggctggacattgctgttggtggctctaagatccgtgaagcttacctcatattccaagactttgctgaaaaatacccgatgacaggaatggttctaaatggcaaggcagtttgctgtatgcacatggggagctttgatgaggctgagactcttttactcgaagcattgaacaaggatgcaaaagatcctgaaactcttgctaatcttattgtgtgtaatctccaccttggcaaaccgtcatcaagatacctcagccagctgaaactatcacaccccgatcatgtgctagtaaagcgtgccgtatcagcagaagataacttcgagagagctctccaagccgtcgcttgaacacgtccgcggaaaacgcttgccagattgcagataacacaattgatcccccatgttccattttgagtgccttaacacagcgaaaattatgttgcatttgctcagtctgttttgctcaaatggtgatatactacccggccaatcttgtactctgaacccctgctgtataaacaaatataatgtagaatcttgaatggtgacgtttgtggtcagcatcgacattttgttatattctgctggattgttgtt

SEQ ID NO: 17206 - DNA, 2289 bp, Oryza sativa
  ref <308>: DATABASE ACCESSION NUMBER: AK067665
  ref <309>: DATABASE ENTRY DATE: 2001-12-06
gcggaagagaatatctgcagcttgatcagttccaaaactgagatatatctgcagcttgatcagttccaaaactttagctgggcacgcactaccggcagcagttcaaggacaaaccaatttgaaggcggctagcgccagcacaggcatgccgatctcgcatgagctgggcgagcctgacgaaagcttctacaatctatggaaggaagagtgtgaagaactgtgggaggaagaggacgaactgtggggggacgaagatgttgaggaggagctgtcgctgcgtcaccctggattcaacaagtggaccgtccagcagggtgctgcaggcggggaccatattcgcgccaaggacaagaacttttactgctttgaggtccaagttcacttcactggagaactagttgacggtacgcagttcgtgtcaagccgagaaaatgacattccagagaggtttatactggggcaagaggatgtgatgcatggtttcaacttagctgtcagttcgatgcaaccaggggagaaagctatattcactatcccttcagcgttaaccatgacaaaagctggctcccctgctagcatcccgtcaaacatacctcccaaccaaacactacggtttgagattgagctcatcgccatgtttactataattgacattttcaaagatgaaggcatattgaaaaagattgtcaagaacgcagaacccgacagaaaacaatctcactcaagtgattttgtatttgtgaaatacgacgcatgcctgatggatggaacttcagtgtccaaatctgaaggtgttgaattcagccttaccgacggcttcttctgtcctgcatttgcacatgctgtgcatactatgaaagaaggagaggaagcagtactaattgtgaaaccaaaatatgctttcggtgaacaaggaagaccttctcaaggagaggaagctgctgtgcccccagatgcaactctttatgtgcacctcctatttgtgtgctggatacggcgaattggggaagaccaagcaattgccaagaaaactctaaggatagggaactcacagaggatacacacacaaagtcaagctgtggtgaaagtgcggttgctcggcaaacttcaagatggaactgtttttgatcgtagaggttacggcgacgatgaaccgttcgagttcgtggtagatgaaggtcaagttattgatggcctggatgaatctgtaatgacaatggaggagggagaagttgccgagttcactattccaccccagcacgcatttgatgccgttgggtcagatcagcatcagtttgcctttgtgccgcgcaatgcaaccgtcgtctacaagatcgagctcttgtccgtcgttaatgtacgttattatgttcgtattactggagaaacatccgttgtacattccgagccgtgatgaaattgttgaatatgcaagtaggaaggaagaggaaggggacatatactttaacttgggtaaacatttgagagctcacaggagatatttcaaggccagacaaatcattgaatattcacgcttcggggtaaggagagggaaaattaatttaataaaactgctgtccatcccaacatcagaaattgatgcacagctggaagaaatgtggatttcctgcacttttaaagcggctaagtgcgcaatccagctagggtgctacatgcaagcatcgtgctattacagcgaggtgctgaactacgatgtggctaatgtgcaagcccagcagcagcaaacgttgttgcaggaatttcctgatggttcctcaagagacccggacgcaatgcagcgaggctttgagcaattcccaccagagtacgagtcagaattgcagctcaatgcaactttcactcctgcagctttttcaccgagacggaaaggtgagcatccgtatcgtggcgaaattattggcttccctgatgttcaggcaaacagcagccagcctgcttctactcctagtactgctcccagtactcccaaccctgctacaccacagacgaacgccctcgctactggcactagtggcaccccgagcggcagcgctgctcaaagctcaggaacaatcaacacgaaccgcgggtttctattcagatgcttcgggccatcgcccacgagctgaaggatccatcaagcttatatcgtctcaatcgttgtcgccgccgcagctaattactacttagtaatatcatatcatacttggaattgcagtatgctggtaatgtctacattttcaaatggatccacattaaataaaagttgtgattgattttgtactgcct

SEQ ID NO: 17207 - DNA, 1835 bp, Oryza sativa
  ref <308>: DATABASE ACCESSION NUMBER: AK067666
  ref <309>: DATABASE ENTRY DATE: 2001-12-06
ggttgcactctgcaaccgacgcatcaacctccaccgcccttcttccccgccgtcccgagaaaggaaccggaaaaaaaaaatccccaattccccctacgccgagcagcggcgtgccggcaatgtccctccgcaagcgccagcgttcggcgagcagctcccgcctcagcaccctctcctcctcgccggctccccacaccgccgccgccgccgcctccgcctcctcccctccgctctccttccccaacgccgacctcgtcctccgcctccacctcgacccctgccccgacgacgacgcggacctcgacgccggcgaggatcaccgcccctccctcgacctccacgtctcctcggcgtccctgctccgctcccgctacttcgccgctctcctctccgaccgctggagccccgcccccacctccgccgcgggggggcacggccacctctcgctggccgtggccgctccgcgctctgcctcgcaccctttccacgcccacgtcgaggtcgtccgcctcctccacaccctcgacttcgccggcgccatccactcgcccgccgacgccctcgacatcctccccgtcgcgctccagctcctcttcgacgcgtgcgtcgaggcgtgcacgcggttcctcgaggcggtaccctggtcgcccgacgaggaggcccgcgtcctcgagatcgcgcctctcctccccgccgatgaggctgccgacctcctcgctcggatcacgcctcccccagccgcctccgcctccgccgccgggggcgaggccgccaggtcgccctccgaggcgatgctgcacggcttgatccactccgccatccatgggcacccggtccccgccgcaaccaaggcgttcgtcgcgatgctcctcaaggactacccctcccgtgactgcgtccagaaggtgctcgacgaggcgttcctgtcacggctggagactgtcaaggagctcatggggaagtatgccagcccggatttcagggtcgcggtggacagcgatgagcgggacgcgatacagaggctgaacctgcagtccgcggtattgaatgtgagacacttgctctggctcatcgagaggatggtcgaaatgagggtggccggtaatgcggttaagctgtggagtgagcaggctgcactgactgctgatctgcagaagttgctgaatgatgtggatatgtggaagaatattactcctgggcttcctgtgcttgttaccagatgcacgctcaggttcgccaattcggttgtgaatggggagacaatagttcctcgtcaggtgaggacgaagcttgtcagaagttggcttcctgtcctaaacgtctgcaggaacatggttcagcctatgcagtgtggatacaagtcaccaaattgccaagagctagaggagacatttcttcagatcatctccaccttgcctgtcccagatgctcaggagttgctgcaacagtgcctcgggttctcgactcgcaacgtcgacgactgcccgcacttgatcgcagccttcaagacatggttcaggcgtgctggccgggctcctcaaggtgcagaaaattgagatgagcgctgcagctagtgtctgccaacagtgggtgctgtcttgtgcgaaatctcacatctagttcaatgtagttcctaacgctgtttctgtacattgttgtactacctaccctatctattgccatgtaaggtatatgatatgtacataacaacatttttctgttcgtgtgaaacatgttacccaagtgcagatgaatgatgcactaaactaactattcacgcgtgcaatgttcttcccttcggaatgtgaatataacttgacgacaaatgtatattc

SEQ ID NO: 17208 - DNA, 1382 bp, Oryza sativa
  ref <308>: DATABASE ACCESSION NUMBER: AK067667
  ref <309>: DATABASE ENTRY DATE: 2001-12-06
gaggcacaagcacaagcgcagttagtaataattcgatcaattatattactgcattattatcgattagcagctagctaggaggagctagctagtggagtaattaacattgtacaaggtagaaattaattaagatgggtgcagtgagcagagcggccggcagtggcgtcctgcagcttgtctccaccgtcgtcctcctcctctcgccaccaccagcagctgcatctcgccgtgacatgtctgtggacttccacgctgcgtcgtgcccgcagctggagaccatcgtgcgctccgccgtgcaggcggcgctccagcgggagatcgccctcgccgccggtctcctccgcatcttcttccacgactgcttcccacaggggtgcgacgcgtcggtatatctgaatgccaccaaccccaacacggagcagtttccgcagggacccaacgagacgctgcagccgcgggcgctgcagctggtggaggacatccgcgccaaggtgcacgccgaatgcggtcccactgtctcctgcgccgacatctccgccctcgccacccgcgacgccgtcgtcgtctccggcggcccctcttacgccgtgccactcggccagcaagacagcctcgctccggcatcggtggatctcgtcggagatctcgcgggcccgagcacctccagagttcaggctctcatcgaccttttcgcgagcagaggcctgggagatcctgccgacctggtggcgctctccggcggccacaccgtcgggagagcacgctgcgacttcttccgtgaccgcgcgggccgccaggacgacaccttctccaagaagctgaagttgaactgcaccaaggaccccaaccggctgcaggagcttgacgtgataacgcccgacgccttcgacaacgcctactacatcgcgctcaccaccggccagggtgtcttcacttccgacatggcgctcatgaagaaccagaccacggcgtccatcgtcaggcagttcgcgcaggacaaggccgccttcttcgaccagtttgccaagtccatggtcaagctcagcaaggtacccaggcccggcgggaacgtcggcgagatccgccgcagctgcttcctttccaactccaacggaccacgcctcgacctcgtcgtcgccgccgccaccgaccaagaccccggtttcgctgcctctgcgtctgcttgatactccatacgtccgtccgaccgtccctacttttaatttgggttcattccaagagtgatcatatatatcttgagtatattttattccaactgtatgtatgtatatgttcgcgcgatatatattttacgtttgtactataatatactagtagtaattacatttgaaagctttttatattaagaaacaagcttgccg

SEQ ID NO: 17209 - DNA, 1909 bp, Oryza sativa
  ref <308>: DATABASE ACCESSION NUMBER: AK067668
  ref <309>: DATABASE ENTRY DATE: 2001-12-06
gagtgttattcgttgcttgtgaaaaggcatccttgagtttgagtgagtagagtcgtcgtcttcgtctcccaattcagttgagatccccttccgatcgtccaacattccaatggccaccgcatcctctcccgcttccgtccaagattaccccgacctgcaagaggatgatgacgacgacttccaagacgacgacgacgacgacctcgatgacgaagacgaggaggacgatgaccaagaaccctccccgtccccgtccgacgaggctcgcctcgagtccgtcctgcgccgcctcaccgcggaggaggtccggatccgggtgcacgatgtggagatccggggctgctgccgcacgcgccgcgccgcggtggaggcggcggtcggctcggacctgccgcgtgccgccaccgtcagagacctcgtgcgcgctgcagccgccgccgccgatcggatccgtcgcctcggcgccttcgacaccgtgtccatcaccctcgacgccgcgccgccagggatccccggtaacgctgccgtcatcgtccttgttgacgtcgccgaggctcgtggccgcgccgccggcgaactcggcatcttcgctaacaaagggactagatcatgttcggttcaaggttcagtgaagttgaagaacctatttggatattgtgagacatgggatgcatccggtgatcttggattagatcagacagtggagctaagtactggagtggcaataccaagaattggagcaatacctactccactggtagctcgaatatcatttctctctgaggactggttgaagtcctcactcaaagaacacatgatgggtgtttctgttggtttgctctccaccatgaaccataacctcgcttacaatctgtcatggcgaactataacagaccgagcactgatgtcatccaattccataagggggcagttagggcatagccttttgtcctctattaaatatgcatacaaggttgaccagagagattcaagaattcgaccgacacgaggatatgcttatctattttcttctcaagttggaggccttgcaccagagagcaaagatgcacgttacattagacaggaaattgatcttcgagtggctttaccgctgggtgtgttgaatggcgccgttaatgctggagtggctgctgggatcatccacccattggcaaggggatcgacgggctctatatccccactttcagagcagttctacttgggtggcaataggtctcttatgtgccgcttgggtggaccatcatcactattaggtttcaagaaaagagggctggggacagacttgcgaagcagtaccccagagaattctgaaaatgttgcttccacttctcctgagctaagtgcacggggaggtgacattgcggtcacagcctttgctgatctgtcatttgatatacctctgaagcctctcagggagctgggaatccatggccatgcatttgtctcagctggaaatcttgccaaactaacagagcctgatctcaggaaattccctcttgctgagtttctacaaacattcaggagttctgcaggatttggtgtagttgtgccaacaagattatttcgcatagaggtgaattactgccacatcctaaaacagtttgattatgacctcgggaaggcggggatacagttgaacttttcttcgccctaatttctttctgccacaagatgaatagctgtattttccttttcccctcactatgaccctcagctcttggtctttttcttcctccacaattaatctctccagaaaaaagggcccagaaactgtgggtgatgaattcttgtcctggtctatgatgtgatattgacacctgtaaagtttacaatcaaaacggaaatgaaagtcgtgagaagcatcagtttgcaatgcttttctccatgc

SEQ ID NO: 17210 - DNA, 1752 bp, Oryza sativa
  ref <308>: DATABASE ACCESSION NUMBER: AK067669
  ref <309>: DATABASE ENTRY DATE: 2001-12-06
gaccagcttagattcgtcaaaagttatgacattcaaccacacacatcacacatccgttggcttcttccaaagagattcctacaccatctgctaaacactttcaccgatggcagaagcaatcttctcggcaattgttggcgatgtgatcggcagagtgatatcccttgttgtcagtaatttcaatggagatcacagcactgaagtcaagttacagaggatatgccgcatgctgatcaagatccatagcgtagttgaggaggccaaagggaggcagatcaccaaccatggcaccctcgagtggctctcggagctcatcgatggcgcataccaaggccgttacttgctcgacacgatcggatgcggggagcctgatcttgatgacaagaatcgcgatgaggtagatcccaagcctttctccttgtccaagttcaatcctgcaaagcgtgtgcgcgtcgcggctttcaccgtgaggaacatactgtctcgccacgacatcggtgttgatgagattgatagggtggttgagagcttgcagagcatgtgtggtgatctcaaggagttcatgatgctccttcaggcctgccagccgattcatcggcctctagctaccaacatcttcatcgaggggcagatgttcggccgacatgtcaaaaaggagatgatcatcaacttcttgctgcatgaggatgatctaccaagaggaaaacttggtgttcttccgattctaggcgatatcggggtcgggaagaccaccctagtacagcatgcctgtgatgatgctagggtgcgcagccacttcacaacaatcttgctgttcaatttctcacacacctacaagatggagatgtgtgaaccaaagcctgttctacggcctaaacatgtcatcggagatgttggaaattcagatgatccactacatgaactggagcagagtttcttcaacaagaggttcttgattgttttcgaggatgttgacatacacaagaagaacatgcttgaggagctcctgaaaagcctgagttgtggcaaacaaggtagcaagatcatagtcacaaccagcaacaagcatgtcactacaattggaacagtgcagcctatcaaactgaagtttttgccctgcccagagtactggttcttcttcaaagcgcatgccttcgccggcacagatgtccaggagaaccctaggctggtggcagcaggaaaatcgatcgccgcgaagctgaacggatcattcttcggcgcaaagatcatcggggcgattctgaaagaaaatccagatcctaaattctggtgtacggttcttcagagagatattggggggctgtcattgttgggtgatggacttggctacattgctgatttagtggaaattttgctgccaagtcgcctatccgtgaaggaggtcttcgtctccaagaactcattgtcctctgagacagagttggctaggctgcagggtctgtgcttgccatgtcctagctctgcccctctagccactcatagcagtgagctcagcttagcaaaagcaaccagctatgaaagagtgttgctgtgcaaggcagtgttgccattctactccttgtactacactgctaagtgtgctgtggactctgagaactgttactcaaagtttagtgttgtttagttcatttatagggttgcatcttattgcctaattcaaaaatttctgttttgttccatgtttgatgtaaccagtgctcttctcttctatacaagtactaattgaactcc

SEQ ID NO: 17211 - DNA, 1123 bp, Oryza sativa
  ref <308>: DATABASE ACCESSION NUMBER: AK067670
  ref <309>: DATABASE ENTRY DATE: 2001-12-06
gttctaccaccaagctaattaagcaaaagaagaagaagaagaaagaagaagaagaagatgcagaccgctgctagcagtgtcgttggattgtcggccgtgttgcccgctgctgtgaaggggcgcagcctgcagattcaggctcctcgccgtgttgcgttgcgcgttcgtgcggcggcggcggcggtggcagtggaggctgcggaggtggactacagctctaacatctcggtgtttccgatggaggcgtgcgacctcatcggcggcgaggcgtgcaacgtgcagatgtacccagaggccaagctctcatcatcggctgctgttgctgtttctcgtgcggcggcggaggaagtcgacagggactacctatcctacgacgagcccaccacggtgttccccgaggaggcgtgcgacgatctgggcggagagttctgcaaggccacctgatcccattcccatccatggagaattggagtcttctatcatccttcctcctctgctccactaccttaattccatgtagctacagatttatatgttaatcatcatgtaatggtacatatctccttgttaataaggcacgctagtctagctcctcaaaatgatttacaataatataatatttacatacatataatacacttactccatcgaacaatacctctgttatctcatggttacttcccatgatcccatcatcaacaccaacattcatcacactttgctgcgttagagcaggtacaatggcaggctataagccagctacaaacatattttacgaagataaatcaagagagagaagagcaacgggctacagatttgtagccagctgtagcacggactccaagacgcagtgtgtctatgacaggtgggactagatattaatagtgtagtatgtaactattgtatgaatgggctattagattgactatagatgaattggagctagtagttggctatactattgaacttgctcttatatagcaacaggtacagtatatgaattaattatctcacaactattggaaagttggcgccagaaaactgagggagcactgaaacaaatttgttgtgcggaaacatttatattaaaaaaaacatatattatggacatatgtgattacct

SEQ ID NO: 17212 - DNA, 2378 bp, Oryza sativa
  ref <308>: DATABASE ACCESSION NUMBER: AK067671
  ref <309>: DATABASE ENTRY DATE: 2001-12-06
ggctgactgatgatgctcgtgcacagtgcgaccatcgacgtcgggcagctcgccggagaatggagaggaggagaactcaccggtggagctggtggcgctgacggtgccagtgagcgacgagccggagacgccggtgctgacgttcaggatgtgggtgctggggacggcgtcgtgcgcggtgctctccttccttaaccagttcttctggtaccgcaaggagccgctcaccatcaccgccatctccgcgcagatcgccgtcgtgccgctcggccgcctcatggcggcgacgctgccggagcacgccttcttccgtggccggccgtgggagttcacgcttaatccggggccgttcaatgtcaaggagcacgtgctcatcaccatcttcgccaactccggcgccggcaccgtctatgccatccacgtcatcaccggcgtccgtgtcttctacgggaaaaccctctccttcttcatctccctccttgtcgtcctcacaacacagatgctggggttcggctgggcgggaatattccggcgttatcttgttgagccggcgtctatgtggtggccatccaacctagtgcaggtctctctgttcagcgcacttcatgagaaggaagcacggagaaaaggtggcttgacgcggaaccagttcttcctggtggcattcgtctgcagctttgcatactacatcttcccaggctacctattccagatgctcacctccctctcctggatctgctgggtcttccccagctctgtccttgcccaacagcttggttcaggtctccgaggcctcggcgttggtgcaatcggtctcgactggtcatctatctcctcctaccttgggagccctcttgctagcccatggtttgccactgtaaatgttggtgttggcttcttcatcgtcatgtacataatcacaccaattgcatactggtttaatttctacaaggcacaaaatttccccatattttctgatggcctcttcacctcgactgggcaaaaatacaatgtatcaagcattgttgactcccatttccattttgacaccaaggcctatgagaagaatgggccactatacctcagtacttcccttcttgtcacatacggtgttggttttgcaacccttgctgcaacaattgttcatgctctcctcttccatggaaggtccctgagtggtggttcatatgcatccttattgctaacatcggaacgaccatatttgcttgtgaatactacaatgaggaactccaattgccctggtggggtgttttgtttgcatgctccattgcctttttcttcaccctcccaatagggataatcaaagcaacaacaaatcagactccaggcctgaatgtcatcacggagtacattattgggtatctgtaccctggacgacccgttgcaaatatgtgcttcaaggtatatggttacatcagcatgaaacaagctttggcatttcttgaagattttaagctgggtcactacatgaagattccaccgaggacaatgtttatggctcaggtggtgggaacttcaattgcagcatttgtgtatattggcacagcatggtggctaatggagacaatccccaacatctgcaacactgagctcctcccgtcagatagcccttggacctgcccaggtgaccatgtattctatgatgcatcagtcacatggggacttattagcccgcgcaggatatttggggacttaggcacttattcagctctaaattggttctttttgtgtggagctattgcccctctacttgtctggtttgcacacaagacattcccaggccagaactggatcttactcatcaagacgcctgtactaattggtgccaccttccagatgcctcctgctactgccgtcaactacacgacttggatacttgttgggttcttgtcaggttatgtggtctatagatatcgacgtgattggtgggagagacacaattatctgctttcaggtgcactggatgctggtttggctttcatggcggtcttaatttacttgtgcttaggcttggaggacatcagtctgaactggtggggaaatgacttggatgggtgtcctttggcttcttgtcccactgctaaaggtatagttgtcaagggatgtgcagtctatacttgaggatctcctattgcttcttgtcccactgctacagtgttacccagacctccatgggtgcaagccaatatgattagatctaatttgacccttgtcatctataaacatcagtagaaccagctttgattcatagctggaaattagcaatgtagtttcagggttagtggtcataacttgtatcctatcagtattctcgaaaaaacttgtatcctaccaaacaagttaaattttgatctctg

SEQ ID NO: 17213 - DNA, 2081 bp, Oryza sativa
  ref <308>: DATABASE ACCESSION NUMBER: AK067672
  ref <309>: DATABASE ENTRY DATE: 2001-12-06
gacaaagccctaatttaaccctaagggaaattgttgctcctcccagagctccgccgccaggccccgccccatctcgatccgccgccatggccaccgcagtcgccgcctcccccgctcagtcccgcaagactgagacctacaccgacaccaagcgccgggatgacgtccgcggccttaacatagccgccgcgcgcgccgtcgccgacgccgtgcgcacctccctcggcccccgtggcatggacaagatgatctcctccggcgagcaggaggtcatcatcaccaacgacggcgccaccatcctctcccgcatgtccctcctccagcccgccgcccgcatgctcgccgagctctcccgctcccaggacgccgccgccggcgacggtaccactaccgtcgttgtcctcgccggatctctgctccgccgtgctcaatccctactctctgctggtgcccaccctaccgcggcagctgacgctctccaccggctcgccacgcgcgccgttgaggttctccacgccatggccattcccatcgagctctctgaccgcgactccctcgtcaagtccgcatccacagcactcaactctaaggtcgtttcccagtactccagccttctctcccccctcgctgtcgatgccgccctctccgttgttgatcccgctcacccggacctcctcgacctccgagatatccgcgtcgttaagaagcttggtggcaccgttgacgacactgagctcattcgcggcctcatcttcgataagaaggctagccatgctgctggaggaccaactcgggtcgagaatgctaagattgctgtcatacagttccaagtttcacctcccaagacagacatcgagcagagtgtcatcgtatcagattacgcgcagatggatcgcatcctccgtgaggagcgcaattacattcttgggatggtgaagaagatcaaggcttctggatgcaatgttctgctcattcagaaaagcatcttgcgtgatgcagttactgatttgtcacttcattatcttgcaaaggctaagatcctggttgtgaaggatgtggagagggatgagattgagttcatcaccaagaccctgaactgcctgccaattgctaacatcgaacatttccgtgaggacaagcttggttatgcagatcttgttgaggaagtttctgttggggagagcaagattgtcaagatcatgggcattaaggatatgggaaggacagctactgtgcttgtccgggggtccaaccagttagtaattgatgaagctgagcgcagtcttcatgatgccctttgtgtcatcaggtgcttggtgaacaagaggtttttgattgctggtggtggtgcaccagaaatagagatgtcaatgcagcttgctgcttgggcaaaggagctccaagggatggagagttactgcatcaaggagtttgctgaggcacttgaggtcattccttacacattagcagagaatgcagggctcaatcctatttctattgtgactgagcttcggaatcgtcatgccaagggtgagaagaatgcaggcatcaatgtgaggaagggtcagattacaaacatcctggaggagaacgttgtgcaacctttgctggtgagcacaagcgccatcacactagcttgcgagtgtgttagaatgatactgaagattgatgatatagtcactgtgaggtaaggttatgtggcggttgaccatgtaggcctgccctacttaggtctacgtgggttttagaattttatttgttagcgtgcctttcagtctctatgttcttagcgtgtggctttgatgtctgtcgaagagatttatattatgtattttgttacctggatggaacggtcaagtgtagccatctgtttgcacttgagacggccggcaacgccttgccatattgttttacacttacagtttgctgcagatttcttcgcatattatcggtcgcacatttgtagtttgcggatgtgtctatagcttgctttaactctcaagataactgtttgcatggcaaagtatgtacatggcgcttcaaataaagaaagcttaataaagagtcaaacgtgattcgtc

SEQ ID NO: 17214 - DNA, 1082 bp, Oryza sativa
  ref <308>: DATABASE ACCESSION NUMBER: AK067673
  ref <309>: DATABASE ENTRY DATE: 2001-12-06
gacccacagagcaacatcgccgccgccaccgccagccgcaacagcaccgacgacgaggaggagctgagaatacgaggcgatgccgaaatccaagcgcaaccgccctgtaaccttatccaagaccaagaagaagcctggattagagcgcaagggcaaagtggttaccgatatcaaagatgccgtcgagcactacgctaatgcctatgtcttcacctacgataacatgaggaatcagaagctcaaggacctcagagagcagctcaagtcctccagcaggatattccttgctggaaagaaggtcatgcagatagcgctggggcgttcatctgctgatgaagctaaaacaggccttcataaactttccaagttcctacaaggtgatactggactgttctttactaatcttccaagagatgatgtagagagattatttcgagaattcgaagagcatgatttcgccaggacaggaagtattgtgacagaaacggtggagcttaaggaaggccccttggaacagtttacacatgaaatggaaccctttctacgcaagcaaggactgccagttcgtctgaacaaaggggcggtggaattagttgcagatcacatagtatgtgaagaagggaagcccatttcaccagaagcagcacaaactctgcggttgcttgggatgcagatggcaacattccgactgtaccttgtctgccggtggtcctctgatgactttgaagtttacaaggaaggcttggcgcaactgcgagctgaagctgatgattcttcttaagcttgtttggcttgcacacccagtttgcagtgacgcacttgctgtcttgttgtgctgaggcagtttttggtattgtgcgtgcgcatggcgtttgtgctcttggtacgttggaaatctgaaaaatgtaatatgttaacagggtgttcgttgtcctagtattttctataaagctattcgtgtcttattaacagggtggcacatctacgcagctaacatgcttcatttgttggtatttaaactcttctgaacaattgttactccctgaatgaattcgttggtagctataatttgatttctcgcc

SEQ ID NO: 17215 - DNA, 1109 bp, Oryza sativa
  ref <308>: DATABASE ACCESSION NUMBER: AK067674
  ref <309>: DATABASE ENTRY DATE: 2001-12-06
gatccaacccactccgagccagattaagggagaagagatttcctgcgaattcttcgaggaattctgttccaaatcgagtatgaaattcgggaaggatttcaggagccacctggaggagacgctgccggcgtggagggacaagtatctggcgtacaagtccctcaagaagctaatcaagaagctcaacgacttctacatcgagagggaggagtggtacgtcatccgcctccaggtgctcaaagaaagaattgaacgtgtcaaagctaagaagaatggggcttttacatctaagagcgaattcactgaagagatgttagagatacgcaaagcttttgtcatcatccatggggagatgattcttctgcaaacctatagctccctaaattttgccggacttgtgaagatactgaaaaaatatgacaagagaacaggtggtttgctcagcctacctttcactcaacgtgctcgaccaaccatttttcacaacggaacctttaacaaggcttgttcgagaatgtgaggctaatcttgagctcctgtttcctatcgaagcagaagtacttgagtctgctagctcctctgctaagttgcaacctcagaatgatgatgcggctagccatgacccagcgtcatctgtcgatgttgaaacctcggacgtgtaccgaagcacactcgcggcaatgaaggcgattcagggcctccgcaaagccagctctacttacaatcccttgtcgctcgccaggttcttccatggagaggacggtgaagcctgctctggagccatcacctctgaaagtgattcctattctgattcccagattgaagatgctgaagatgatgataaagaggtgcaatcaagggagcagaatacggctcaaaatgctgcagaaggccagccacgtgatgaatgatccgtctttgcattgtgctgtttaatcctccgaggccctgataagtgtaaatgatacagctgcggcatacactaataatcttgatccttgaaatgtataaccattactgatcttcccaatggaactcttttcctttttcttttcgctcgtagatatcaaagttggatttatatttactgtgttctttggtttgacacc

SEQ ID NO: 17216 - DNA, 2346 bp, Oryza sativa
  ref <308>: DATABASE ACCESSION NUMBER: AK067675
  ref <309>: DATABASE ENTRY DATE: 2001-12-06
gggccatcgcccaccggcccacgagcaccatctctcctctctgctccgcgagtggccttttgcccacctaagccgcctccccatcctctgcttgctccggcgggcggcgagcgccccgccggaccgacgacgacctcgccgtcgagctggtggccgctcaacctctagcgctcgcagggatcccgggaagcctccctcggccgcgtcaccaccggcatctggtgctttccgctcccaccacagtgtgctgctctcgtcagttgccaccgcccgactcggcgctccggagcccagatcttggttccggaggatcctctccggcgatggatttcgtgaaggttttcgatcaggccgtgcgggagataaagagggaggtcaatttgaaggtgctcaaggttccagagctcgaacagaaggtacttgatgcaacaagcgatgaaccttggggccctcatggtactactctttcagagctatcacatgccaccaagaagttcgctgaatgtcagatggtaatgagtgtcctctggactaggctgtctgagcgaggctcgaaatggcgtcacgtgtataaggctttgacaattattgagtacttaatagccaatggttctgagcgggcagttgatgacattcttgatcactattcaaagatctcggttctttcaagttttgaatatgtggaacctaatggaaaagatgctggattaaatgtgagaaagaaagtcgaaactatattgggactcataaatgacaaggagaaaataaagtctgtaagagagaaagccgccagtaatcgtgacaagtatgttgggctatcatcgacagggataacatataagtcaagctctgcttcatttggtagcaactatagttctggtgaacgttatgggagttttagtggtacaagggaaggtgattcatacggtgacagttatagggataaagaacctgttaaatcctctccaagttatactggcagccagaaatctggcagcaggataaaaaaggatgtgaatagaaggaatgaggattcaccgagctccttgaagtctaatgcaaaaggcaatgaggacgattttgatgattttgatcctcgtggatcttcttcaaatggtgcagctaatacaaacaccagtggcgtggatctttttgccccaaacttattggatgatttcatcgatgtgcctgcagcagcaactcatgaaacaaacgactctgcagacgctcaggttgatctgtttgctgatgcagatttccaatcagcaataccaagtacagaaacagctgcgggttcagatgtccagggcaatgtagacctttttgcggaacagccagccttcacagcagcctttccaccacagacagggtttattccaccaccaagttctgggacatctgaagcaaatacttccacgtctaagaacacaactcctgaaccttttgatccttttggtgctattcctataaacagctttgatggatctgatccatttggtgccttcaactccgatgttggatcatctagtataccaccacccacgcagagttctgttggaaatatcagcacaccaagtcagaaccctcaagcagcatctgactttggtggctttgtgtcgagcactgtagaaacagcagctaaggacccctttgatttttcaagtagcaatcttgggaaaacacctttggcagatccaaaggctgatgcatccgattttggtgcctttgtatcgcacagtgaggaagtagccaaggatccttttgatctttctttgagtaccagctctggaaggacaaaccaagcacctctggcggctcccaagtcagataccaagaaagaaaattttcaggtcaagtctggcatatgggctgactcattgagccgtggactgattgatctgaacataactggaccaaagaaggtgaacttagccgacgttgggattgtcggtggcctcgatgacgggtctgatgataaagctctgccctcatggaccatgggtgcaggaggttccagcctaggaatgtccggaattccttcatctacacaaagtggtggcattgagagcttagctaactacaacaagtaccagtttggctttaaatgagctttcatgtgaggctttctagtatatgccggttattgtcggaatgtcggcttgtgccttatttattttttgttgattctattctcccctcttttgatgcttacattcctttacaatcgcctccaaggatcgtgatcttggttcgtcttgtcgcgcttgtattgtatttattggatttgcggatgagagactcctacctatatcacaccctgattcaatttaactgtactgttatttc

SEQ ID NO: 17217 - DNA, 2391 bp, Oryza sativa
  ref <308>: DATABASE ACCESSION NUMBER: AK067676
  ref <309>: DATABASE ENTRY DATE: 2001-12-06
gattccgtccattcccctcctgcgtacttccgccgcgcggctcgccgacgcactcatcccgctgccgcgcgtcgccgcatcccgtccacggccgcccgcctcctcgactacccacagtcgtcttgctcgcacctccgccgctgcggtggccgccggtcccggaggcggcctccgatttaatggagaagtcctacgcgtcggcgagctccggcgagctcggcgtcgtggcgggtggtgggggcaggtcggtgcgggttataccactgcggcatccacaggaggcggtcgctgggtcctcgccgtcgtggtggtccgtggtgatggtgaaggcgcggggaatggggccgcgggattgggcggaggcggctctgccctgcttgtcgtggatgcggacgtacaggttgaaggaggatctgcaggccgacctcgccgctggcatcaccgtcggcgtcatgctcgtgccccaagcaatgtcatatgcaaagttggctgggcttcacccaatatatgggttatacacaggctttgtcccgctatttgtctatgcaatttttggctcatcgagacagttggcagtgggtccagtggctcttgtctctcttctagtttctaatgtcctcggtggtattgttgattcatctagtgagctgtacacagaattagccatattattggcattcatggttggtgtattagaatgcttgatgggattgctaaggctcggttggcttattcgatttattagccattctgtcatatctggcttcactactgcttcagctattgtaattggtctgtcacagatcaagtatttcttgggctacagcgttacgagaagcagcaaaattataccacttattgagagtataattggaggaatagatcagttctcctggccaccatttgtaatgggatcaagtttttttgttattcttctcataatgaaaaatctaggaaaatcgaataaaagactgcgtttcctaagagcttctggtccccttacagcagttgtgtttggaacaatttttgtgaaaattttccatccatcttccatatcagtggtaggtgaaataccgcaaggtcttcccaaattctccattcctcgaggatttgagcatctgatgtccctaatgccaactgcagtacttatcactggcgtcgccattttggaatctgttggtattgctaaagctttggctgcgaagaatggctatgagttggaccccaataaggagttatttgggcttggtatagcaaacatatgcggttcatttttctcttcatatcctgctacaggttccttttctaggtcagctgtgaatcatgaaagtggagcaaaaactggtctatctggaatcataatgggcataataattggtggtgctctcttgtttatgacacccttgtttacggatatacctcagtgtgccttggctgcaattgttatttctgcagtcactagcctggtagactacgaggaggctatcttcttgtggagtattgataagaaggatttctttctatgggcaatcacattcattacaacattaatttttggtattgagattggtgttcttgttggggtcggattctcattggcctttgtaatccatgagtcagcaaatcctcatatcgccgtattgggccgcttacctggcaccacagtgtaccgaaatagattgcaataccctgaggcttatacctacaacgggatagttgttgttcgaattgatgcacctatctactttgccaacataagttacataaaagacaggttgcgtgaatatgagcttaatctcccaaattcaaaccgtggacctgatgtcggaagagtgtactttgtgatcctcgagatgtcccctgttacatacatcgattcaagtgctgttcaggctctcaaggacttgtatcaagaatacagggatcgccatatccagattgcaatagcgaacccaaaccggcaggtacacctgctgctttcgagatcgggcatcatagacatgattggtactgggtggtgcttcgtgcgagtgcacgacgctgtgcaagtatgcctccagaaggtgcagagctcatcatcaagttccataaagctgtcgccacaggcatcaggggacctagctgactccgttaccactccaaaggttcaacagcggtatagttttctaaagaacctctggaaatcacaggttggggacgggtgtacaggtagtgaggttcaaccgttgctacgccaaaaccttgtttaacattatggccgactacctttctattagtatctgtctgcctgtttatatttgatgtacatgtatgcatacagtgtaaaggaaaaaaaaggaatatgttattactctcttgcaattttatatagaggaattgagatggggttgt

SEQ ID NO: 17218 - DNA, 639 bp, Oryza sativa
  ref <308>: DATABASE ACCESSION NUMBER: AK067677
  ref <309>: DATABASE ENTRY DATE: 2001-12-06
ggcaccattcgcaggctcagcacgagcacgaagcatctcatggctcccctcacatcacagagcacggccacggcggccgccatgatcgcgatgaagcctcctgctccagccaagaacatcgccacccttctccctcccggagccaaatgcagaagggcgtttctgcgtggcttgatcgccgccggcgctggtggctcgctgctggtcgccggtgacggcggcggcattgcctccgcggcctccaagaggcgggcgccgccggcggcggcggcgccagaggagaggaaggaccccagcgtcagcggcgtgcaggcgaaggtgctggccagcaagaagaggaaggaggccatgaaggagttcgtggccaagatgagggagaaaggcaagcctgtcagtcaataactgaaaaggagaaaaaaagacaaaatcatacaaaggttgttgcagtggtatcactatgcgattaatctactgatttaattaccatatatgtgactcgtttcattgtggtgagcatataaagatcaacagggataaagggaataataatgcgtcgtgtaattagtctccatgtcgctgttcttgctgtgattttgatgaacactcaataaatcgacataggatgtttatgcaattatt

SEQ ID NO: 17219 - DNA, 2834 bp, Oryza sativa
  ref <308>: DATABASE ACCESSION NUMBER: AK067678
  ref <309>: DATABASE ENTRY DATE: 2001-12-06
gtccgctccttgcgccatctcgcggctgaacaggggaggggcggcgatctccatccggcgagcggagcaggggaggggaggggatcttgacaatggttggacctgggcataggaacagtcacgggaagcgtcactctgattatgctgaaaatggaggtggcaagagaaggaatcctggtgatgatacatatgctcctggtccagatgatactgtctaccgctatctttgcccttctagaaaaatagggagcatcattgggaggggtggagaaattgctaagcagatgagggccgacactcaagctaagataaggattggtgagagtgtatctggttgtgatgagagagttatcacaatatttagctcaagcagggaaactaataccctagtagatgctgaagataaggtttgccctgcccaagacgctctctttagagttcatgaaaagctatccatagatgatgatattgggaatgaagaaagtgatgaaggtttagctcaagttaccgttcggttgcttgtgccatcagaccagattggatgcattattggaaaaggtgggcatattatacagggaatccgcagtgacactggtgctcatatacgtgttcttagcaatgaaaatctccctgcgtgtgccatcagtggtgatgaacttcttcagatatctggggactcaacagttgtcagaaaagctcttcttcaagtgtcatctcgtctccatgacaacccatctaggtcacagcatcttcttgcatccagcatgacacagccttatccagtgggctcccaccttggtagttcctcaactgcaccagttgtggggattacgcctttaattagttcttatggaggatacaaaggtgatgtggctggagattggccttctatatatcaaccacggagggaggagagctctgcaaaggaatttagcttgcgccttctttgtgctgcatcaaatgtgggaggtgtaattggaaagggtggtggaattatcaaacagattaggcaggagtctggagcctttatcaaagttgatagttcaaatactgaagatgactgcataattactgtttctgcaaaggagttctttgaagatcctgtctccccaacaataaatgctgcagttcatttacaaccaagatgcagtgagaaaactgatccggaatcagcgatcccgtcttacacaacacgcttgttggtgtcgacatcacgtattgggtgcttgattggaaaaggtggttcaatcattactgagataaggagaacatcaagagcaaacatacgtatcctttctaaggagaatgtaccaaaagtagcagcagaagacgaagagatggttcagatcagtggagaccttgatgttgtaagacatgctcttctgcaaataactactaggctgaaagccaatttctttgaaagagaaggtgctttatcaggtttcccacctgtaatcccttaccatcctcttccagttggtgtttctgaagggccaaagtatctaggcagagatactaagcctcttgggcatgattatccatattcaagtggatatcgtggctcagatgatattggccctattgacagctatgcaagttatggcagctcccaggtctctggaggaggttatggggcttatggtggatatagtggtcgttctggcagcagtgggttatctggccctagttcattttcctatggaaagcgacatggttattaggacttagattgacaaatgcaacagccaagacaaaagaatgccaagaccaatgaagtatggagcctgcttattggagccccttcccaaaccagatgaccaagagtatggccccaacctggaagctttgcctaagagggacctgcctggatgccatagaccatcttatttccctagtatacagcatttacttatattttcctctgggactatgttgattccccgtcttacatgttctaaacctatgtattgaaagttcacagttgagacttcctgtatgtgttctcgtgcaacctgcttcatcttagtagttcgtgtggaagaacttggttccctgtttgccaaccaaaagcctagaagttacttgcccttgctttaaggatgtggatcgtgtcatccttcacattcgttcctatctgcacatagttccccagagaaaattgtacctcctcagtgagctcaaaataggctaacataaaacttaagtttacctataaaccaatctcagcatggtcttctagtatcaacctgtctggtaagctatatgactactatggcgatttacagttagctggaagttttcgcttttgctgatttatagatcataaaagccctaacatgcaattgtgcaagccatgctatacatgggatcttgacttgatgtgcacgtgtgctctgatgctcaatctgagtgtgggtaagtttcagagaacctctcaaagttaataactgggttgagattttatcgagttaagagtttcctttgtgttttggagtcttttcctcttctttacccttctcatggaggtgcaggagcatacgccgtgtgctgctactgcagacttgtccactgctatatggaaccactgctggagttgcagaacgttggtgccatgccatgcagggcatttgttagtgtattgctgtagactatgatacattttcgatgtaggcggtaacatggcaaacagtattgtgctgctttcagtatatttcttttttttggccaaatttgtttatgcatgtaaaagcaattctctcaacattgtatttgaacagtttggtcgaattagccgatcattcttatgtactgattgatgtccactgttgttggtg

SEQ ID NO: 17220 - DNA, 2259 bp, Oryza sativa
  ref <308>: DATABASE ACCESSION NUMBER: AK067679
  ref <309>: DATABASE ENTRY DATE: 2001-12-06
gtggaggcgtgtggcgtgtgacgtgtggattcccctctccccgttcagtcgccgcggcggcgttgctgccggcggtggcggggcggccgaggtggcggctgctacggcgagtccgagtggatgcggcggcgagtagggccagcgctcgagcgtggtggggcggcggctgtggcttaggcgctcggagttgaggcggaagcgccgcgccgcctcccgatcccctccgcgtcacggcctcactcgtctacgccgtcgcggccaactccgtccccttccccgtcgccaccgcgttcttctccttcccctcgcggatcgggctcgactgccaggttcgttggttcgatcgcctgcagcttgtgagcatttcgtcgaacatctgcggagtggtccttggcgcgctgcctgcggggtggttcttgatttgtagttatcaatttctgctacatatggctgacgacttatgcttgttcaccgatagattgtttgggactctgggtctttggggggggggcgcatttagtagaacagtttgatagtactctacagatgagctcacaaacagcccaggtttctcctcagaaggtagcaaaaacagcacttctgtaatctgatggaacagtgaaggtgagggaaacatgttacatagacattgaagcagcactgcataatctggatgtagcatagaagtgtatccaaaagtactgagcaaggtgaactgcatggcaccaagacagaacttcagtcaaactttagtctagagagtaatccccttgaggcacagtttccttcttgagatgttttccccaaacaaatgggatgcctgacatttttagaagcaaaggagtatattcaaaatctgttctgacccctcagtgacggtcgagtagtttactgaccacttaaggacaaaacagagtctcagcgctgaacaaaatgagccattgactataaagcagctgagattttatggtcttgaaaagttggggcatccttcgatagtgattatattctatcagttgcttctggtattactaatggaaaaccatccagcaatggagccaccacatctgttgaggaaaggtaaatcgaagcttcaggggcaacagttgatcctaggacatctgatgccagcaattctaaaggcaattctcagcttggatcacaaaaatctgctgaaaggaacggtatcccttatctggagagaaaaaaacaggtcatattgatggatcatcaacacctggaagctaatgatttaactcagggtgctcttcattcaatggtttcgccagattcatgcgacatgttaatatgacttgggttgtgctgttgctcggtggagaagatcgttaagtatctcctggcatgcatgccactgccgtcgacattctttcttgatggccgtgagcaggtttgcttccatggatcggttcggttaggcaaatcttgttgcaatgcagagttctaggtccatccaaatgtcccatgtttgctgtttactccaatctgcccgcactcattgtcatttagacttgtcatccttcctgatttctgcacgacttgaattgaagaggatttatcaaaagctattaatttggtgcaaacgcgaagaaatctggttgagaatgatcgtgttttgctaaaccctgcacatcgtgctcaacaggaatatgaaagggtggccagctgctgtcttagtggtgaacaagaaaagatggtatcagaacggtgtttgtcagaactgagaaatgcagttcaagaggctcagatgttttgaggattgccaacctgttaggggtttggttgatgaatggcatgaacaaccagcagcaataggcgttgactgggtgacaatagacgggcaaatcgttggtgcctggatcaacctcgtatagcaacttcacaatggacatattcgggcgaacgctttgccatgtccacggcaggcgatgactagctagggcagctagttacgatctacaaagtaattgatttcttgtgtgaggccttgtttagatctcaaacgtcacatcaaatgtttggacacatgtatggagcattaaatgtgggggaaaaaaacaattacacagtttgcatgtaaattgcgagacgaatcttttgagcataattacgccatgatttgacaatattatgctacagtaaatatttgccaacgacagactaattatgcttaataaattcatctcacagtttacatgcggaatctgtaatttgttttgttattagtctatgtttaatact

SEQ ID NO: 17221 - DNA, 1833 bp, Oryza sativa
  ref <308>: DATABASE ACCESSION NUMBER: AK067680
  ref <309>: DATABASE ENTRY DATE: 2001-12-06
ggctcccgtctcaccctctccctctccctttccttctcccggcgccgccacctccgcctcacgccgtccccgtctcctcgcgccgccgcctcctcctccgccgccaccgtcgtcatgtcctcgtctccgtctccgcctccgcctcgcgccgccgcacgccgccaccgccgcgagaggagctatcggaagcgccgccccggaggaggaggaagagaggcgagagagcggaggacggagagggatccggcaagatgggagtcctggcgttctaccggtggctggcggaccggtacccgcagacggtgtcggacgcggtggaggaggagcccgtggagctcgagcctggcgccttcgtccccgtcgacctccgccgccccaaccccaacggcctcaagttcgacaacctctacctcgacatgaacggcatcatccacccctgcttccaccccgagggccacgcacgatcctattcccccatcccctctgtcttctcgtcttctaatcaacccattctgtgttcgatctcaccatggatttggactccctctcctgcagccggcaccgaccacttacgacgaggtgcggctctgaaggggaatttcgtcgaacaagatgaatgcgttgccaggaacttcaagcaggcggccaaactgctgggcctggactccaagctggagaagaacttgctcatcccattcagggagatcaaggttgaatgcacagttccgaaagatgatgggactttagcatcttacatgttgggtttagggtttaacatgacaatgttaggggacctatgaagggtggaatcagataccgccatgaggatggtgaaaaaaagcctatattctgctgttagacaattcataattaggaatttgatattttaggccaccgactgggtcttcgacaccacagaggaccgcgcctgccaaggtgattatcgccttgtttaacctcccagcaaggtggattatttttaatcaatccaaacatggcattgcggtgatttctcgtgggatccatgcgccatccagattatgttgcgcagtagtagagtttgcaagaattatttatttgttaacatatacgcgccaaacaattccacccaaaagccttaatctgtgaaaagaggttgggtaatctactcaatacttaacaactaatatgctgcactgtttatgttaatctgtagcttggatgaatctgatgtaacatattctgagtgcttgggtacagtaattatcactatgtactagacaatacattttgaccatgcgaaggtatgtggaaggtgttatcgctttttttttcttataaaagatatgctggttgttagtgttgccattttgattatgactctacgttgctatttgcatatcagttatcagtggaacttttactttttaaccgttgtactgtaagccacttcaatacaggccatcatatacaactagggagcacgttttcttgtgtgctactgacaaataaaatacaaagtacatttcaatgagatttgtttacagcttataagtgatgttctttgttttacaccatttttagtcatcgtacaaaattaggctgaaattgttcttaatgctattcttttcagcacaaaagtccctgttgctactgtgcatgaagatctttcctctgtggctcctcctcctgtccattgccctcggtgttataaagttaccatttgatatttctggtctgggtaatctcctaatgtaaggtgttagtttgttctattattctattctcgattatacaagctgtggctttaaagaaatagcagtagatatgatatggaccattgaggtcacttcc

SEQ ID NO: 17222 - DNA, 2555 bp, Oryza sativa
  ref <308>: DATABASE ACCESSION NUMBER: AK067681
  ref <309>: DATABASE ENTRY DATE: 2001-12-06
gacctagccaaccaattggaagaagaaagctcctaaattcccatgctctctcatccttctcttccattcccagctccctccacagctttcttcacctgtgataccttcaagtagcacaaaacaacaaaaaggaagcagagctagcttaaattttccaaaatcactaggaaaagagcttctttggtccctaggttgctggcattttggtgcctacttttttgctcgctgttgccgccttctctaatcccaagaggggagaaatggagtagaaggctaaaataattcagatgcagctttgctcatggcttcctcaggcagttagggcctaggggtggagaagcctgaagctttgcctgattgcctccccaatcttcttgcctcctctcctttcacttcttctctcctctccgctgtggtttcttgctggttcttggaggcctccacttggttaaatgatgggtgtaggtggtggtcttggtatggaagctactaactgtggtgctttgctcagggagcttcagcaaatctgggcagaggtaggagaaagtgaaggtgagaagaacaaggttctgtcagagatcgagagggaatgcttggaagtgtaccgcaggaaggtggacgatgccaatcggaccagggtccagctgcaccagtctgtggccaccaaagaagctgaagttgcatccttggttgccactctaggggagcataagctatatctgaagaaagacaagagtgttgttccactcaaagaacaacttgcggcagtcgttccagtacttgagaacttaaaaggcaagaaagaggagaggctcaagcagttttctgacattcaatctcagatcgagaaaatccgctcggagttaagtgaatatagcgatggcgatgataaagcaaatagtctcatcgtcgatgaaaatgatttatcaacaaggaagcttaacaattaccaagcacagcttcacgcccttcagaaagaaaagtctgatcgccttcacaaagttctggagtatgtgaatgaagtgcattgtttgtgtggagtccttggaattgattttgggaagactgtaaatgggattcatcccagtttacatcagaatggtcttgagcaatccacaaacatcagcaacagcacactggaaggccttgctaatacaatatcaaatctaaaagcagaacagagatctagaatcgataagatgagagagacaatggaatcattgtgtaaactctggaagttaatggactcccctcaagaagagagaagacaatttatcagagtacttagtgttctcatatcatcggaagaggaaatcttatcccccggggttctctcacaggaaacaattgaaaagatgggtgctgaggttgagaggttaacaaaacttaaagctagaagattgaaagaaattttcatgaagaaaaggtcagagttagaagagatatgcagatctgcacacatagaacctgatgccagtacagcccctgagcaaactaatgaaatgattgactctggcatgattgacccttctgagcttctggcaaagcttgaatcgcaaatattaaaagcaaaagaagaatcccttagcagaaaagatatcatggacaggataaataaatggatttctgcttgtgatgaagaagcttggctcgaagaatacaaccaggactcaaagaggtacagtgctggaaggggtgctcacataaaccttagaagggcagagaaggcacggattttagtcaccaaaatcccagctatggtagataacctgataaatcgaacatttgcttgggaaaatgcaagaaacaagcccttcctctatgatggggggcgtctaatatctgttctagaagaatacagactaaacagagagcagaaggaggaggaaaagaggcgataccgggaccagaagaagttggagagcatcctactcaaagagaaagaagctatttttggatctaaaggaagcccaaaaagggcagtcagcttaaatagaaggacaaatgggtaccgttcaagtggaactaccagtggactaatgactccaaatccccggagatcatctcttggtggtgctactcctgagcttttgacacccagatcgtgttctggtcactataatagatactttagtgattcaaggaggctatcagctactcaattgaacttcggtgacgactcgctatccactttcacatccattagtggttctgaaccagaatccccttctttgggataaattcagtaccttttctggtcaatttattggtcttattgccaagtaatcacctgttaatggagcactattctatgagtttctcgcatttgtatgtacattactgatgtattgtatttagcttgtctgctggtattgacttgtaagcactggaatggttgacttggtttgggtttggagttgatgttttgagttgagggctttgtagattgacggttaggtgaaagatacaggaagtggttttggttgggggtcagtcacctgtataatatatttatgtgattggcttgtctaattatatacttatgtgttgcaacc

SEQ ID NO: 17223 - DNA, 1284 bp, Oryza sativa
  ref <308>: DATABASE ACCESSION NUMBER: AK099009
  ref <309>: DATABASE ENTRY DATE: 2002-08-28
gattccattccactcgccaacccgacacgtctctcatcttcacgcaacgaacagcagcagcagctcaagctaagctaagctaaagtactacgtgttctttcgtcttcgtcggcgccggagtttgattcgtcggagctagctagcaagaggaagaagaaaatgttggccatattccagaagcaggtggcgcacgcgccggcggagctgaacagcccgcggagcagcgcggcgaagcccaagaaccccgacgagatcctcagggacttccacgccctccaccccatcgaggccttctccacctccttcggcggcggcgccgccctcgcctgcgtcgccggccacgcccgcaatggcctctctggctacgagaggatgttctgtgggctggatgacatctactgcgtgttcatggggaggctggacaacctgagcagcctgatccggcagtacgggctgtgcagccgctccaccaacgaggcgctgctcgtcatcgaggcctaccgcaccctccgcgaccgcggcccctaccccgccgaccaggtcgtcaaggatctctccggctccttcgccttcgtcgtcttcgacaacaagtccggcgccgtcttcgccgccctgagtacggatggggaggtgccgttgtattgggggatcgcggcggatgggtcggtggtgatctgcgacgagagggagatcgtgaagggagggtgcggcaagtcgtacgcgccgttcccggtggggtgcatgttccacagcgagggggggctcaagagcttcgagcacccgatgaaccggctgaaggcgatgccgcgggtggacagcgagggcgtcatgtgcggcgccaccttcaaggtcgacaccttcaccaagatcaactccatgccccgcgtcggcagcgccaccaactgggccgccacctgggacgacgctgccgcctgatgatggcgctccgtacgccgtcgtctcgtcgccgtgcgcctgccctcgccgccggcctcctcgccgtttgccgccgccgctcatctcttcctcctcttcttcctcctctctatatccgatgtgcttctccgtccgaagcatgcagattattagagcgatatttgcagctagcgtggaagcgcgccaatctatttttctgcggtgtttttacttaattttcacctcttctttttaaatttttatgtccatctttgggctctcgcctctcggcaatgtatattctcggtcgcgggtggcatgtcatggtacatactatgaatgatgaataagaaagagtttgcttcactc

SEQ ID NO: 17224 - DNA, 2034 bp, Oryza sativa
  ref <308>: DATABASE ACCESSION NUMBER: AK067682
  ref <309>: DATABASE ENTRY DATE: 2001-12-06
gacgcctcggcaatccaaagccctcctcgtcctcgcagagcatccattgcctcgattttctattccaaattcccccacgcgaagaacagccagcgccctcctcctcctcctccttcgccttcctcctggtttcttgccatctttccagggaaggaggaaccgcggcccggccgcattcttggacaagaattgttggcataaaggaacattttgttgatgttctaatggagtcaaaaggtggcaaaaagaagtctagcagtagtagttccatgtacgaagctcccctaggctacaagattgaggacgttcgcccagccggaggaatcaagaagttccagtctgctgcttactccaactgcgctcgcaagccatcctgatattccttcacatgcctttccccgtagagtaggaatttcctgcaatttttcctttgttttgttgcaataaatctcccttggctggctgctttctcaatctcttcccttgtcttctccgatctcttctttcctgtcttgtccactgctccttgcaacacttgatcaaatgtcgatgtccttggctgattcttggggctctgcccctgcctcgcccattgggtttgaaggctatgagaagcgccttgagataacattgtctgatgcgcccgtctttgtggacccctgtggtcgcggccttcgtgccctctcacgtgagcagatcgactcgttcttggatcttgcaaagtgtaccattgtatcccatctttcgaacaagcacttcgactcatatgtgctttcagagtcgagcctttttgtttatccccacaaggttgttctgaagacctgtggtacaacaaagcttctgctctccattcctcgcatccttgagcttgctgcagagttgtcactgcctgttctatcagtgaagtactctcgtgggatgttcatcttccctggagcgcagccatcaccgcatcgcagcttcttggaggaggtttctgtgctcaacagcttctttggtggcctcaagtcaggtggcaatgcttatgtcattggtgatgcattcaagcccaagaagaagtggcatgtctactatgccacagaagagcctgagcagcccatggttacactcgagatgtgcatgactgggctggatgctaagaaagctgaggtgttcttcaaggattccactgatggctcctgctcatcagctaaggagatgactatgttctctgggatttctgaaatcatccctgagatggagatttgtgactttgagtttgacccgtgtgggtactcaatgaatggcatttatggtcccgccgtctccacgatccatgtcactcctgaggaaggtttcagctatgcaagctatgaagcaatgaacttcaatcctagctccttggtctacgatgatttgatcaagaaggtcctggcttgtttctgcccttcagacttttcggtcgctgttaccatcttcggtgggcatggttttgccaaatcatgggcaaaaggtgcagaggttgattcctacatgtgcgatgatcttgttgagcaagagcttcctggtggcggtgtgctgatgtatcagagttttactgctgttactcctggtgctgtgtcaccgaggtcgaccttggatggctggaacagcgatggagcagagatggttgcgaagagcaaagagatgagtgtctgctgggaaggagagaaggcggcgaagaagaaagatgcagatgcctgagaaatcagcagttcttcaacctcaagttgcaagtttgattcatctgaagtttctgagacgccttatttggttctgctcttgcagtttcggttaagcagctggctgggctaccggcaaagcatatgttacttgttcattgttcttttatatctgtctgcccaaataagtgctctagatggtttgctgcgtctgccatagtgagcaattcagattgtagtagaattcttatctgttgccgatgctctttaagggagaatgatatgtaactcgattattttcaataactattgcaacttccataattttctgtcc

SEQ ID NO: 17225 - DNA, 2243 bp, Oryza sativa
  ref <308>: DATABASE ACCESSION NUMBER: AK067683
  ref <309>: DATABASE ENTRY DATE: 2001-12-06
ggtggagccgaggccgaggccgagctgagctgagctcgcttccgtgctcggccagcgcacccgcgcacgcaagcaagcaagcaaccgagcaagaagacctgcgctgcgcgcgcgcgcgctgacgggcggaggcgaggcgaggcgatgctctacctgctgccgctctccgtctcctgccgggtccccggctcgccgccggcgccgcgctcgcggcgcttcctcgaccccggcggcggccggggagttggggatgggttaggcggcgtcagggtgttccggaggcgggcgctgcgagggaccgacgtccggtcgaacacctcgtcgtcgtcgtcgcggaagggccgccacgacgacgcgcgacacgacgggggatacggcgacgacggcgacgctggggcgctgctggcgtcggtgaggaggctgctgctctccgggtcggcgcaggacgacgcggcggagggggaggcggaggaggacgagcagggtcagttccccaagcgatgggccatcgtcttcctctgcttctccgcattcctcctctgcaacatggaccgcgtaaacatgagcattgccattctgccaatgtctgcagaattcggatggaacccacaaactgttggcctcattcagtcatctttcttctggggctacctgctaactcagatagcaggaggaatctgggcagatacagttggagggaagactgtccttggcttcggcgtcatttggtggtcgatagccacagctcttacgccttttgcggcgaagctggggttaccattcctccttgtgacccgtgctttcatgggagttggtgagggagttgccatgcctgcgatgaataatattctttcgaaatgggttcctgtatcagagaggagcagatcattggctctcgtgtatagtggaatgtaccttgggtcagtgacagggcttgcattttccccattgctgatacataactttggctggccatcggtcttctactcctttgggtctctgggtgtattttggttttcgacatgggcgagcaaggcgtatagtagtccacttgaggatccaggaattagtgctgaagagaagaagcttataaccagtcaaaccacaggaggagagcctgttaaagaaattccatggggactaatattatcgaaaccccctgtttgggctcttatagtgtctcatttctgccataactggggaactttcatcttgctcacatggatgccaacatactacaaccaggttctgaaattcaacctcacagaatccggccttttctgtgttctcccctggttaacaatggcagtttctgcaaattttggtggttggatagcagatacgcttgtcagtagaggattatcagtgacaacagttcggaagatcatgcagtcaattggattcttagggcccgcattttttctgactcaactgagccatatcgattcaccagcaatggcagtgttgtgcatggcttgtagccagggaactgatgcattctcacagtccggtctatactcaaatcaccaagatatcggtcctcgatacgctggtgtactgcttggtctttctaacacggctggggttttagctggtgtgtttggcacagcggcaacaggatacatcttgcagcatggttcttgggatgatgtcttcaaagtatctgttgtgctgtatctggttgggactttggtctggaacctattctcgaccggtgaaaaaattatcgattgatgcttgtatatagcctgcttacagttcaaaatggaaagtacatacggttcagtaactggtgagatgagaattgcattcgatcaacatccattccatgtgaagctcaactctttgcagaaacagaactacagactgcaaacttttccgcgcagcgttagacatgcaattcttggcagaagaagtttcaagtgttcgaatttttcacatgattcaggatcttcgcacaattttgcaaatgaagcatgtgcaagaggtttgagttgagcaattaccaacagccagttttttaggactctgtaagtataggtatttctgtacagcttagatgaagaatccaccatccaccgtacacccctattatttttgacttgttacacaattttcttgaacatcgtatttctgtaaagtttgtagttaacaagtttaggaattcggcaatcttacctgattcttgtgaatttaactgtttgagatatggcccttggcatttgatgggcatggtttcatct

SEQ ID NO: 17226 - DNA, 1493 bp, Oryza sativa
  ref <308>: DATABASE ACCESSION NUMBER: AK067684
  ref <309>: DATABASE ENTRY DATE: 2001-12-06
gggaagggtttgtgggtgagagcggcggcggcagtggccgcggcggagttgaggagaaatggaggtcgacggaggcggagacgagtcgtcggcggcgacccctgaccccggccgcgggaagaagaggccgctttccccctcgactcctccgacgccgagcgacgatggggaggactccgacgacagctgggctgtcagcgacgaggaggaggaagaggaagaggaagacgaagaggaccaagaaggaaagcaccgcccttttacagttgatgattttcccaggcttagtagtgaccattctgtgcagactgatgcactctttgatattccacatcttcgccttggaggcccgtcaccgctcagtcttttccgtgcattcaatgatcctctcactgataaacgcaggcattggtttggttcttattaccgactcgatgatgaatctgaaatcagtgtcgacagcgctggggccgttgattgcttaaatgggtgtaggtgcctttcgaagaatttgctccagttcattgacctgaaaatctccggctatcgccatactcagcctggacgtgccaaaatcttcggcttttttgcggtgcgggatgacttggaacctctgcgcaactatgtcttcaggcatgcaatttacaattatgaagctgtatctgtgaagccaaagacgggtatggcgtgtttaccattgactagccctgcttgaggtatctgcttgacaagccgtgcgctgtttgaattccaactctgtattcggactgaagactcacctgaggctgaggatgagcccaaaggtgacacattgattgaaggatgcactgaattcaccaacattttaagatcaacatcattcaccaaaactgttcgtctgtacggtgagaagtgtggattggatttgaagtttgctctgctggttaatgcagttcaagctacagttgatgttgagattatacattcacctccttgtggccttaatttgaagttatatgccaaaactagtggcttcagcgatgtgatccgtctcttccaaggtgctgcacaatctggtcatagaattagttctgttgtggcggtggtgcgacgtagtcaccttgatctttgtatcgaagggtctccagcaggtattggtcttggtgagaagctgccccgtgtaagatgggagcacagatttggtgctggttttcatggaattgaagatgaagtggtgaagcttggtgattttagcacaatttctgtgaaagtcacctggaaagctgtcggcaagcgtccggcgccgaagggatagtggagcttctatgcaaagtaaaaactggaagatgttatgtgtggcaacttttgtgagctatttccatgtattaatatagagtttaactcttggcatgctaaactttggtctgccctaatgtcttgggcaatcttgctagagcaatgataaacttttgtaaacatttgcgtgatgctaattgaattcttatttcggtgct

SEQ ID NO: 17227 - DNA, 2010 bp, Oryza sativa
  ref <308>: DATABASE ACCESSION NUMBER: AK067685
  ref <309>: DATABASE ENTRY DATE: 2001-12-06
gtcattccctcggcgtgaaagaaagagagaaatcttccccatctcgtcgtctcctccgctccttgcgcccaagacgagccgcggctgagcaggggaggggcgcgccgatctccatccggcgagcagagcagggtaggggatcctggaggcaacatcagtttcgctgcaatctgacaaagtggagggtctaaaagttgaagcttcttttatgtctgaacaagacttgctttacttgggatcagttggattgcttggagaatattctcggacaacgagaaaaaggcacaagctctcgcttggaaggccctgctgcgcactggtttctgctgattcatttcaaggatacaagactactgttccttttggctcttggtgcttctgatattatctcagcgaaagaaaattaatccaagatggctctgcaaaacattggtgcttcaaaccgtgatgatgccttctacaggtataagatgcccaggatgatcaccaaaatagaaggccgtggcaatggcatcaagactaacattgtgaacatggtggatatagcaaaagccctagccaggcctgcttcctacacaacaaagtactttggatgtgagcttggtgcacagtctaaatttgatgagaagactggtatttccttggttaatggggcacatgatactgctaagctggctggtctccttgagaacttcatcaagaagtatgtccaatgctatggatgtggcaaccctgagactgaggtcctaatctccaagacccagatgattacactgaagtgtgctgcctgtggttttgtgtcagatgttgacatgagggacaagctcacaacttttatcctgaagaatccacctgaacagaagaagggtgctgggaaagacaagaaggcaatgaggagagctgagaaggagcgtctaaaggaaggtgaggctgctgatgaggagatgaagaagctaaagaaggaagcaaagaagaaaggtgcatccaaggaaagtacctcctctaaaagtggtgctgggaagaagaaggctgctgctggctctgatgaggatcattcaaattcaccaactcgcagccatgatggtgacaatgtggctgcagatgaggatgatgatgatgatgtccagtggcagactgacacttcgttggaggctgcaaaacagcgcatgcaggaacaactgagcgctgcaactgctgagatggtaatgctgtccactgaagaacctgagaagaagaagaagcatgaggcctcacacaaggagggtgcctccaacggaagtacaaaacatgtggttgaagaggctaaaagcagtccttatgatgatctggtcaaggagatgaaggataacttgagcaagggtgccaatgctgttcagctcaagggtctgatgacttcctcagcgctgccaccccaggatgctatgaatgctctttttgatgcactctttggcggcctcggcaaaggattcgccaaggaggttgtgaagaagaagaaattcctcgctgctgctgtgcctgatgaagcctcccagatggtcctgctgcaagcgctggtggccttcggcgccaagtcaagccccgaagctgtgaaggaggtgccgattgttctcaaggccctgtatgatggggacgtcctggatgaagaagtgataactcagtggtataatgaatctgttgctggtggcaaggagtcccaggtggtgaagaatgccaagccgttcgtggagtggctccagagcgcggattctgaatctgaggaagagtgatgcgccgaatctcctcccaatcatcgcctacttcgccttatcgtcttttcagtatttcgttcgtcatgagtatttccagttcgcgtcatgagtgcttcgagtttgtttgtgctgtgcgctttcttatctgtaatgttggtcaataaataaacccagagtcccagacagtcctcagagactatgtggtgtcacactccagctggagatctttttatttatcaaaccttaatgtgtttcacgtgcc

SEQ ID NO: 17228 - DNA, 1723 bp, Oryza sativa
  ref <308>: DATABASE ACCESSION NUMBER: AK067686
  ref <309>: DATABASE ENTRY DATE: 2001-12-06
gtgggaaatctacgtgcagctgcaggagagtgtgaggggttgcgatgtgttcttggtgcagcccacctgctcccctgttaatgaaaaccttatggagctttttgtcatgatcgacgcatgtcggcgggcgtcggcgaggtctattactgttgtcattccatactttgggtatgccagagctgacagaaaggctcaaggacgtgaggccattactgccaaactttctgctaatttacttacagaagctgggagtgatcgtgtaattgtatgtgatattcattccactcaagcattgggatacttcgatattcctgtggatcatatacatggacagcctgtgattctggattaccttgccagtaagacaatatctaaggatcttgtggtggtttctcctgatgtgggtggtgttgtcagagcacgtgcatttgctaagaaattatctgatgcccctttagctatcgttgataagagaagacagggtcacaacatgtcagaggtcatgcacttaattggtgatgtgaagggtaaggtcgccatcatggttgatgatatgatagacacagcaggaacaattactagtgcagctgctttgttaaaacaggagggagcagaggctgtctatgcttgtagcacacatgctgtcttcaggtttggcagttggtttattgtaacatccatgatccatgtaatagtattgattcattggcttgttgcgaaggaaccatgttatggcatgattaggcagattggctttatgtttgatcaatataaaaatgacagggtagagcaataattttactagattccacttgagcacaccaatcacttagtgctagtaagtgggagtctggaaaagaggttggctttaatctagttgagtgcggatctggttcttgttgactctatttcattagtagtcatgaatctgtgccacacatatcagcatatgtttttctggctattttgatttaggaagggacctcaagtcctcaattgaagtcttgaattttattagcatcaacatgcatgatttctttttacatggtaccgcacagtaatttgacttcaaaataatagcaggatgtgttgccacttacttcatttgcaaaaattgttgtccttttgtattcctgcactattttgtaggcataaaagtaagtcgtttaccacacctactttttcccactagcactgtctttgcagccctcctgcgattgaaaggctctctggaggcatctttgaggaagttattgtgacaaactccattctgctgccagagcacaaatgcttcccccagttgacagtgctctcaatggcgaaccttgtggcagaaacaatctggcatgttcatcgcgatggctctgtgagcagcatatttcaatagcggcggatgctatggctaccgcgatgccacatttgtgtggtgtggagaaggcacctgatggttgtgcccatctgcgtaggaatcaattttggtgacaagactaaataaggttgtagtgccgtgtaggcatcacacatgtatcgtgtgatcaattttgttcttgcacccactaaatagtgttttcctgttaactcgacgcaggatatccattgtatcaagtataagagaatcagtctcgtgcagttctttcatcctttagcaactgttgagggacaaggaaaagatttgtgctgttcactgatatattggaagtaatgcaaatgatgcttagctctg

SEQ ID NO: 17229 - DNA, 2174 bp, Oryza sativa
  ref <308>: DATABASE ACCESSION NUMBER: AK067687
  ref <309>: DATABASE ENTRY DATE: 2001-12-06
gattgccagacatgggagagacggcagaaggtgttgaagcaggcgagaaatatgtgagcataccacagttggctggagttggaactcttctctccaatggaggaaaggtgagactgatcatagtatttgatagccctgatcttcagcttagcttgtgttctgttgttctgaataaatattctctaattttcttgtggatatactatttggcatccaagcatgatttaaatatagcaaataaacatcaatacatagaagtactccagggattggctgttctgtttcatgatcaaatctgagatctctgcttaagtataaaactgctaacatggcatagtttttccaaattagtatcagtattaaaacttcacactatgcagtactgcaaaaatatgtttgcttttggtttcagaaagagaagaattagttgtctcctaaatttgtcattgtgtatcaaaaacaggaaatacctctgtcgtccattgaagggaagagaatctgcctcttcttctcggctcactggtgcaggccatgcaggaactttaccccaaagttgctccaaatctacaggaaactcaggaatacttgcaagaatatggagataatcttcatatcacttgaccgcgacgagatcagcttcttggactacttcaaaggcatgccatggcttgccttgccttttgacactggcctaaggcaaaaattatgtgtgcaatttgacattgagcatatcccagcattgattcctctgtcaacaacgctatctcatggatttcgagtcgaagaggatgcagtgaagctggttgaggagtatggagtagatgcctacccctttggtgcaaagaggagaagtgaactggagggtatggatgatgccaggagacaaggaggtaatcttctgcaacttcttggatgcaaggaaagagaatatgtcataagtgcagatggcataaaggtgaccaaaatcataacctataaattcgtaatttgcttgtttatgcattgcgtatgtttaggtaaaatataaggctagatgatgcagacttgatagatggtgccagtatatagatacatgctatgacagtaacctgctagcaagaaccccaacagattgcactaatacaagctaatatatgagcacagtcatcaaaatcttaatgattgtataaccattaaactgagtaaactggcaatgctagattaataatagtaatctagtcacaaaacaatgaaaccaacaaaatatgaattaggtgaagctttatgaagctacatgagataaaaaataaaggaatatagctacaggtgcagcacaacagtttttttggatactatgatccttgaaaggaagcatggaccaacaaacttaatgtgtaacatgcacaagcggaaattgctttgaattcctcatccccatcaggtacaattggctttgctttaccatttcaccttctattataactctttcagactcctatatctgaccttaatggcaagacaattggactgtactttggagcacactggtgcccaccttgccgtgccttcactaaacaactcagggaggcgtacgatgagctgaaagccttgagacctgggaatttccaggtcatattcatttccatggaccgcaatgaggaagaattccaagcaagcctgagtgcaatgccatggtttgctatcccctattctgacacaactgtgcaagaactcagtagaatcttcactatcaaaggcatcccaacactcttgatacttggaccagatggtaaagtgttcaaaacagacggaaggagaataatttcaaaatatggtgcaatggcattcccttttacagaatcaagagcttatgagttggaagaagttctcaaaaaggaaagggacagcctgcctcaccgagtgagagatcaccgtcatgagcatgagcttgagttggacatggctaaggcttatgtatgcgatgagtgccaacagaaagggcaaaactgggtcttctcttgcaagcagtgcaacttcgatctccatccaacctgtgcgcaagaaagtactgatgtaaacatctgagatatttatacttcaaatatactgacaacaatgatgtatgcgtttatgtatattgtgtccaacagatctagtgctaatgtggcactggaaaaaaaaaacttttaagatcc

SEQ ID NO: 17230 - DNA, 629 bp, Oryza sativa
  ref <308>: DATABASE ACCESSION NUMBER: AK099010
  ref <309>: DATABASE ENTRY DATE: 2002-08-28
gaacgccgactgctccttggagagtcgcagcctcccttctcctctgctcgccccgccgccgccgccgtctccgcgccaccgccgcccccgagatggccccgaagaaggacaaggccccgccgccgtcgtcgaagccggccaagtccggcggtggcaagcagaagaagaagaagtggagcaagggaaagcaaaaggagaaggtgaacaactcggtgctgttcgaccaggccacctacgacaagctgctctccgaggtgcccaagtacaagcagatcaccccctccgttctctctgagagactcaggatcaacgggtccctggctcgtagggccatcaatgatttaatgacacggggcctaatccgcatggtctcggttcactcaagccagcagatctacaccagggcaaccaacacctaagtgtgagggtgacatgcatctttgtttgccctgaatgtgtacggggggcttgcctactctagaacagctgttacctttgtcgagtttgctaatgttatgttaaatgagctacttgtgatggtcagcatctctatatggctgaaacatttcagagattttggttattagttgagtactgttcttgtttgccctatataactttttccgccc

SEQ ID NO: 17231 - DNA, 1937 bp, Oryza sativa
  ref <308>: DATABASE ACCESSION NUMBER: AK067688
  ref <309>: DATABASE ENTRY DATE: 2001-12-06
gtactgcgagagtgaggcaaagaggaagtcagggaacggaagggttgagatggagatcagcacagtgctgggcgcaatattggcagagtacgcggtcaccttggtggccatggctgtgggtttcctggtggtaggctacttgtacgagccatactggaaagtgcggcacgtgccaggtcccgtgcccctgccgctcatcggccacctccacctgctcgccatgcacgggccggacgtgttctcagtgctcacgaggaagtacggccccatcttcaggtttcacatgggaaggcaaccgttggtcatggtggcggatgctgagttgtgcaaggaagtgggcgtgaagaaattcaagaacttccccaaccgaagtatgccctcacccattaccaattctcctgttcatcagaagggcctattcttcacaaggggcattttataatatggtcgaacttaatgatatttggcataagataaaactcaaatgatcactcgaagaagtaaaagtgttcgtgcatgcacaccgtaccgggccagcttccatccttgtggttcgaggtggacgactatgcgaaacatgatcctctccatctaccagccgtcgcacctggccaccctgatccccagcatggagtcgtgtattgaacgcgcggccgagaatctcgagggccaagaggagatcaacttctccaagctctctctcagcttcaccactgacgtcctcgggcaggcagcgttcggaacggactttggcctgtcgaaaaagttggcctcgtcggacgacgacgaggacacccgcaagatcgcggccgatacctgcgcggaggccaaggcatcatcggagttcatcaagatgcacgtgcacgcgaccacgtctctaaaaatggacatgtccggctcgctctccatcatcgtcggccagctcctgccgttcctccatgaaccgttccggcaggttctcaagaggcttcgctggacggcggaccacgagatcgaccgcgtgaacctcacgctcgggagacagcttgacaggatcgtcgccgagcggacggctgcaatgaagcgagaccggcggcgctgcagcagcgcaaggacttcctgtccgtcatgctcacggcgagagagtcgaacaaatcctcgagggagctgctcacgccggactacatcagcgcgctcacttacgagcacctcctcgccgggtcggccacgacggcgttcactctcaccacggcgctctacctcgtcgccaagcacccggaggtggaggagaagctgctcagagagatcgacgggttcggaccccgcgaccgcgtgccgacggccgaggatctgcagaccaaattcccctaccttgatcaggtcctgaaggaagcgatgagatattacccctcatcgccattgatagcaagggaactgaaccaacagctcgaaattggaggatatccccttccaaagggaacatgggtgtggatggcacctggtgtcctaggaaaggatcccaaaaatttcccagagccagaggtgttccggccggagcgcttcgacccaaacggcgaggaagagaagaggaggcacccgtacgcgctcttcccgttcgggatagggccgagggcgtgcatcggccagaagttcgccatacaggagatgaaattgtcagcgatccacttctaccgtcattacgtatttcggccctcgcccagcatggagtctcctcctgagtttgtgtactcgatcgtctccaatttcaagaacggcgccaagcttcaggtcatcaagaggcatatataatgcttaatcacatcatcaggagaactattcgtttggattttgggtattgcgcatattattaagtactcgttttcagtttatgttgtactgtacttgttttcgccgggcagtccgtgttgtactcgtaatatatatgaaccacagctagc

SEQ ID NO: 17232 - DNA, 1675 bp, Oryza sativa
  ref <308>: DATABASE ACCESSION NUMBER: AK067689
  ref <309>: DATABASE ENTRY DATE: 2001-12-06
gattctctccttaatttcttgaattgctatccgatcttgagcaatatatgtccctagctagctagctgggcgtccgccataatttgctgccaataataattagccccatatatccttgtagctaggtgaatcatccccttgatatgccttgttaaatatgtagctccgatttaagctctcttgcccatttttttttcagagtttatagtttcattttgattcttccgctctctgctagcttccacaccaagttcatcagccaatttcttcctgacgagaaggccgtgtaagaattttagtgaagtgagtgtcttttttgtttttcgattggtcgatcgagtgctggtacaagctagaggatggcgatgatggagaggattggggtcaccaagcttcatcatcatcttcttcttcttgttcttcttctcgtcgtcgccgccgccggcggcggcagcgtacaggcggcggaggaggatgagatgagcggccggaggaggagaagcaggcggcggcgtgcggcggacgtgatggtgcccatcaccatcctcaactccgccgtcgacaagggagccgtgtgcatggacgggacgccgccggcgtaccacctggacccgggctccggcggcggcaaccggagctgggtggtcaacctggagggcggcgggtggtgcaacaacgcccgcacgtgccgcttccgcaccgccagccgccacggctcctccgaccacatggagcgccgcatcgccttcaccggcatcatgagctcagccgccgccgacaaccccgatttccacagctggaaccgcgtcaagatccgctactgcgacagcgggtccttcgccggcgacgccttcaacgagggattgaagctgcaattccgggggcagcgcatctggggggcggtgatccagcacctgctcgacgtcggcatggcctccgccgagcatgtgctgctcaccggctgctccgccggcggcctcaccgcgatcctccactgcgaccagctccgcgccctcctccccgccgccgccaccgtcaagtgcctctccgacggcggcctcttcctcgacgccgtggacgtcgccggcggcaggagcctgaggtcatactacggcgacgtcgtcggcctgcaggcggtggcgcccaaccttcccgagacctgcaccgaccatctcgacgccacctcgtgcttcttccctcagaacataatcgacggcataaagacacccatcttcctgctgaatgcggcgtacgacgtctggcagatcgagcagagcctggcccctaacgcagctgacaccagcggcacctggcgagtctgcaagttcaaccgcgcagcctgcaacgcgtctcagctgcagttcctgcaaggtttcagagatcagatggtggcagcggtgagagtcttctccgagtcgaggaacaacgggctgttcatcaactcgtgcttcgctcactgccagtccgagctgacggccacctggaatggtggctctcctgctctccagaacaagggaattgcaaagtctgttggtgactggtactttggtcgagctgaggtgaaggccatcgattgcccctacccctgtgacaaaacatgccacaacatcatatgacatcatgtactgacgtttactcgtctcgaccgaatggagtgacacacatttttgcctcg

SEQ ID NO: 17233 - DNA, 1296 bp, Oryza sativa
  ref <308>: DATABASE ACCESSION NUMBER: AK067690
  ref <309>: DATABASE ENTRY DATE: 2001-12-06
ttgattcgagaaatccctcacaacccacaacattttcaaacaacgcaaagcagtagcagcagcgagaagcaagcaagaagcgatggggatggggatgaggagggagagggacgcggaggcggagctgaacctgccgccggggttcaggttccaccccacggacgacgagctggtggagcactacctgtgcaggaaggcggcggggcagcgcctgccggtgccgatcatcgccgaggtggatctctacaagttcgacccgtgggatctgcccgagcgcgcgctgttcggcgccagggagtggtacttcttcaccccgcgggatcgcaagtatcctaatgggtcacgccccaaccgcgccgccggcaacgggtactggaaggccaccggcgccgacaagcccgtcgcgccgcgggggcgcacgcttgggatcaagaaggcgctcgtgttctacgccggcaaggcgccgcgaggggtcaagactgattggatcatgcatgagtaccggctcgccgatgctggccgcgccgccgcgggcgccaagaagggatctctcaggttggatgattgggtgctgtgtcggctgtacaacaagaagaacgagtgggagaagatgcagcaggggaaggaggtgaaggaggaggcgtccgacatggttacgtcgcagtcgcactcgcacacccactcgtggggcgagacgcgcacgccggagtcggagatcgtggacaacgaccccttcccggagctggactcgttcccggcgttccagcctgcgccgccgccggcgacggcgatgatggtgcccaagaaagaatcgatggacgacgccaccgcggccgccgccgccgccgccaccatccccaggaacaacagcagcctgttcgtggacctgagctacgacgatatccagggcatgtacagcggcctcgacatgctgccgccgggcgacgacttctactcgtcgctcttcgcgtcgccgcgggtgaaggggacgacgccacgcgccggcgccggcatgggcatggtcccgttctgaggtgacggcgacgcgatcgaacaggtggtgatcgatgctgcaacgtgtgtaaatatacagcgccggctgggtcaagagatggctcgggtgacgcgcgcgcggcgtgtcctggcgttggcgccggggcattctttagtttttcatcttttcatcatctcagatggtagatacaaaacagtgtatgtatgtagctctgtttctctctatagaaccccaacaaattttgttgttgatgttgtttatcttcatatgctttgatcttg

SEQ ID NO: 17234 - DNA, 703 bp, Oryza sativa
  ref <308>: DATABASE ACCESSION NUMBER: AK067691
  ref <309>: DATABASE ENTRY DATE: 2001-12-06
ggggagaggaccacgtgaggtccgccgtgccaaggctcgggaaggctgaaggctgacggcgctcaggaggcggacctcgccgtcgacgctgccgcatgctccgtgcactgccacgcctacgccggggatggtcgccgccggcagcaaggagctcctccgcaacgaggatgggttcaccacggaggacgtcgtggccatggactcccccaacatcgtcgccctcgctgagacgccgacggcaagaacatcgccgccgccgccgctgccgaccacctcaaggccatctgagcgagctagctgctctcctcaaggccatccgtgcagcgccggcgagccgcccggagatccttggcgtcgaggcggccgcggcggagacagcttcccgctccccctgccgccgcggctccttgtggtgctcggtggcgtacgcttgcgggtgaaggtggcagagcagcatcccggacgtgtccgcctccaccctggccgacagctgcctcaaccgcgactccacccagccctgtgagctttggcccagagaaacaacaaaacacacgcgaggtcacacacgcacgaaggaatacacaagtgatgcaaatacttcagtggacaaacacgagcttgcggcgaactagctacacttccactcttatttctcagactcagtgatttgttagtcaagctgcaacacatacagttaccgacc

SEQ ID NO: 17235 - DNA, 917 bp, Oryza sativa
  ref <308>: DATABASE ACCESSION NUMBER: AK067692
  ref <309>: DATABASE ENTRY DATE: 2001-12-06
ggccccggccgccgcttgcaaggtcgccgccgacgacgcgcggagaggagaggagaggagagaggaagagaaaatcttccgattccggcgaggaggggatggggtcggcgctgctgccgacgctgcggcggaagccggaagtggacgccgccatccgcgacacgctcgacaaggtcctcgtcctccgcttcggccgcgccgacgacgccgcctgcctccacctcgacgacatcctcgctaaatcttcttgggacatatcaaggtttgcgacggtagcattggtcgatatggattctgaggagatgcaagtctacattgactatttcgatatcactttggttccagctaccatttttttcttcaatgcccaacacatgaagatggactcagggacacctgatcacacaaaatggattggctctttcagcagcaagcaagatttcattgatgtagttgaggcaatatttaggggtgcgatgaaaggtaaactgattgtttcttgcccacttccaccagagaggatacccaaattccagctccttttcaaggatgtttgagcaaggaaagtgctcatcacatgcgcatgctaaaagagtgtcttggtcatgatgacagaactatatgaagctatgttcaggcagaagagtttgtgaagatctcgtctctccaattggtttgtctcgactactttcatttatgtagtagtatatcacatgctgtgttgatatgtaccaggcatggtagcttttgttctgtacttctataggaggcaaactgaatcgatcaagaaaagtgcatatctgacatggtgccgcatagtaagcttttagtaattaacacaagttagaatgacactttgcatgtagtttgcattgcactctaaatacagagaagggtataaaatattattgctcgtt

SEQ ID NO: 17236 - DNA, 585 bp, Oryza sativa
  ref <308>: DATABASE ACCESSION NUMBER: AK099011
  ref <309>: DATABASE ENTRY DATE: 2002-08-28
gaactctctctttctccaccgatcgaatcggctctctctctctctctccctcagctgaatcggcgtgcacggtgggaggggatgctgcggcggcggtgggtcggcggccggtcggtggtgggaggggatactgtggcccagcggcggcgccctcccctccgccagatctggtgggaggggaggtggcgtcggcggcgcgacggcaaaagggggtgcggcggcgacaggtcggcggcgtgaggggaggcgacggcggtccgacggcccggcggcgggtccctcccctccaccagatctagcgggagggagatggcggtggcggcccggcggcagaaggggatacggcagcggcggcccggcgacagcgacagcggtgctgcggcagcggcgccctcctctccatccgatgacggtggcagcggtggagacgttagtggcggtagtggcggtggtggtgaaggcaatatgatgagtgttcttgattctcgatgagtgttctggatgaatgtgtttgaatatgatgttgatgtgttcttgatgagtgtttttaatgaatgtgatgatgttgacgagtgttcttgatgg

SEQ ID NO: 17237 - DNA, 1899 bp, Oryza sativa
  ref <308>: DATABASE ACCESSION NUMBER: AK067693
  ref <309>: DATABASE ENTRY DATE: 2001-12-06
gaggtagatacacgtcgcgcgttcgagcctaaggtacctgctctctcgcgcgcgccaccgatggcgtgcctcgcgccgcagctcaagtggcccctttccacccgcgcggcggcgttccgggagcacggcggcgccggaatcggcgggttccgtaccgttaggctccactgcgcggtgtccaccaccgcgctggtagaggccgagagctcggattccttggcccccggggcgaggcgtctcgtcgtctacgacggagccgtcgcgccgccgcctcttccgggaggtttcggtgaggcgattctcaaccaagaagccgtggtggcggccgcagcggcggaggccgtcgctctagcaagggcagcggcggaggtcgccggagaggtcgtccggatgtcgcaaaccgagcaacggcaccggcctgacttcgtcacgacgcacgacacggaggacaactacttggccagagagatcctccgcgccgaggcgggattgggggcgaggtacgccgatgcctgtctgtcggaggatgcggggttctccagtatcttcagcgatgaatccgaggtagatgacgatgagcagtgcgtccagggcgtggctgtgaaatcggtgcgccagtccgagaggggagctcggagggtgagggcggcgatgaaggcggccaaatcgttcagcggccggaatcccgtcgcggcgtcgtcgtcggcgaggaagaagaggttgaagggttgccggagtcctctcggctgcttctacaagatgaccggccggaggcttctgacagcaaaacaagaagttgagttctcacaaggcattcaggatctcctgaagttggaagctatccaaaaggagcttgctcactacaacggcggtgaaccaaccttctcacagtgggcagaagcagctggaactgacgagaacactttgcgaaaacgtctgaactatggaatttcctgcaagaacacgatggtaaagtctaacgtgagacttgtaatctcaattgctagagagtttgaaggtcctggaatggaattttctgatcttattcaggaaggaatacagggccttgtacgaggcgctgaaaagtttgatgcttcaaagggttttcgattctctacatactctcactggtggatcaaacaagcaatacgcaaatccgttttagaacaaacccagattattcgcttgccggcacacatggccgaagcaagttcccgggtgaaggaatgccgacggcggctccgccggcagctgaagaggctacccaccaacgaagagatcgcatccgacaccggcatgccgctcaggcgcgtcgaggcggcgatgagcctcccaaaatacaccgtttccctcaccagcaaggtcgggtgcactgacatgacataccaggagatcacgccggacacgagcacggagacggcggaggagatgctgcaccggtggctgatgaaggaagacgtggacagggcgctggacgggctgagcccgcgggagaggcaggtgatcaggtacaggttcgggatggacgacggccggctgcggacgctgcacgacatcggtcggctgatgggggtgagcagggagaggatccggcagatcgagctggtcgcgttccggaagctcaggggcaggaagaaggttcagtcgctgcagcattatctgcagcctgtggagagctggtagctagccatgcatgcgtgtgctgcctagttaccacttaccaccacattgccatcttctttttggaagggttattaacctgtacgagtaactgttaatccttacgtatgagtatgtaacacacgtgtaaagaaaggagatccaaacatttgttttgtaacaacatactggtatagctattgccggaagcaaagaacgcaacatagttgcttcaagagt

SEQ ID NO: 17238 - DNA, 2777 bp, Oryza sativa
  ref <308>: DATABASE ACCESSION NUMBER: AK067694
  ref <309>: DATABASE ENTRY DATE: 2001-12-06
gaccccagcgagttagccttcccccgcgaggcagcaagaccaataattgaagccatcagttgggggccatttacaaggcaggtggcaagtgaaatacatctcaagatttggatggagagctatcaccagaagactagaagctcaagatttggatggagggctggcaccagaagaatagaagcttgatggaaaccttggtcatctggagagttttgggcttcagcagtcacttctttctgctggcttgatcacgtttgtgttgaggatagctttgctgggtcacttctggacataggtcctgtttgatcgtaatttcggtttcggtcttttttttgtcctttgtttagtttcagcttgggctttcattccctagttaaaaaaaaaaaggggggccatgactgagctcgcgtctggcgccgtgagctcactgctggcgatcatccgcaacgaggcggctcttctcggtggcgtccgggacgacgtgcagttcatcaaggaggagatgaagagcatgaacagctttttggcgcacttggcgaagagcgctccgcagggtggagagcacgacgagttgcggggaggcaaacctgataagaatcaagcaacatgtgaacctgatgttccacctgataagaatcaagcaacaggtgaacatgcaggtgtaatggatcacaatggagaggcttattttacagaaatagagcagaagattgacgaaatcaagcaggaatttaaaaaacagctgaaaatcaaagggattatggacaagatcaaacatcacttgatcgagtacaagatcaaacatgacttaccgaatgagtgccccctcattatcctaaaatttgatgatatgatggatggatccagatgggaggagttcaaccttgattggacaatgggttgcagaaggtttgacactcaaggaagattggtccagttctgtgcatcaggcaaagatttgatgccctcatccatcggtatcttgtttgtcctgttgatattggtggcacaggaaaggtgaagagctgtgtggtaaatgatccagttcatgggttcattaccacaattgccagaaaacaacatattgtggagacacgcctatcacatcatttggctcgccacttctccattttcaatgatcttcgactccgcagctctgatggaattcacacattcttccaaagcctctcacgatcatctcgagtatccctactaaaggtgctagatctagaaggttctcagtgctttggtgttaagaaccagcggtacctcaaggacatctgcagcaagatgttactgctcaagtatctgagcctaaagaaaacagaaattacccaactgcccagtgaaatcaactgcctccgtgagctagaggtattggatatccgagaaactaaggtgcctgcaaatgcaacggttaatgttctgctcttgaagctaaagcgtctacttgctggtcacattgattcaagtccaagaaattctggcactagcgttcagattcctcacaggatagacaagatggtaaacatagaggtactatctaatgtcaaggcccaacgccgtgatgatttggaagatactggaaagctatggcagctaaggaagctaggtgtggttgttgatgataagagaggtcaccttgggaatttgcttaaagcaatcagcaacctacatgagtgcatccgttctctgacaatcactatttccacaaccacacacaaggatactccttcaaacccagagttaccagatcatattggctctgaccttccccatcccaagaaacttgagagtctaagcatcagtggagccaggcatctttttccattgttgatcaaaagtgataataacaagcttgccaaggtaactctaagtagcacaccactgaaccaagatgatctggaggtcctcgccaagctacccaagttacagtgtgttaggctccaacacatttcatgcatagtgagtgagctcatcttcaaggaagaaaatttcaaatgtctcaagtacctacttattgagggctttaacttgactaatatcacttttgaggatggatcagcctgtgagctcgagaaaatggttttatcttccaccagcatagagtctgtctctggagttgatgtgcttccgaaattcaaagagcttgagttgaacaacagccatgtcccgaatgagttgaaagaagccgttgaaaacaataaaaggataattcttaaatgtaatgaaccatgaactcaagaccaggcaaaacggagatgaacaagaggatgaagacaatgctgcaacatccccattctgctggaagaaacaggtttgtcgccagcggagcatatctcctttgatcccatggtgtggtttgtgtgtgctagtgtggattgccatctgctgcttgtctgtttatttctttctgctgtgcgtgagcgtgtctttatgttctgcatgatgtaataattcttgttgtaccctgtttttttcttccttactctgttttggtctatttcctagttcgagtcagtgtaagctcaagtcttgattgttcaagccggagcaagtccttagctagttggcacaacatgcactggcgtgtgggatgacacacgattcagcgagcaagttagctgtgtcattggtgcggcacgccctgacgtgcgggatggcgcacgaagtggacgggcgtggcgtacgtagtggcttgaaggccacaatttcatttgcgtcttgtctatttaagtttcaatataatcgagaaaatgctgccacttgacagcacc

SEQ ID NO: 17239 - DNA, 1379 bp, Oryza sativa
  ref <308>: DATABASE ACCESSION NUMBER: AK067695
  ref <309>: DATABASE ENTRY DATE: 2001-12-06
gactttgcctcctaaactcacccccgatcgaatccccaattgttcaatctcctcctccgggatggggcgccgccgccgccaccgccgccaccaccgccgggacgggaccgatctgctggaggccgagccgttgttggacgactcccacctgatgacggtgcgggatccattgccagcggcgtacattgcagtatgccgtcgggactggtattcccactcctactaccgcctgtacaaggtggaagacgactcttcctcctcctcctcgccgtcgtcgccggtgacaaaacaagtcctccaccgcttcgctcatctaccgacggacgtggcctgcaagaccgtcgtctccgtgcgctcaaggtggatcgtctccgtcgggggaaaccccggcggcaccgtcctcttcgacaccgagacaaggagggtcatcaccgggccgaagctgctgtccgcgaagctgtcgcccgtcgcggcggccgtcggggacaggatctacgtcctctcgagccgcccccaatacttcgagccgtggttcgaggtgctcgacctgtcccgggccacggtggtggcaacggcggacggccgccacacgctcgatgggtgctcgtgggaggccttgccggatcccatatgcttcccttgtgtgctctccccggctgggtacctcgccccgcccctcatcctcgtcacctcctacgtgctatttctcccctatctgctcgtgtccgtgaataatatgggcaagatgacaacctatgcatttgacaccggcactcaccggtggcacaagctgtacgactacggcctgccgttcttcggctccgcgacgccactagtaggcatccgtctagtctcatccgctcctcatctcaagctatccgtcaccgagttcccggtgaaaaccgaggcacgtgaggaggttggtgtaggggaagcgctatgcttggcttccatggaggacgaggggagcttttcttgcattacattcaggcttgatgaccgcgaacaccacatgtcttatgataaagatatacacgaattctatccaaggaagatgtatttaaatctcaccacctataaaatagtggagggggagaagactgatatggacattgtagtccgctgcaaacgggacaaggccttgaagattttcagttcccatgggttctcctctccacccatcgcctttgctttatccatataagcaagacccaccaacacttctgtttcacattttggtccttcataacttgtgcaaatgtatatatgtgccatgtgccaatgttcatttctcatgctttctacactacatagggaaatttccttgtactgaattttccttctacactacatgtacaataaaagacctgtttggcatg

SEQ ID NO: 17240 - DNA, 2516 bp, Oryza sativa
  ref <308>: DATABASE ACCESSION NUMBER: AK067696
  ref <309>: DATABASE ENTRY DATE: 2001-12-06
gagcagcagcagcagccgcgcccccacacctcgcctcctcctcggcttggatctcgccgcatcatctgccgccgacgacgacgaagaggaagacgaccgccatggggacggcgagcggggaccagccggcaggggcgtcgtcggacaagctgcggcacgtggagtccatgtcggagctgccctccggcgccggcaggatctccgggatcaacgccgtcgtcctcggcgagtcactcgccgccgaggagcacgacctcgtctacccctccgccgagttctccgccgacgccctcgtcccctcccccaagaagtaccaaaagatgtatgagaggtcaatcaacgacccggccgggttctggtcggagatcgccgacgccttctactggaaggagaagtggaaccccagtgaggtctgctccgagaacctcgacgtcaccaaggggcctgtccagatcagttggttcaaaggtggcaaaacaaacatatgttacaatgctgttgatcgcaacgtcgaggctgggaacggagacaagatcgcgatgtattgggagggcaatgagcctggtcaggatgggaagctcacctattcagagctcttggacagggtttgccagcttgccaattacttgaagagtgttggtgtcggcaagggtgatgctgtgatcatctacttaccaatgttgctggagcttcccattgccatgcttgcttgtgcccgcattggtgctgttcactcggttgtatttgctggcttttctgcggattccctggcccaaaggatcgttgattgcaagcctaagcttgtgatcacttgcaatgcagtcaaaagaggggtgaagcccatccttctgaaagatatagtggatgctggtctggctgaaagtgagaaacaaggagtcgctgtaggtctatgtttgacatatgaaaatcagtcagcaatgaagagagaagacacaaaatggcaagcaggaaggggtgtttggtggcaggatgttgtgaccagtttcccaaccaagtgcgatgtagaatgggtggatgcagaggacccattgttccttctgtacacaagtggcagtacaggaaagccaaagggtgtgttgcatactactgggggctacatggtttacagtgcaacaacatttaagtatgcatttgattacaagccgtcggacatatactggtgcactgcagactgtggctggattactggacacagctatgtgacgtatggtccactcctgaatggagcaacagttctcgtttttgaagggactccaaattaccctgattctggtcggtgctgggacattgtggacaagtacaaggtgacaatattttacactgcaccaacactcgttcgatcactcatgcgtgatggcaccgagtatgttacacgtcactctcgaaaatctcttcgagtcttgggaagtgttggtgagccaattaatcctagcgcatggagatggttctacaatattgtcggggactctcgatgccctatctccgacacctggtggcagactgaaactggtggcttcatgatcactcctttacctggcgcctggcctcaaaaaccaggttctgcaacctttcctttctttggtgttcagcctgtcattgttgatgagaaagggaaggagattgaaggagaatgcagtggatatctttgcataaagaaatcatggcctggggctttccggactctctatggagatcatgatagatatgagaccacttacttcaagccatttgctggctactattttactggggatggttgcagcagggacaaagacggttaccactggctgactggaagagtagatgatgtcatcaatgtcagtggacaccggattggtacagcagaggttgagtctgcgttggtttcacacccaaagtgtgcagaggctgctgttgttgctgttgagcatgaagtgaaaggtcaaggaatatatgcttttgtaactttggtggatggtgttccttatagtgaagaactacggaaaagcctcatattgacagtccgcaaccagattggggcatttgcagctcctgacaagatccactgggcaccaggacttcctaaaacgagaagcggtaagataatgcgcaggattctgcgcaaaattgcctcaaaacagctggatgaacttggtgacacaagcacccttgctgatcctggcgtcgttgaccagctgattgcgctcaaagattgctagattgtaaaaattagatgacagatgcacttccactgatgcttgtgcgttccatttctcttcctatatgatggagatgcactttctcttcctacattttagtgtccatagtctttcgtttattcggtggaagttgctcctggtctagggaactgaaacacgatatggaatgatctgagagtgtggtgttggacttctgtatacttgtgttacacattgagatgacttgctccatgaatgtatttgatggacgcaataaatccatttcaataaaatattttgtatgattttccccgttct

SEQ ID NO: 17241 - DNA, 834 bp, Oryza sativa
  ref <308>: DATABASE ACCESSION NUMBER: AK067697
  ref <309>: DATABASE ENTRY DATE: 2001-12-06
gcttcttcacccaactaccaccacctctgtgttttcctgcactctccttgctagtggtgtgactgtgaaggtggcggagcctgcatggaagggctgacgagcgagcagatggtggcgttccaggaggcgttcttgctcttcgacaagaacggcgatggatgcatcaccttggaagagctggctgcggtgactcgttctcttggccttgagccgaccgatcaggagctcaacgacatgatgagggaagttgatacagatggcaatgggatcatagattttcaggagttcctgagcctcattgccaggaaggtgaaggatggggatggcgacgaagagctgaaagaagctttcgaggtcctagacaaggatcagaatggttttatctccccaactgagctgaggacagtgatgaccaatcttggggagaagatgacagacgaggaggttgagcagatgataagggaggcggataccgatggcgacgggcaggtgaactacgatgaatttgtgataatgatgaaaaacgctgaacggaagatatctgggtgaaaagatgccgttcatagatcataagtgtgaaccactgatccccaaatttgggagcatcttttccactgtaaattccattctctcaattactgtatttgaaccacaaaatttggacttcagctatgggtaattgcagcttgtaagattgtgatttaaaactatactaaggttgtggttttatttcaaaagttgttcgcttttgcgaactatgtattagaaattgacatatacttagaagggcgtctatccatgttttttatttttttttgggaatttttttttttt

SEQ ID NO: 17242 - DNA, 1309 bp, Oryza sativa
  ref <308>: DATABASE ACCESSION NUMBER: AK067698
  ref <309>: DATABASE ENTRY DATE: 2001-12-06
gaccaagagagaaaaaaaagagagaataatttcccccttttctctcttccgtgccggagaatcgatggagattagggcgccgccgacgagcctgaggctcgcgccgccgccgccggcctccgccagcttccgccggaccgcgctcaggacctccttcctcaacggcagcgtttcacttagacttattcaagtgcgccaatcaaatgtcaacaggtttaagtgcaatggcataagaagtaacctccttgatagattttctagggttgtaaagtcctatgcaaatgcagtcttaagttcatttgaagaccctgaaaagatcctagaccaggctgttttggaaatgaatgacgatttgacaaagatgcggcaagccactgcacaggtcttggcttctcaaaagcggcttgagaacaaatacaaagccgctgaacaagcttctgatgattggtatcggagggctcaacttgctcttcagaagggtgatgaggatcttgctcgtgaagcccttaagcggcgtaaatcatatgctgacaatgcaagctccttaaaggcccagcttgatcagcaaaagggcgtggttgagaacctggtatcaaatactcgggttcttgaaagcaagatagcagaggctaagcaaaaaaaagataccttaaaagcccgtgctcaatcagccaagacttcaacaaaagtgagcgaaatgctggggaatgtaaatactagtggtgctctttcagcatttgagaaaatggaggaaaaagttatggcaatggagtcccaagcagaggcactcggtcagttggcaactgatgatcttgaaggaaagtttgcattgcttgagacttcatcggttgatgatgaccttgcacaaatgaaaaaggaaatttctggaagctcttcgaaaggagaacttcctccaggtagaacggcagtcagcaattcaggagcagcgcgccctttccgagacatcgagattgagaatgagctaaatgagctgcggaagaaggccaatgaatattagattatgcagtttccttgtccctgcaccaggcctgacgaatcctttagactgaagaaccccgggaagatataggatggtcttcaggtttctccaatgcccctttgttgaaccaccagtgcagccttttttccccccaagagtataatggatgcgtaaaaaaaattctacattttgcagtgtgattgacattgactgtacagttagctacatagttatgtaaaagtcatattgctctttctagagctgactctgcatattttagtggaaagccaaaaatttccgtcctcgtgc

SEQ ID NO: 17243 - DNA, 2440 bp, Oryza sativa
  ref <308>: DATABASE ACCESSION NUMBER: AK067699
  ref <309>: DATABASE ENTRY DATE: 2001-12-06
gactgaactcctcaccatcatcgagaggacgcgctgacactgctccgcccctcccccgctctaaccctagcgccgcggctcgtcgccgatcccgatcacctccgtcgtcgtcgccgctccgttcagccgctgcagccgatcgcaggactcgccctcgtcgcagaacactccaagatccgaccgcccttctccccgacctcgcacggcagtccgtcgtccgtcactcctctcttttccatggccgtgactagaccaccgctaggccgccgcctaccgcgcgattccggcgggcccggttgcgccgtgcccgtggaggccgggcgcaaggaggaggaggagcagaagcagcgcggaaggaggcacccgaggctgaaccggccgccatcgaggagtaggaggcaaaaaccagcaccgtagagtcagtgctcactgaagatgggcctgatgcccctttatttgacagtactggcataacaagatattttgatcctgggagataccttgctgaggagggaggatcatgtagttgtgagctatccaatgaaaaggcggaagaagccttgctttgtttgtgggttgtttggacacaattcaaagcagtgcatgcagaacttgctctgttttgggctgcactggtgtcaaggattttgaattagcgacaatggggaccaaaatcggtggcaatggggagcaaaatcagcagctgacatttgaccaggatacccacactgacaagcttcagcattggcaacaccaggcaaaatccatcgccctgttttcttgcaaatcatatggtagatgtaattacatatagtttagtggtagaattatagcatgatttattagttgggatgccagagcaattgccaataatcctggttagggagaaaaaaaaagctaatgcaagttttctatattgcaatagctgatttaaatgggaaaatatttctatgactgccttattgggctagctataccgataacttcgttgctaatgtaccattgctaccttggtagaacaccactgcaaaggcctggttattcaacatatggttttcttctccctgggtgaatatttctcgcctgttgacactttgctttactgacttttgataatactacaaatagcaccacttgcctgtattattttaattatcttagctcagctcacacctaaattataaagtgtggtggaaagaactacatatagttttttctaccactaaactcttgatgcattcatgcttttggccttgatttggcatattgataggaattgggctactaatgaaaatctcagacaatggtgtttgtgccaaatgggtcaacgtccttttctattgctgtgtaggttgactggtatgtacattcgatctattttcctttttgagtatggtacattgatttgtctgtgggctcatatgcttcaatttaatttccctataagtttggtttcctaatttcattacattgttctccatttgaagttcaaacataatgagccttggaatatggtactggtgtatacaaatataaagcattcctagagtactattcccaccaaccaccactcagtcaaatttcttccaatcttaccccaaccaccctcctattctcagttaggagggcaccatagtcttttctccttaaccttaatctctgctaaaaacctagaaatgtttatatttgggaacagagggagtagaggtgaccaaacaatattttatgccccttatccacccaatacaaaaatatatgcgacatacaccacgattgccaagtaaatacaggaagttgcaagagctgactgtagtactaagaaaatgtgaattgagttttccccatgttattttgctaaaattatgcttctttacttggatattttaatctttgcagttttggtgtgttttatgaagcaaggtcgaatacaagaatcaataggatgaaaattatcaatgcagtatccaaatctgttcctcaacctcacaaggttgaccttaacagtccaaacaggattattattgtgcagattgagaagattatatgtatggttggagtgatcgagaggtacacagtgctcgcaaagttcaatctaaagcagctgacctcaccaccgcagaagcagctaatgggccaacttgaattagattcggcagcagttagttgttggttgagccgtggcagtcactgttaaaagatcaaatgtactcgtatccatcgaaggccgcgacagttgtaaagcaccctgaaatattttgatgttgtgccgccaaactggcttccacggggactacaaatcgatctaaatctgccaattaaatctatattcattcagcaaaagcagttaaactatgaagcctaaaaagagagtttattactgttgttattttttcttttttcttcgaagacaaaaagagagacattcatggatgttacgccc

SEQ ID NO: 17244 - DNA, 2199 bp, Oryza sativa
  ref <308>: DATABASE ACCESSION NUMBER: AK099012
  ref <309>: DATABASE ENTRY DATE: 2002-08-28
gaccgtttgtcttgttggacccggagaccccacatatccagatctgcaagcttcctcctcctccttcctcctgatcctttagcttcctatatacgattccaccatcgaaggccagggcccagacttgcttgccgcaggttactgatccaccgaaggagggaggcgcccgcccgccgccatggccgaggtgacggtggtccgtgcggagcgcgaggaggagtccaccctggagcagggtctcctcgccatcccggaggaatccaaccaacttacatacactggagatggatctgtcgacttttctgggaatcctgttgtgaaggagagaactggtagatggagggcatgcccatttatcttaggtaatgagtgctgtgagcggttggcctattatggaatctccacaaaccttgttacatacttgacaaagaaactgcatgatggtaatgcttctgctgctagcaatgtgactgcatggcagggaacttgctacttaactccccttattggagctatactggctgatgcatactggggaaggtattggactattgcaacattctccacgatatacttcattgggatggctgtactgactctttcagcatcagttcctacattcatgcctccaccttgcgaagggtccttttgcccaccagcaaatccattgcagtatactgtcttttttcttggactttacctaattgctcttggtactggtggtattaagccctgtgtctcatcctttggagcagatcaatttgatgatacagacccagttgagcgaatccagaagggatctttctttaactggttctatttctcaataaacattggtgctctcatatcaagcagttttctggtttgggtgcaagacaatataggatggggaataggctttggcattccaacaattttcatggggctggccatcataagtttcttctctggaacatcactttatagattccaaaagccaggcggcagtcctattacacgagtatgccaggtggttgttgcctcctttcgcaagtggaacgtacatgttccagaggatagctctcgcttgtatgagttgcctgatggggcttcagcaattgaagggagtcggcaattggagcacaccgatgaactcagatgtctggacaaagctgctacaattactgatcttgatgtgaaagcagatagctttacaaacccatggcgaatatgcactgtgactcaggtggaagaactgaagatattggtaaggatgttccctgtctgggcaacgactattgtgttttctgctgtctatgctcagatgtccaccatgtttgttgagcaagggatgatgcttgatacatcagtaggtccattcaagattcctccagcatctctatctacctttgatgtggtaagtgtcattatatgggtccccctctatgatagtatcttggttccaatagctaggaggttcactggcaacccgaggggctttacagagttacagaggatggggattggtttggtaatctcaatcttttcgatggcggcagctgcagttcttgagattaaaaggttggacattgcaagggctgaacatttggtggatcaaaatgttccagtaccactgaacatctgctggcaaattcctcaatatttcttggttggtgcctcagaggtcttcacatttgtcgggtcacttgagttcttctatgatcaatcaccggatgccatgaggagcctctgcagcgcactgcagcttgtcacaacagctcttgggaattatctcagtgcattcattttgacattggttgcgtacttcacaacaagaggaggaaatcctggatggattcctgataacttgaatcaaggtcacctagattatttcttctggcttcttgctgggctcagttttctgaactttgtgatatatgtcatctgcgcaaacaaatacaaaagcaagaaagcagcttgagctaatcaggagttaaaagactgtcgtcatgggaatttcacttcaaaattctgtatatatgtgcacaaagtacatgttgaagcagcgaccgtaacaagagaactttaaccatcctgtactctgtatttgatgctactatacattttatactttttgttctgtagatattaatttattgaagctacttgtggaatgtagctttgcttccaatgcgtctacttaatctggtatatctgatt

SEQ ID NO: 17245 - DNA, 1122 bp, Oryza sativa
  ref <308>: DATABASE ACCESSION NUMBER: AK099013
  ref <309>: DATABASE ENTRY DATE: 2002-08-28
gtggcgagggaggaaggaaggaagaagagcaggaggagcccaacgcccgcgaaaccctagccctcgcgctcgcccaccgccttcctctccccccctaccctaccccgagctcgccacccgatccgatcgaagatgcataagctggggagaggaagccgcgacaaggtgcagcagttcatgaccataactggtgcgagtgagaaggtcgcccttcaggccctgaaagctagtgattggcacttggaaggagcttttgattttttctacagccaaccacaaatttctctgacgaactctcggcatcttgaagatctgtacaacagatacaaagaacctgatgttgatatgatcatggtggaaggtgtatctcagttttgcactgatcttcaggtggatccccaggatattgttatgcttgtcatatcatggcacatgaaagctgccacaatgtgtgaatttactcgccaggaattcattggtggactgcagtcaattggggtggattcaattgaaaagctccgtgagaaattgccatctttacgggctgagataaaagatgaccataaattccgtgagatatacaactttgcttttgcttgggctagggaaaagggtcaaaaatctctcgcactggagactgctcttggaatgtggcagttgctctttgctgaaaggcactggccccttatcgaccattggtgccagtttttacaggtgaggcataataaagccatttctagggacacatggtctcaactgttggaatttgtcaagacgatcgatccacagttatccaactacgacgaagaaggtgcttggccctacctaatagatgaatttgtggagtacctaaccgagaatggattcgttcagcttaggaagtgaacaatgggaggcccacattctcactacttcaaatacaatcatgattgggctgtacaaacgtgtgagattcatctcggtctatacagtgttcagggcttggccttggcgttcttgcgcaactgatcgcaaacagtggacatgtatccttacgtgatgacatttgctcgcgcaaggggacgatttgatttgggaagtggtgactgccattgtggaattatcacttacggtttatttaat

SEQ ID NO: 17246 - DNA, 2792 bp, Oryza sativa
  ref <308>: DATABASE ACCESSION NUMBER: AK067700
  ref <309>: DATABASE ENTRY DATE: 2001-12-06
gccctcgctctcgcccccacttcctccgccgccatggccaccgccgccgccgcgctcctccgcctctcccgctcccgccgcccgctcctccccctctcctccctccgcctcccgcctcccgccccgtaccaccaccactcccactcccaaaccccaccctcctcctcctcctcccacgcccgcctccccgccttcctctccttcctcgccgccgccgccgccgccggaggaacgaccgtcgccctctgcgactccggcatcgaccaccgggtcgggggcaaggagagcaccgagctggtggtgcgcggggagcggaagcgcgtgcccaacgagttcatcgacgagctcgcttccttcctcggggagaacctgacggtggactacgaggagaggcactaccatggcacgccgcagaacagcttccacaaggcagtcaatgtgcccgatgtcgtcgtcttcccgaggtcccaggatgaggtacagaagattgtgatggcttgtaacaagtacaaggtgccaattgtaccatatggtggggctacatcaattgagggtcacacgttggcacctcatggtggtgtttgcattaacatgtctttgatgaagaaaatcaaatccctgcatgttgaggatatggatgtagttgttgaaccaggagttggatggattgagctgaatgagtacctgaaaccatatggcctctttttccctcttgacccagggcctggggccactattggaggaatgtgtgctactcgctgttctggttcactagctgtgagtttgtaggtacggaacaatgcgggacaatgtgattaacctccaggctgttctacctaatggtgatgttgtcaagacgggttctcgagcccgaaagagtgcagctggatacgatcttgctcgtttgatcattggaagtgaaggaactttaggggtaattacagaagtgactgtacgtcttcaaaagcttccatctcattccgtggttgcaatgtgcaattttcaaacaattaaggatgctgctgatgttgctattgcaacaatgctttctggtatacaggtctcaagagtggaattgttggatgaggttcagataagggcaattaacatggcaaatggtaaaaacttacctgaagtaccaaccttgatgttcgaattcatagggacagaagcctatgctcttgaacaaacactattggttcaaaagattgccacagaacaccatggatctgattttgtttttgtagaagagctggatgctaaagaggagttatggaagattaggaaggaagcactttgggccggttttgccatgaaacctgatcatgaggctatgataacggtctgtttacttataacttgtcaacatatatttttttgaacaaaaaaatatattgatcaagcatagtcggtgtactttgatgttacacatcatgctacctgatgtttgattatgtagttgtgaatctcagcatcttccttcgtagttatcatcctcttcataaatgtgagaacaattatgatctcaaaataagtgctgcattcaggaggacaattggcaaccaaacatgcttacggctatgtaaatatgattggtcttgtatctcaactctttctttgaatcaagataggacttctccattagcaagctggtctatttaaatcttgtgagcaccatatttataggataaatccataatatgctactcactgtgaggatgacatgtggctcccgtatcatgtgcgtctatagattggacaactcaatggcataaaatggatcccccctcccccttctgatttttttttatctcatatgcttatatagatcgtccaaaggtcgtcacaatcatcatacccttacaagctttcaattttcagtggactgactctatcaagtcatctaatgccacatatatgtttatttatgcaggatgtttgtgttcctttgtctagacttgcagaatgcatatctgtctcaaaggaaaagcttgatgcatcaccattgacttgtttggttatcgctcatgctggtgatggaaacttccacacaataatcctatttgaccctagtcaagaagaccaacgacgtgaagcggagaggctaaaccatttcatggttcatactgctctctctatggaaggtacctgtacaggagagcatggtgtaggtacagggaaaatgaagtacctagagaaagagctgggcatcgagtcgctaaggacgatgaaaagaataaaggctgcgttggatcccaacaatatcatgaatccagggaaactgattccacctcaagtctgcatttgatgatacagacgttcccaagttgctggctgactcactggctggttcagtgacttccactcaactcccagtccagcaaggcaagtcgtggcgttaccactgaatgcgcattgaacggcgaagactcaggactgttatacacgagttgaatgcaaaaataaacgtgaacgctagaactgttactctgagccattcatataccgggaataaatgagcaaaacttcgttccagttgctatatgaaatatgagtgattctatgataggcttggtgatagaaaattctaagctatttcaaatatttggagctaaacaacgtagtagtagatgtttggtgaattgaagatttgccacgttagagctgataatatgatttgtcactcatgtgtctatgatatactagaccagtgagtgttgcgtgagttacttggagtagggtaaaaaatgttatggatttttctgtccggctatcgttttccttttataccc

SEQ ID NO: 17247 - DNA, 2880 bp, Oryza sativa
  ref <308>: DATABASE ACCESSION NUMBER: AK067701
  ref <309>: DATABASE ENTRY DATE: 2001-12-06
ggcttggctgccaccgccgcgcgttgacggttagacgccaccgcgggaggagagcccctccctccccgtccgcgtccgcgtccgcctcatctccgccgccctcttactccccctccccttcctccactccgtccacctcggaatcgtcggcgcgacgcctccaaacccccgcatcgattcctccctcccacctcaccccacccttccgcccgctcgatccaccgccgaagcgggcggcgatggcgacgccgtcgtcgttttcgtcggcgaggaagaaggcgccgagcccgccgaagcaccgccacgacggcacctccgggctgccgttcggcatggactggagcccgcccccgaagagatgggagggaaggaacaccatatggccacataaccctcaaaccggatggagttactgtgtgatgattccttcttggatcgctcagacacctgaagctagtgcgactgctgacaacttcttgaaatccatagttttttacaggatacatgttggtatacaatctccagaaggcatcagctctagccacggagttcttcgaaggtttagtgactttctaaagttatcttctgatcttaagcaggaatttcccagaaaaggaatcccccctgctccaccgaagcatgccttttcaagaataaattcaagcagggtgcttctagaagagagaaggaacgctttggaggagtggatgcaaaagctactttctgacattgagttgtcgagaagtgcacctgttgctgcttttcttgagctggaagctgctgcacgctcatattaccaagattggaatcagcgcccttctgaagtgggttcttcagcaaaaagtagtgcagattcttctccgcgtcctgatgaacatggttcaggtgttctctctgagtccagtcaaatgaattcagcctttgctcatggtaacggtccgacaggagcaactggtaatggtatgctgggagagtctatcttagatcagcccaatgagcgggctagtagcatgtcaaatcacaggaaaaagaaccatgtctttttggaacatggtgttaggaatggttccatagatacttataagggagtggtttccgaagaggatcacgattctaaccctggccatgccaggaaggactctgctgaaagtataggaagtgatttgagttctttgaggggcagtgaattatcggttcctggagttagtagttccctttgggatggtcctgtggatcttccaagtggaattgatggacatagccaaacagaacaatttacaggtttagatatgcagcttttatatgatatggatgcacaaatcatccttcctgctgatcaaaggccgaagttgactagacttttgatcagcatggacagaagacaggtgacagcaaaaactgatatggaggatctcatagcacgactaaatcaggaagtggctgtcaaagaatatcttgcgacaaaggtcaaagatttggaggttgagttggaagctacgaagaaaaaagacaaagagattctacatcaggctgttttgaccgaaagagagaaaattacccaacttcaatgggataaggatgagctctacaggaagtactctgaaatggagtcaaacctgaagattgaacaaaatgagaaaactcgtgtgcagtcagagaaaacaactgctagcggtgaaaaagaaatgttactggaagagctagaaactaaacgaaaagaagttgagagtttgcagcaacatattggagaattcgaggcaaagtctaaagcagatataaaagttcttgttaaagaggtgaaatctcttcggaactcccaaaaagagatgaagaaagtgctgaatcagtatcatgaggagaagactgaattagagaggattgttaacagggagaaacagcggtcaacacgtgcaaggttctcccgtgaaaaaattcttcacgaatgcagactgctccgtgagcgtctacaggaatgtactgccaagtttgttgcagatgagcaagacactatgactattgatttatcatctttgcctgatgctttagatcttgtgacgacatcagacaatagaatacgtttgcttgttgctgaggctcaacttctgtcacgagatgatgaacagggctcttctgatgatggtgataattctgatggtaaatcctcagttaccatgagcagtgaagatgcatatgttactgatgaagagacaacaaaaatgttatctgatctgcttattgacaatgcacaactgaggttgcgcttgaattctctcatccgtaatgctgtaatactgctgtgaagacggagaaagaaggtagtgatggaaccgtgccaaaaaagacggtgcttaattggttattggacagatagaaaaaccagtatatattcttgtgaattagctcttctagttatgcggccttctcaaagttatatgatgagtattgttataatgtgggagtaacaggagtggagaaaaaaaaatcaaaatcttccttacatgcagatcaagcatgtggtggtgttgtatctcttatttacaaagattgatcaaggataatatatttaggaggcttctgagcctggcctcctagcgggagaacggtagggctcatatggttttggggaggcttgcaactggagtggtagagaacatgggtcccccttttttgcaccatacttcaatttgtaattgccgagctgatggatagctgcatggttgtatctttgtacagatgtttcagatggtgagttcccagcaggaaagcattgtacactatagttaaactctggattaatcttcttcacccatagagtgctcaactgttaaatcagtacttcttactcatgcagttgcacctcttccagactgaaaacttccc

SEQ ID NO: 17248 - DNA, 1734 bp, Oryza sativa
  ref <308>: DATABASE ACCESSION NUMBER: AK067702
  ref <309>: DATABASE ENTRY DATE: 2001-12-06
gttagatactagatcagcagcgatttttttttcagtttttgttttttcatttcttcctctgtcttgtttagatgttggggttggtgagcccttggggggaatcagttggtgactgactcgagaagttcagagttcttgttcttggaggggtgaggaagaggaggaggaggaggtgagatgggtagcttcgggaggctggcgaggagggccgtggagacggaagcgccggtcatggtcaagatgcaggaattgcttcgagggaacaaggatgtgatgtcgcttgcgcagggagttgtttattggcagcctcctgaggcagctatgaataagattaaagaaattgtatgggaaccatcaatcagtaaatatggctctgttgatggtcttcctgaactccgagaagcacttctcgagaagctgcgcagagagaataagctaaccaagtcgtcaattatggttacctctggtgcaaatcaggcctttgtaaatgtggtcctcaccctttgtgatgctggggatgcagttgtcatgtttgcaccatattacttcaattcctacatgtcattccagatgacaggagttactgacatattagttggtgcaagcaatcctgagactcttcatcctgatgtcgattggttggagaaggttctgcaagaaaacaaccctatccctaaacttgttagtgttgtaaatcctggaaacccctctggagctttcattccgaagccgatgctcgaaagaatttcagaactgtgcagaaatgctggtgcatggcttgtagttgacaatacctatgagtactttatgtatgatggaatggagcactattgcttagagggtaatcacattgtcaacctcttctcattctcgaaggcttacggaatgatgggctggcgtgtaggatacattgcccacccaaacgaagctgacggtcttcatgcacagctgctcaaagtgcaagataacatacctatctgtgcttccatcatcgggcagcgcctggcgctctacgcattagaggctggtccagaatggatcagagaaagggtgagagatctagtgaaaaaccgtgaattgctcatggaagcgatgtctccgcttggcaaggactctgtcaagggtggtgagggtgccatttacctctgggcaaaactacccgagaaatgctcagatgattttgaagttgtcagatggcttgcaaacaagcatggtgtggctgtgatccccgggagcgccagtggaggtcccggatatatccgggtttctttcggagggttgaaagaatcggatacaaggcttgctgctgagaggttaaggcgcggcttgcaagaacttgtgactgagggaatggtacagtgacagcccaatggatgcaagaaatacatgacatacaaatcacaaaagtgaaaattttcagttacataataattctgggattagttcaagagaagaaaagagccaaaatttcaagattacaacatggttgttagaaaatgctgaagcttttatttcagagaacttttgtcacattggatttcctagtggaaatttgatttggtgggttgagtagagggaaaaaaaaagactcatccaccctgtggaataccattgtcattaaaggggtattcatgtttagtacttactgttgcttgataacctctttccctacaatcaggacagcagctgtacacaagtaagatataataagatataatagcaacaataagtgtt

SEQ ID NO: 17249 - DNA, 882 bp, Oryza sativa
  ref <308>: DATABASE ACCESSION NUMBER: AK067703
  ref <309>: DATABASE ENTRY DATE: 2001-12-06
gacctggcgcgccgaagcttctctcctctctctcaactccggcgagaggaggaggcggcggtggggcgttcgtcgggagagagaccagggccggggggctagggttcggccgttcagagaggcggcggctgaggaggaggaggaggaggaggagggggtgaggagagatgtcgacgccggcgaggaagcggctgatgcgggacttcaagcggctgcagcaggacccgcccgccggaatcagcggcgcgccgcacgacaacaacatcatgctctggaacgccgtcatattcggaccggatgacacgccgtgggatggaggcacgttcaagctgacactacaatttacagaagattatcccaacaaaccaccagttgttcggtttgtctcaaggatgtttcacccaaatatttatgcagatggaagtatctgcttggatatcctacaaaatcaatggagccctatatatgatgttgctgcgatattgacctctatccagtccctgctctgtgatccaaacccaaactcccctgcaaactccgaagcagccagactgttcagcgagaacaagcgcgagtacaaccgcaaagtccgcgagattgtggagcagagctggacggccgactaagccaaggacatgattgagttgcagtttctgcaacaagcttctcctaaagatatgcaattctggctttcccggtctgtatcacctactaaaaacataaaaaatcttcagttgttgtaattcctgagcttgatcccctgccttcccctacttgttttcccaatgtagtggctacctatttgatgaatttataaggtattgatgcttatgtaaagaattatactccctagccaagaagttgctgttgctgctaggttgc

SEQ ID NO: 17250 - DNA, 2599 bp, Oryza sativa
  ref <308>: DATABASE ACCESSION NUMBER: AK067704
  ref <309>: DATABASE ENTRY DATE: 2001-12-06
gagggagaaaaccaaaccctagctcgctggctggctggctggatcccaatctcccatcggcgccggcgccgcggctcgctcccccctgtgctgcctgtggcggtgggcacgtgcagtctgcgctgcgtcagctctcgccgcggctcggctctccggcgactccttcggctcgctccccaagaccctgacgacgcgctgtccgggatggcggccacctcctctgcccctgcccagggagccaagcccaagaagaagaccatgaagtccctctacctccagttcttcgatactgcccccgatggcaagtcccgcgtctgcaagctctgcaagaagagctactgcatgaccactgccaccgggaatcttgggaagcatcttaataaccgccaccctggttactgccaactttctgagggtgaagcaactcaaagtacaacgcctaccagcatggtttctcgagccaaaagatctcaacccctagcgcgaactcgatcacaagctcaatctcagtcccaagttcaacctcaatcccaagttcaacatcaacctcaacctcaaactgtatctaaagttcgtcatcaacctaaagcgaaaccagcaattgatattgaccatgtcaactggttacttctgaggtggcttatcagctcctcccttccaacttccaccctcgaagatagtatgcttatcgacagttgcaggtatttgaacccgcctgtccagctatggccaaaagaaaaggctcatgaaattgtccttcaagtgttcagaagcatgaaggaggatgttaaggcatctcttcagtgcgttagctctcggttctccattactcttgacttttggacttcttatgaacagattgtgtacttgtccgtcaagtgttactggattgatgaaggctgggccttgcggaaagttttgcttgatgtctgccgtatcccatacccatgcactggccctgagattctgcaagttctaatgaatgtgctgcacgagtttaacattgattcaaagatccttgcttgcacacataacaacagccaacatgcaatccatgcttgtcatgagctcaggcaggagcttgagtcccgtaaacttcctttctgttacatcccctgtgctgctcggatgctcaagattatcataaaagatggcctggaaaatgtgaggccagtattgtccaagatccgtgaatttgttcttgagaccaattcaaaccaggacatgatggaagattttatgcactggactgaagtttatcaagaaggctcatggaaacttccatttgaccattcatcaaactggagtggtgattacaatatgcttgatgtggtaaagaaggtaccatacagctcatacttcgtataattcattttccatcatgctctatgtctttaatgcccatttaaatgaaaacaaaacctttttcatccaggcccctaatgcaatggataacaccatcaagaagtttgaaggggtatttggaccaagggactgggttctgagttccacagagaagtcagccgtcaactcattgcactcgtaccttgagcccttctacaaaactaccaccaacctttgtacttgcaaaataccaacagttgggctggtgttcttctttatggaccatgttattgaattgatcaatgtctgccatgatagcacccgtcaggattggctcaagaaaatcgccagtgacatgtctgagacagctcataacttcgcatctcaagcttacaatatctacacgttcacggcagcaattcttgatccaagaatcaaaggagagcttatccctgaaacccttaactcaactagcaacttggaggatgcaaggaaccaatttgtcagggactacagtagcacctttgaagctgttgggaatggctacaacacccaagacaccactgacggcggtgatgcattttcctttgctgaagagattgtccgtaaacgccgtcgtgtgagtatgatcactgctgctgatgagctttctcagtatcttgctgagccccctgcaccaatttccactgatgcccttgaatggtggaagggtcactcctcccgttacccacggctctctttgatggctcgtgattttttggcgatccaagggacctcattagaccctgaagaattgttcacgagcaaaggtgacagcatgcgcaagcagcactactgccttcctctcagtagcattcaagctacaatgtgcgtaaaatcgtggatgcagagtgggcaccagttcaattttcaatcaaccattattgatttcgagagattggtcgaatctgctgttgctcctgatgctgtagatgctcctgagttttcatgaatgaatgaccgtaaattcagaatctagatcagttttcactgtctttgatgtttatgtttgtagtggtctctaacaaaatcccagagtgagaaccatggagagtagcttgtgttagaatcatgacattaatgaatttaactcaatgtctccgggcagttgttttaatattgtagcgttattatgttggtacttccgtgggtgaccaaaactaaagctaaatgtatcaggtaatattgattgtagtttgtccagaaattatttgcc

SEQ ID NO: 17251 - DNA, 2525 bp, Oryza sativa
  ref <308>: DATABASE ACCESSION NUMBER: AK067705
  ref <309>: DATABASE ENTRY DATE: 2001-12-06
ctccgttcccccctccactttccccatctccgacacctctctcctctccgatttactcctctcctttttgccctatcgccttggcgatagggttccgcttcgctgctgcagcagcggcgtttcgcctgtaaatgcttcttgttgttgttggggggaggggtctcttttaggtgattgttcttgttcttcttcttcgacatggtggctttctatggactcggagatggagggtgtctcgtgtcggcgccggcggagctggccgggatgttctgccgcggcggcgtggtggtgcagcagcagcagaggaagcggtcgctggtggccgcgtcggcggtcgcggcggcggactgcgtcgcccgcggcagccccaacctctgctcgctcgcgctgtgggatgtcccgctcgtcaccgacgccggcctcgccgagatcgccgccggttgcccctcgctggagcgcctggacatcacccgttgcccgctcatcacagacaagggcctcgccgccgtcgcgcacggctgccccaacctgctgtctctcactgtcgagtcgtgctccggtgtcggcaacgatggcctcagggcaattggccgatcttgctccaagattcaggcattgaacatcaagaattgcgcgcggatcggcgaccagggcatctccagcctcgtgtgctccgcgaccgcctcgctgaccaagatcaggctgcagggtttgaacatcactgatgcttcgctcgccttgatcgggtactacgggaaggctgtcacggatctcacccttgtccgcctcccggtggtcgcggagagagggttttgggtgatggccaatgctgccggcctgcagaatctgaggtgcatgagtgtcacctcttgccctggggtcaccaatctcgcgcttgctgctatcgccaagttctgcccgagcttgaggcagctttccttcaggaagtgtggacacatgacggatgccggtctcaaggctttcacggaatcggcgaggttgttggagagcttgcagcttgaagagtgcaatggggttactcttgttggtattcttgatttcctcgtcaactgcggtccgaagttcaggtccctctctttggtgaagtgcatgggtatcaaggacatctgctctacgcctgcgcagcttcctctgtgcaaatcgcttcaattcctgaccatcaaggactgcccggatttcactgatgcaagcttggctgtggtggggatggtttgcccttacttggagcaggttgatttgagtggtctccgtgaggtcactgaccgtgggcttcttccactgatcaactcttccgagggtggtctagtcaaggtcgatttgagtggttgcaagaacatcacagatgcagctgtttctaccctggtgaaggggcatggaaaatctctgaagcaagttagtcttgagggctgcagcaagataaccgatgctagcctctttgccatctccgagaattgcactgagcttgctgagctcgatctgtccaagtgcatggtcagtgacaatggtgttgctaccctggcatcagcaaagcacctcaagcttcgtgtcctgtcactgtctggttgctcgaaggttactccgaagagcgtgtcattcttgggcaacatggggcagtctttggagggtctcaatcttcagttctgcaacatgattggtaaccacaacattgcatcgctggagaagcagctctggtggtgcgacattctcgcataggcagacaagatggttcattgctggagggtgtcacctgtgcttgggtgaggcacctccagatgcagatatacatccttagaggtagcgcaaccagtcaattgctgtgctagtcatgtttttggctagtgcatgagtcatggtgggttctggatttgttcgaggaccggttgtttccgaggggtgctttccgccaagtgctcgttttttcacagactgcctcaagaggcaatctgttttttgagccttcggctgccattgctggcattctgccccctctacccagacattggtccttgccgctatagtcacaacaccatgattgttttttaggttgccgtagtgtcccttgtccttttttctttactgcttgcttcctagtcatgaagttgcaggcaccggcatcggcacaggggggctgtcatggagttccgcagctcaactgccggtgtcaccagtagtcggcagcgccggtgttccaggctgccgacgacgctggagtgcctgcagacttaccctgtgtgtatggttactgagtctgttggtgtcttgaggtcatgtgtgatgatgttttcggtagtgtgtaagggtcatagagggttgattttttgttacaggtactcttgggaatgcctggtgttgggggatctggccattgcaaggcgcatactagagccttgtcatgacagccttgtatggttgttttttcaccagatccctgtttttaccggcatattgttgaggactgtaatctttgcaaccttctcagaataaattaagtatgtgtttatgtg

SEQ ID NO: 17252 - DNA, 2167 bp, Oryza sativa
  ref <308>: DATABASE ACCESSION NUMBER: AK067706
  ref <309>: DATABASE ENTRY DATE: 2001-12-06
gctagggtttcttcgatccacttgacgccgcgtcgcaggcactcctcgtcttcctcggtcgaagaaaagcggcggcggcggcggcggcggcggaagctgccgccttccttcaccccaaggcccaacagatcgaggacgctgacattatgttgcagctacctttctcccccaaagagagttggagttcaccagtcaattcagccattgggcacgtgcggaaaattaggaggagggctggtcattttctctcaagaagctccaagaataaggctgctcacagtaaggggggacagacaaccaagtcattgatctcaggcgacttacattcgggctctattcaagatgtctgggctactctcagcgctgaagttgcatcaaaattgtctaaaagcgttgtttctctggctttgtctgatggaaacataccgatatatgcatgctcaggcacagctatcagttgccaggaggggtctggtacaatttttctgacttcggctagtttggttagagctttctatgatactgaagaaatttatgataacttaaagattgaagtgcgccatgaaggcaatgaagtgtacaagggttatttggcaaaatatgatttagacaagaactttgctgttgtctacaccatggagtctcttggtgttcatgttgtactttccgaacatttgaaggataggtatgccaaaaagaagctagtagctgtatcgcgtaacaagtatggcggattaattaccaaaagtgtgatggtgggtagtcatcataattcaaacagatctgaagtttgccatgacatttcggtgatggctgaggactgggaaggtggacctctctttgactttgatgggaaatttgttggcatgaataagtttttggctatggatacaacctttatcctgtcatggatgtcaattctcattatctttaagcattatttgccaaccctgcaaaacaggattcttaaacggttacaaaatttgaaaagagtcagggatggagagggaccgggtgagctatctgactgtcatccagaagttcatagaggtggtctcgataaggaacacgttgagtatctaaactccttgggttatcccaagccaccagtaaacgtgttagatgatggcttgatattggcttattcttttgaggagaattttggctttgtatatggtgaagtcattaaaaagtttccttgtgacatacatcaaagtgttgttgcacttgcttcattcaaaggagaaaggagatttttcgcatgcacgggtttttttatagaatggaagggatgtacaattattctgacatcagcgagcttggttgcagagtctggtgacagaaacaagattgatgaaaacttgaggattgaagtgttgcttccaaacgaacaacgcagacaaggaacattacagcattatagtttacactacaatgttgctctagtcagtgtcaacgacatggatttccatgctcgtccagcaaatatgaagcttgacaatgagtgtccacctcaagtagcagctctagggcgttgcttcgaatcaggcaaaataatggctgtatgtggggatttggttgactggactggcacacttgattgcaatttccttatacgttcctcatgcaaaactactaaggctggaatcggaggacctcttattggtttggatgggaaagttattggcatgaacttttatgataaaaaaataggaaccccttacatgccatgggatgtaattcttaaaattctggcatgttttgagaatgaaagtagtgctgctgaagttggcaatggtagtgatccatctgatgcgcctggctggaaaatccctggagatggcagtgtcaagctaaacaggtggcctgtgcccttgccatattggcgtcctcatgacgatgtggaagagcaagaacccccagagggctgtgaataccagtgcacatacagaaatggtgaaagatggtgctaccggtagaatatgttcgttctactcctctctctctctctctctctctctctctctagtagccctgtaatgttactacatgtcccttgccgtgttttgttttggtgtgtatcgcactgggagttgaagaacattcagctatggtgatgctgagatgttaaatacaatgttaagtaaaagtagcgtgtctatcttgg

SEQ ID NO: 17253 - DNA, 1946 bp, Oryza sativa
  ref <308>: DATABASE ACCESSION NUMBER: AK067707
  ref <309>: DATABASE ENTRY DATE: 2001-12-06
acccagaaaagaaacagagagatctcccgtctcgtcgtctcctccgctccttccgcctccccaacacgagtcgcgccgccgatctcagcaggggaggggaggggaggggatcctggtgagcaaatatggatggactggtagagaattttgacgcagatgatctcggcgaaatgcctcagaatcattataatgaagaacaactgatcccctacagcgatgtgtcacatccttacaacgaagaacccgataacatggacaacgtagaagaggggaacccatacattcagcaagtgagtttgtacagtgaagaaccagagaatcagtacaatgaggagccatcaaacccttatcaggaagagtcggataatgcatacaatggggaagtgaagcaacaggatagcttgccggtagaggctgataagaaatggcctggttggccaggagagagtgtttttcgtatactgatcccagcccagaaggtaggtgctatcattggccgcaaaggggagtttatcaaaaagatgtgtgaggagtctaaagctcgcataaaaatacttgatggcccgcctggtgtaccagaaagaacagtaatgatttcagcaaaggatgagccagatgcacctatatctccagctatggacgggttatttagagtctataaacgaataactgatggttcagatggtgattctggtcaacctgaaagaaatattagtaatgtaggaccaacacgactgctagtaccagcttcccaagctggcagccttattgggaaacagggagcaaccattaaatccattcaagattcttcaaagtccattgttcgtattgttgagactttgcctcttgttgcactaaatgatgatagagttgtggagatacaaggtgagcctgttggtgtccagaaagcactggaatcgatagccagtcacttaagaaaatttcttgttgaccgcagtgttcttcctctttttgaagggcaaatgaaaatgcacaatgcacagagggaacaagcaatggcagctcctcagccttggggcccacctcaaccttggggccctcctccaagccacctccctcctggtggtccaggttatggtggacatccacagttcatgcccccaaggccgcaagacaattattatcctccccctgatgtcccctctatggaaaagcagccacactacggtatttctgcctatggacgagaagcaccaactggtgtttctgcttctgggaatcaaccaccatcacatgtggcttctcaggttacacacaacatgcaaattcctctctcctatgctgatgctgtgattggagcagctggtgctagtattagctatattcgtaggcacagtggtgcaacagtaactattcaggaaagcagaggtgcacctggggagatgacagttgagataattggtagtgcatcccaagtccaaactgcccagcaactagtccagaatttcatggcagaagctcctcagggccctcctccgccagcttctaaccctccggctccagcagttgatctgagctacggttcatacccaccaccatatggcgcatcctacggatcggctgcttcaggagcagggcctgcacctcacaatggaggcagctacggtggcaccacctacccaagctatggatactaagtatcagcaacgctcagcttagctttgtgtcggttgatgaacagtagtacatttttgctgccgaataatgacaatcctggattcctcagctgcgactaccttaagctcttagtttactttttctactctttttgccgtgtgtatgcccaaccagtttacttttggaatatgtttattctcgtgatctggattagttatatagtaatccgatgctgccctttgtcgtcggaaacaagtggttgactgtctttaaactcgattttggggtggaaagtgctgaaatttacc

SEQ ID NO: 17254 - DNA, 2031 bp, Oryza sativa
  ref <308>: DATABASE ACCESSION NUMBER: AK067708
  ref <309>: DATABASE ENTRY DATE: 2001-12-06
gtctctcctctcatccacgtaaaccaccctctccctccctcgccgccggtagccgccaccaccgccgccgccgcgaacttccaatagatcgccggctcgccatggctctacgccgagccgcctccctcctcctccggccacggctccgagctcccgttccgatccccacacccaaaaccccaaaccctctcctcctcccgccccgccgccacttctcccagctcccgccgcctccagtccccgcctccgcggccgccgccgccgcggccgttgcggaggaggcggaggaggccttcgaggcggcgaaggggaccaaggacctgctcgccgccttctcccgcctcgaggccgtcatgccgccctccgacaagcgcctcgccctcgcctgcatcaagctcggccagcacctcgaggcctccggcgctgccgacccctcccgcgtcctcgccctcgccctccgatccctcggcatcctcgaggccacccctaactccgccacctcgacgacggcctcccactccgatgccgtctcgctcgccatggccctccacctcgccggctccgcctccttcgacctctcccgcttccacgacgcactctccttcctcacccgctccctccgcctcgtctccccactcctcccctcctcctcctccgccgccgccgcctctggtgacgacgacgctcaagggttcgacgtgaggcccgtggcgcacgcggtgcgcctgcagctggccaacgtgaagacggcgctggggcggcgggaggaggccctagctgacatgcgtgcgtgccttgacctcaaggagtccatcctgccgccgggtagccgggagctcggcgccgcgtaccgggaccttgcggaggcgtactccaccgtgctagatttcaaagaggcgctcccattgtgcgagaaggcgctcgaactgcatcagtcgacgctaggcaaaaattcggtggaggttgcgcatgataggcggctgcttggggtgatatacaccggcctggagcagcatgagcaggccctgcagcagaatgagatgtcacagaaggtgatgaagagctggggcgtggctggcgacgagctcctgcacgcggagattgatgcggcgaacatcaagatcgctttgggcaagtgcgacgaggccgttactgtgttgaggaatgtctctaagcaggtggagaaggatagcgagatacgagctctagtgtttatatctatggcaaaggctcttgctaaccaggagaaggccggtgatacaaagaggtgcttggagattgcttgtgacatactggagaagaaggaattggctgcaccagacaaggtggccgaagcatatgtggaggtatcctcactgtatgagatggtgaatgagtttgacaaagcgatatcattgctgaagaggagcttggggatgcttgagaggatacctcaggcacaacacatggaagggaatgttgcggctcggattgggtggctattgcttctgacagggaaggtgtcggaggctgtcccatacttggaggatgcagtggagaggatgaaggacagctttggaccaaagcattacggggtagggtatgtgtataacaatttgggggctgcatatatggagatcggccgaccacagtctgctgcgcagatgtttgcgcttgcaaaggaagtcatggatgtttccttggggccgcaccattcagataccatagaggcctgccagagccttgccaatgcatacaacgcaatgggaagctatgctctggctatggagttccaaaagcgagtggtggattcttggcgaaaccatggtcccagtgctagggacgagctcaaggaagctattcgtctctatgagcagataaagataaaggctctttcatgcctatcgcctgaaaattcagcaattgcattgcctgaacctctggaaaaggaggttgattctgattctaccagagttgctcaacaataatttcaaagtattgtacgcatcagtttttctatcaatatatgattatgatatgttgtttagtagg

SEQ ID NO: 17255 - DNA, 1832 bp, Oryza sativa
  ref <308>: DATABASE ACCESSION NUMBER: AK067709
  ref <309>: DATABASE ENTRY DATE: 2001-12-06
atgggggacgaggtggggagaggccacttcggctacacctgcgccgcgaagatcaagaagggggcgcgcaagggggacgcggtcgccgtcaaggtcatccccaaggccaagatgacaacatccattgctatagaggatgtccgaagggaggtgaaaatattgaaagctttggcgggacacaagaacttggttcaattttatgatgcctatgaggacaatgacaatgtgtacatagtaatggagttgtgtgaaggaggagagcttctggatagaatactttccagaggtgggaagtactctgaggatgatgcaaaagcggttctggtgcaaatattaaatgtcgtttcattttgccacattcaaggagtggttcatcgggatctcaagccagagaattttctatttacttcaaaagatgagaactctcaacttaaggctattgattttggcttatcagattttgtaaaaccagatgagaggctaaatgatattgttggaagtgcttattatgttgctcctgaagttctgcacagatgctatagcacagaagctgatgtctggagtataggtgtaattgcatatattctcctttgtggcagtcgtccattttgggcacgcactgaatctggcatattccgttccgttctcaaagctgaccccagttataatgaggcaccttggccttctcttactctggaagcaatggattttgttaagcgcttgctttgcaaggatccacgtagaagaatgactgcagcacaggctttaagtcatccatggatcagaaattacaatgacattaagctgccactggacatccttatattccgacttatcaaagcttatattcgttcctcatcattgcgaaaagctgctctaagggctctatcgaagactttgactgttgatgagcttttctatctgaaaggacagttttctctgttggaaccagacagaaatggatgcatcactctagataatatcagaatggccttaacaagagaagccacttatgctatgaaggaatcacgagttcaggagattcttgtctcgttaagcgctcttcagtacagaagaatggactttcaagagttctgtgcagcagcagttagtgtgcaccagcttgaagcattagatagatgggagcaacatgcccgttccgcttatgatttctttgagaaggatggcaatcgagctatcgtaattgatgaactagcttctgaactgggtctcagcccttcagtgccattgcatgttgttctgcaagattggatcaggcacaccgacgggaaattgagtttccttggatttgtcaagttattgcatggcatgtccagcaggtccttgtcaaagatgagatagctgttgatactctctaacgacagcacaaatttatgctgccctagcgcgagctgaatcggtccagacaagtttacaaggaaacatcgatcatcgatcggagtccaccgaccgaagataacagcttgtgctagcagtccttgttttctcactaatttgagtatagagttcagtttgttgtcgcctgcctactgatcaccaccattttagttgataggaaaatgaaaaacctcaccccatgtctgcaacatgtgatgtctctaacagtctttaggatagccatcctgttcagttgttgggactgtcccagttgtgttgtaaaattccctggttcctctggaactggggcgaagtcgcctgctgttaaggaagtaaggatcctgatgtccaagagggtggtttaatgctgccattgtcaagtgtgccgttatactgattcagaatgaaaaaaatgtggtatttttttggtgttc

SEQ ID NO: 17256 - DNA, 2031 bp, Oryza sativa
  ref <308>: DATABASE ACCESSION NUMBER: AK067710
  ref <309>: DATABASE ENTRY DATE: 2001-12-06
gaatggcaccggccacctcatgtccctgctcgacgccggcaagcggctgctcggctgccgcggcggcggaggcctctcgctcacggtgctcgtcatgcagccgccgaggaaggagtatgcgtccgccgtcgccgccaccgtgcgccgggaggaggcatcgggcctcgacatccgcttccgccacctccccgccgtcgagcccccgaccggctgcgcgggcgtcgaggagttcgtctcccgcttcgtgcagctccacgcggaccacgtgagggcggccgtctccggcctggactgcccggtggccggcctcgtcatcgacttcttttgcacgacgctgctcgacgtggcccgggagctcgccgtcccggcctacgtgtacttcacctccaatgccgcgtgcctcgctctcttgttgcgcctgccggcgctggagggggaggtcaccgtggagttcgaggagatggacggcgaggtggacatccctgggttgccgccggtgccgccgtcgtcgctgccgatgccggtgatggacaagaagaacccgaactacacgtggttcgtgtaccacggcaggcgtttcatggaagccaacggcattatcgtcaacacggtgcgcgagatcgagcggagcgtccttgccgccatcgccgacggccgcgtcacgccgggagtccgtgccccggtgatccatccggtaggcccggtgatctcgttcaccccgccctccgatgacccgccgcacgagtgcgtgcggtggctcgacgcgcagcctccggcctccgtcgtgttcctctgcttcgggagcatgggcagcctcgcgccgccgcaggtgctctaggtggcgcacggcctggaacgcagcgggcaccggttcctgtgggtgctgcgcggcgctccggccgccggcggcagcatgaatcccaccgacgccgatctcgacgagcttctcccggagggtttcctggagaggacgacggggagagctctcgtgtggccgacgtgggcgccgcagaaggagatcctcgcgcacgccgccgtgggcgggttcgtgacgcacggcgggtggaactcgacgctggagagcctgtggttcggcgtgccgatggtgccgtggccgctctacgcggagcagcacttgaacgcgttcacgctggtggccgccatgggcgtggccgtggccatgaaggtggacaggaaacggaacaacttcgtcgaggcgtccgaggtggagcgcgcggtgaggtcgctgatgggtgggtcggaggaagggaggaaggcaagggagaaggcggcggagatgaaggccgtgtgccggaaggctgtggaggagggtgggtcgtcggacatggcggtgcacaagctctacgaggagctctccacgcagacggcttaaaatactactctctctgttccgtttcaggttataaaatattttgacttcacttaaagttaaattatttaaaatttgattaagataatagctgctgcatgaaccgggagatgaagtcctcgccgccgcggaagtccgggagctcctcggcggggaggcagtggaaccggacgtcgaagccggagtgctccgacgcgccggccgcttcacggcggatgatctcgtcgatctcgggcgcgcggtgggactccggcagctgcgcgaggagcacggtgggcgacatggcgccgcggccgtcgtcggcgttgccgcagaagccaacgcggagcatccgcttgccgacttccagcatgggcgtgaggtggccggggacgcagaacgggatcagcaccaccgtcgctgggctcgccgtggctggagccatagctcacagattacgcgcgggaagcaggccggaaacgagattgtgttgcgtgctttcgtgaggcttacagcgtttcttctttcttcttttcgcgtgcacatggggtgcctcaaatggggatgtctaacatgaatgaacagacactgatcggccaccggccgcgtcactaatgcactgtttggttggttggttgtctaacattcaaatattcctggct

SEQ ID NO: 17257 - DNA, 3857 bp, Oryza sativa
  ref <308>: DATABASE ACCESSION NUMBER: AK067711
  ref <309>: DATABASE ENTRY DATE: 2001-12-06
gtatccgatcagacgcctagtttagggtttcagagctttctccccacctctcccctcccctcccccccctctctctgtcgtcctcttcctcccgctcgcgtccgccattgacgcggcgcggcgcacgagctccccctcagatctgaccaatccacaccgcgaaccctctcacctgacgcaaccccgaatcttgcctggaacggcgaagaattcgaacacaaatctgaagcacaccgtcgtcactaagaccacacactacatctgatttttttttgtttctccacaccctgattgtttctagatttttttttattctcgtttcggacgcttcataagaacagatctgcgagcgagttcgcggatcttatctatctgtgtgagaaccaagacccttttgttgcctgtggacacgatccgaacgaactttgacctgaggattcgtttgagatctgtttgctgctggtctcgagagaatgatcaggtcgatggtatatttcgggaacacctccatcggcgaggtggaggtgtggcccagcggcgacgcgagcctggcagcggcagcgtgggctcgagagatccgcgttgaccgcctttccccgcccagcgagcggtgccagccgctcgccgtgatgcataccgtggccgtcggtgctcgctgcctcgtcatggagtccaggctgcccaaggcagcggatgagccaccccagcctctcgtcgccatgcacgctgcttgcctcaaggaaaacaagactgcagttgttccactaggagaggaagaattgcatttagtggcaatgacatccaggagaaacctgacaaatcacgcatgtttctggggatataaagtgccatttggtttgtacaattcttgcttgactatgttaaatctccggtgccttgggatcgtatttgaccttgatgagacactgattgtcgccaatactacacggtcttttgaggacagaattgacgcgcttcagagaaagttgagcaatgagactgatccacagcgcataaacggtatgatagcggagattaagaggtaccaagatgataagtctatcctaaagcagtacattgaaggtgatcaggtctatgatgatggaaaaatgtataaagtgcaacctgagttggttccgccattatccgataaccatcaaccaatgacacgtccagttatacgattacaagagaagaatattatcttgacgagaataaatcctttgataagggataccagtgttcttgtacgtttaaggccagcatgggaggatctccggagctacttgattgctagaggtcgcaaacgttttgaggtctatgtgtgtacaatggctgagagagactacgccttagaaatgtggaggttgcttgatccagactcaagattgattaactctgttcaacttaatgacagaatggtgtgtgtaaaatctggtttaagaaagtccttgctgaatgttttccatgatggatactgccatcctggaatggccctagtaattgatgaccgactcaaagtctgggatgagaaggatcaatctagagttcatgtggttcctgcattcactccatattatgcaccacaagcagaggcaaactgttctatcccagttctctgtgtcgccaggaatgttgcatgcaatgttagagggggcttctttaaggactttgatgaaggcctcttaccaagaattagcaatgttttttatgaggatgaaatcaatgaaatcccatctgctccagatgttggcaattatttgatttcagaggatgagaatgttgcggcagtgaatggaaacagggatccattggcttttgatggtatggctgatgctgaggttgaaaggagaatgaaggaagcatctggaaatgctcaagcttttactacaacagcagctaactttgtgatgccagtactccctggtcaaaatttcgtttcatcttcagtagcaccagtagccccatcccttggcatggtgcctttgagtaataatcagggtccacctccattcactcaaccagttgctcaactgagtctctcagatccactgcaaggctctccagctagggaagagggtgaagttcctgagtcagagttagatcctgacacaaggagaagacttcttatattacaacatggtcaagacaccagagatcctacacctcctcttccagcagtacctcctgttcaagtcccagttcctccagttcaacctcatggaaattggtttcctgtagaggatggcatgaatccaaataatctaaacaggggttctgcagggttccctttggaatctgaaactatgcactatgataaaaagcaactacctcacccattctttcatggtggggaaaaccctatatcctctgatagatttagttatcagaaccagaggtatccctcccagctaccgcatagtgaagatcatcgcgttcttcagaaccatgcaccgtcaagatacagatccttccctggagaggagctagcaactcggcatgtttcttcaagtcagagaaacaaccagatagtaccaggacaacactttgctcggcatgcagggagctctgctggcatactagaggagattgctatgaagtgtggttctaaggtggagtacaggtcagcactatgtgatactgcggatttacagttctcaatcgaggtttggattgttggagaaaaagtaggcgaaggcattggcaggacaaggaaagaagcacagtgtcaagctgcagaaatctcattaagaaatttagctaataaatatctgtcatctgatccaaataagatgactgatatgaaagaaaatggttttggtagcaatacaaacatttttggataccctggaaatagtagggacgatgtgttaccaattgcaagtacttcagaagaaactcgctttgtgaagatgggggagaacaattccagaaaagcaggaggttctattgctgctctcaaggaactttgcacagctgagggatataacttagtttttcaagctcggacatctcctgatagttcagtaggcaaagaagcttatgctgaggtagaagtttgtgggcaaattctaggcaacggagtgggaataacatgggaagatgctaagcttcaggctgctgatgaagctcttggaatgttgagatccatgcttggtccacttgctcagaaacggtccagttctccaaggtcactggcacccagttttgataagcgcttcaagccagattttccacgggcagtgcaaagggttccttatggtagatattcccgaattgaaggccatgttccttgacattttaacggatacattggttctaaactctggattttttagctagatgagacgtatcaactttgcagagaataaaaaccatgacacccggtcatcttgcgcggcttctactggaaacatggatggttgtggatgcaccaagaaattgcaagcaattgtggtggccatgtcttcatgctgatacttgctttgggtctgatctcacgttaattgacatgtttgacttgaagtgtgcccatccttgtggatacccagacgtaccgcttccgtgggggcttgtgcagcttctgtcctgcttgggggaacttcaatccgtggctgcagaggcgctgcgaccgttttaacattttgtttgtaggataagtttgtagcttaggtttggagtaggtagctaattttgttgcggtggaagtaggtattaatcctacattaaatcccgtgtttatttttttaggtcaatactgacaaaagttcagtagctagatgtttattatttgtttctttatgtagtcattctttattatgttcttgtcattatttgtaaagatctacggtttgttg

SEQ ID NO: 17258 - DNA, 1138 bp, Oryza sativa
  ref <308>: DATABASE ACCESSION NUMBER: AK067712
  ref <309>: DATABASE ENTRY DATE: 2001-12-06
aaaaaaaacgtacccttgtgactacacccgcttcgcttcctcccctctctaagccggggaagctaagccatggcgtccgtcaccgcccgcaccccggtcgcagccctccgctcgtcggcgtcgctcaagtctaccttcctagggcaatcctccacccgcctcgcccgcgcaccgactacgaggcgtaatgttcgggcggaggccaagggagagtggctccccggcctcccttctcccacctacctcaacggcagcttgccaggcgataacgggttcgacccgttgggtctggcggaggacccggagaacctgcggtggttcgtgcaggcggagctggtgaacgggcggtgggcgatgctgggggtggccgggatgctgctgcctgaggtgctgacgaagatcgggttgatcgacgcgccgcagtggtacgacgccggcaaggccacctacttcgcgtcgtcgtcgacgctgttcgtcatcgagttcatcctgttccactacgtggagatccggcggtggcaggacatcaagaaccctggctgcgtcaaccaggaccccatcttcaagagctacagcctcccgccgcacgagtgcggctaccccggcagcgtcttcaaccccctcaacttcgagcccaccctcgaggccaaggagaaggagctcgccaacgggaggctggcgatgctggcgttcttggggttcctggtgcagcacaacgtgacgcagaaggggcccttcgacaacctgctgcagcacctgtctgacccgtggcacaacaccatcatccagacgctgtcaggctgagcgtgtgatcgatttcatcagggccagggcatctcaaggagcttgatgagttcaggctggtgaaaccgatgattgggcgatggaagatgttctcttcttgtttcttctttttttttttgtggagtatgcatgtataagatgttaatgaattggggggaggagagagagagagatggatgtgatgagattcagacttactgtgtgtgttgtggtaattgtttcctgcatgcatggatctggatgcatgggtgagggggtgagttgagtggtgaatttctgatgtacagtactacagggggataaactatctcatggtagcagcagtgttctagct

SEQ ID NO: 17259 - DNA, 2949 bp, Oryza sativa
  ref <308>: DATABASE ACCESSION NUMBER: AK067713
  ref <309>: DATABASE ENTRY DATE: 2001-12-06
gttgagtgaaaccagtaccttctctcaatgttgatgtgcctcaggtggagctgatagataacattgtcacagagtctcctgattcttctgttgctgaattccctgatgcatatcaaaattcaagtatgcctcctgctcctgagagcgcagctgattttcccagtttgtcaagtgcagatgctcctgacatttcagagccagtattatcaggctatacagctaatcctcatcctgaagtgtcagctattgctactaatacccctgtgagcaatacagaggatgctccaggtcctttagagatttcagagtcagcatcacgagcctatataattacacttcctaatcaaagtttacctgattccaaagaaattccagacagtaaggcagaagatgcacccatagattctcctgagaaattggaaccaggaccttcaagctatacacctacaattcccattaaagagtcctctattgtcagtcaaaatactaatgcagaaaatgtttccggagactgtagtgaaggcactgcttgtgctatatcctattcccagcatatcatttctgataagccaactaatgaggtatctgctactaatagctcacctgatgatacctctagcgatgaagatacagttgaaagtggtggcattgttgaagtgtctaattcacagcccatgccactgaatgactcattggagaacggatgtgcaactcaaggcctcccagcaaatgcccctactaattctactggagtatcttctgttaagctctggactaatgctgggctctttggacttgagccatctaaacctccagtattcggtgcccatgatggtccaaaggaggatactacacctggacacacacaacctcagctttgccattcaactgggtgccccgaagttcatttttcaaagcccactgaatcagcacaagtatgtgttccaaatggcaattcgccaattaccagcagttttgtggggaaacttgttggtatctgtcctggttctacaagccacagctcagagactaatcaatcaacagtaagaacacctgatactgttattggtcaaacagaggggtccacaggttgttccacatcttttgagcacagtgatcacaaaaatattattggtaagcaaacttcaataagtgagctcctagaatctgaagacagtgctgaaaatggtgctgaaatgttctctaaaactgacatgactggaaggaataacatgaatcaggtgactgcatcaagcttttcaagcattgcacaaagatttcttgctaatacacttcagcgaagaactcccaaatacactgatcttcctatgtcatctgttatagttaacactgatgcaaacgggactgatgaatctaccaaaatatcttctctagcccccaatgaaacaacattcgaggcatctcaatttgagaagaaaacagaaaatgacacaaatggactgcccaaatcgtcactcttctctagtagccattactctgagaaatcatctccgccgcttgagtacatgaaaatatctttccaccctatgagtgcatttgaaatgtcaaaattggacctagatttctctgatgaaaatcttcatgagaatgccgatgatatgatgttaccaacgtttcagttacttccagggtcttccgttccacagcttggtagtggttctgaatcggaagatgatacttttggcagatcttatagttattcttcgtatgatgatctaagtccacggttatattcaaactctgagttgtgggatcaagaagacgcaaatggattggaggatcatgatatgcataacaatccaaatcagataggatccttcggagcaccaatctctagctttgtggaatttgagcagatggacttatctggtgcgaagtccactgtatcacttacagatcttggggatgataatggacttggcacgttagattctcatcctgctggagaacttcctaacttcgatactttgatggctcatcaaaatgaggccttcattccgcacaatccagtaagtttatcaccagatgaaggtcagttgcctccacctcctcctcttcccccaatgcaatggaggacaatgagacaagtagcttctgtagaagaaggaagaggttctgcagctaaagaagatatgcttgagagtacctcagatctaccaccagtacacactcctgttcaggaagaacatcttctgcccatcgcaccaccagatcaacaaaatcttctgcccatcgcaccaccagatcaacaagggcatgcgaaggagaatgacagaaaagttgatggggtaaaagagataagcaatcctctcgacattgagatcagagcaagcttgcttcagcaaatcagggataagtcaggtcagcagaagctgaatggacatgaaaagtcaaaagcagtaggcaatgatactaaaaacttggatgaaagggaggagttgcttcaacaaatcaggagcaagacattcaatttaagacgaacaaatgcatctaagacaaacacctcatcaccaaccactgccaactccagcgttgtagcaatcttggaaaaggcaaatgcaatccgccaggctgtggccagtgatgagggaggtgatgatgatagttggagtgatatatgaatactcaactggaacgcgtatgaaactctttttctgtatattcagctagtacaagatgaagtgaaaaaatgtgaataacatccttttcttcattgtaattagattttccaggtctgttttgtacctctttttagttcacattagtgtattctctcataggcccatgcggttgtggaaatggttagatcattttcacattatgtaaattaactttattatttatttttgatagtgaaattaactggtaaaataagcatgttaaactgttttttctagcaatgtattgaagtaatatctctttgcatcc

SEQ ID NO: 17260 - DNA, 1764 bp, Oryza sativa
  ref <308>: DATABASE ACCESSION NUMBER: AK067714
  ref <309>: DATABASE ENTRY DATE: 2001-12-06
gctctctctcttcttctcttctcttctcctctcttccccgtcgccgcgcacctcccgatccctccctccgctcgctcgcccatcgcgccaggtgggctctttggacacccggtgatggatcacgcggagctgaccaccgagcaggttctcaagagggatattccatgggaatcatacatggcaaataagctgatttccgggacatgccttcagcttttgcgacgttatgaccacaaaccagaaagccaacgaggtcctttgcttgatgaggatgggccatcctatgttcgagtgttcctgaatatcttgcggaacatctccaaggaagatactgttgaatatgtgcttgccctgattgatgagatgcttgcagtaaatcctaaacgagcagcactgttctatgataactctctctctggtgaagacatctacgaccctttcctaagattgctcttgaaaggtaactggtttgtgcaagaaaaaagttgtaagatattgacccaaataataagtgcacgacccaagatgcagaatggcatagttccaaatggagaggcttcaaattcaaagagcaagctaacatctactcaagatgtgttaagaggtttggttgattggctctgttctcagctgaggaatcctacccacccaaactgttctgttcctactgctatgcattgtcttgccactttgctaagagagcagtatgttagagctttatttgttcaggcggatggtgtaaaactgctcattcctttaatttctccagcttccacacaacagtcgatccagcttctctacgaaacttgcctctgcatctggcttttatccttttatgatgcagccgttgattatttgtccactacaagggttatgccaagacttgtagaggttgtgaaaggttcaacaaaagagaaggttgtcagggtcgttatcatgtctatccgtaacttgcttgcaaagggtgcgtttgctgcccaaatgattgatcttggactgccacacatagtacagaatttgaaagctcaagcatggactgatgaggatttattagatgcgctgaatcagctagaaataggactcaaagacaaccttaagaagttgagttcatttgagaagtacaagcaacaagttcttcttggccatcttgactggtctccaatgcacaaagacccaagtttctggcgcgagaacattaataattttgaagaaaatgatttccagattctacgtgtgcttatgacaatcatcgacacatcggccgacacgactgctcttgctgtcgcctgctatgacctctcacagttccttcagtaccacccttctgggcgcattgtggtggcagatctgaaggcgaaggaccgagtgatgaagctcatgaaccacgagaacgccgaagtgaggaagaatgccctgctctgcgtgcagaggcttttccttggtgcgaagtacgcgagcttcctgcagacctaagacccagacaagaaactcttgaagttttgtatttatgctttagagccagagaaacaccaggccatttgtcataaatggtgaaaaccatgattgagaaagacagacctcgaaaattcttgtccagtatatcctgtcgttatttcatttactaaaccgatgtataataaataatcagctattccttgctcgatgtaataaagtgtcacagagcttgtttcttcctttcctctgaagatgtttttgtccgaggaagcacacacgggttatgtataataattttcaatttctgtg

SEQ ID NO: 17261 - DNA, 1332 bp, Oryza sativa
  ref <308>: DATABASE ACCESSION NUMBER: AK067715
  ref <309>: DATABASE ENTRY DATE: 2001-12-06
gcttcacgatacaacccacacggacacggccacaccacccaccaactgagagctgagcaggcgagcgagcggacatggcagcatcgctccaagccgcggccaccctgatgcagccggccaagctcggcggccgggcctcctccgccgcgctgccatcgcgcccgtcttcgcacgtcgccagggcgttcggcgtcgacaccggtgccgccggcaggatcacgtgctccctgcagtccgacatccgggaggtcgccaacaagtgcgccgatgccgccaagctcgccggcttcgccctcgccacctcagctctgctcgtctcgggcgccagcgcggagggcgtgccgaggaggcttaccttcgacgagattcagagtaagacgtacatggaggtgaagggaaccggcacggcgaaccagtgcccgacggtggagggcggcgtcgactccttcgccttcaaggccggcaagtacaacatgaagaagttctgcctggagccgacgtccttcaccgttaaggcggagggcgtggccaagaacgcgccacccgagttccagaagaccaagctcatgacccgcctgacctacaccctcgacgagatcgagggcccgctcgaggtcagctccgacggaaccatcaagttcgaggagaatgacggaatcgactacgccgccgtcaccgtgcagctgccgggaggcgagcgcgtgccgttcctcttcaccatcaagaatctggtcgccaccggcaagccggagagcttcggcgggcccttcctcgtgcccagctaccgtggttcgtccttcctcgacccaaagggccgcggtggctctaccggctacgacaacgctgtggcgctccccgccggaggcagaggagacgaggaggagctcgctaaggagaacgtcaagaacgcctcgtcgtcgacgggcaacatcacgttgagcgtcaccaagagcaagccagagaccggcgaggtgattggcgtcttcgagagcgtgcagccgtcggacacagacctcggcgccaaggtgcccaaggatgtcaagatccaaggggtgtggtacgcgcagctcgagtagggaatgaacaaatgttttgtgcgtggccgggttgatatatcgatacatggagagagggaaggaaggctgcaatgtgtgtatctagtaatgcaaactcgatcgggctgttgatggttttaatttttagcttttgtttcttcctctgttctcgtgaactgatgatcatatcccccgatgatgttatttgcatttcgacaagcggagaggacattgtacgatacatatatgtgcctatcttcacgaacatttgccttcc

SEQ ID NO: 17262 - DNA, 2287 bp, Oryza sativa
  ref <308>: DATABASE ACCESSION NUMBER: AK067716
  ref <309>: DATABASE ENTRY DATE: 2001-12-06
gaaaggaaaaaaaggaaaaggaaaaggaaacgcctcgccgggaatgggcaagcagcagccgcagccgccaccggcggcgatgtcggcgccaccgcggaagcggaagaagaaggggcggccctccctcctcgacctccagaagcggaccctccgcctcgagaagctgcaggagccgccgccgccgccaccgcccccgcagccgcggcggtccacgcggaggaaccccgccggcgtcgactccggcgacgaggggacggcacccggcggccgccgcgagaagaagctccgcctcgtcatgggcctccccgacggatcggccaagggagaaaagacgaggaaagcgacggatgggagtgaagagccgtcagattccgggcccacgacacctttgccggacaaaaagttgttagtcttcgtccttgataggctgcagaagaaggacacatatggtgtattctctgaccctgttgaccccgaagagctgcctgattaccatgatattatcaagcatccaatggatttttcaacaattcggaagaagctcaataaaggggcttatggcaacttggagcaatttgaggatgatgtattcttgttaacctcaaatgcgatgtgctacaattcaccagatacaatatactatcgacaggcacgggcgatccaagagcttgccaagaaggactttgagaaccttaggcaggatagtgatgcaagtgagccagaaccagaaccggaaattaaaccagatcctgaaccaaagccacaaccacggaggggcaggcctccaaataagaacactatcaaacagaaagttgggaagccaccggtagaacgcgctactgcagacttttctggagcaacactcgctagtgttggaaataatggacatcgtacgcagccaccatttgatctgcaacggcaagtaatgaatggatcctttatcgcagatgtactgagagcttcttttgccagtcgaaataatggatacaattggtctaacgagcgcaaattggaaagaattgaagattactcagggtctatcggtaaatggtcagcaaaaagtgggagaaaaccaattctgacagaagaaagtagccgaagcacttattgtcagcctcaaccttcgagttcaatatatgagctgccggtgtcgtcctcatacaacgagacaaggaagctgctagttccagttggggttcagttgcagcagtcctatccccgcagcttggcacgttttgctgcgcagctaggtcctgtcgcttgggagattgcgtccaaacgaattgaacgtgcccttcccccaggaacaaagtttggccgtgggtgggtaggagacggtgaagcaccgaacgcaactcagccaccagtgcttactacatcttcaacagccttgatacacccaagtagtacagaaacatcaagtgaacagccaactcataacggtacggccagcacaagccattcagcaggacctcagccatcttccgcaccatatgcctcttctacaatcacaactcatagggtcaattgtcagtcattaccaagccagcaacacggatcagtgccacaggtttcagcagaaagaggtgaacatggtgctgaggtgaagggcaaccataataatcttcatgaacggccagccattcagcacactgttaatggcttcagtgctgtttcaggatcaaacatattcccttctgcggcacagatggtggcgaatcggatgcagacacatacagctgattagctagctagtagagagacctgagatcaacatagtgaatttaacatttggatgcagagctccagtgaattgtccgtcatgatcaccaagcaacaagggcctgctcacactaggcactagcaactcagcaccaactgtccaaaaacctcggatgatccaagttctgacaagtggcaagtcttgtgagccatgtcgatccaccacgccgtgaattggcattgcatttgcgaaaacatgttgtgtgattgattagaaacataggatagcatgcagaaaattgcagagtaatatgtagggggaggtgtattcagcagtgtgtagtaacagcggtgagttccagttggagattcaacgattctgatgtgtagaaaccacagggaaaactttctgtatagattattcatcagtgtttatgattggttgacattatctgttctccatttggtagaattagatagcatagcagatcatatataggcttgcaagatatgaaagttcatcacaaactctcatcaaatacattgagatgcagttttctttttt

SEQ ID NO: 17263 - DNA, 1092 bp, Oryza sativa
  ref <308>: DATABASE ACCESSION NUMBER: AK067717
  ref <309>: DATABASE ENTRY DATE: 2001-12-06
gagtagcagagctcagcgtttggagcgagatgatgagcagcagcagcagcttggtgtccgccatttctgcgtcaccgtctgccactgcaaaagctcgccttcgtcatgacgatgcagcaacagcaacaggagcagcagcagcagcagcagtagcagcgaggcagctaaagacggagcatggcggctgctgctgctgccggagcagaggccgggcggtggtggcgagggcggggcccgggccactgacggagatcgagcccgacctgaacgaggaccccattgataagtggcgcaccaacggcgtcagcccggacgacttcgagtatggagtgtatgatggtcaccacacatataatgaaacccaagataagaagggcttttgggaggatgtctctgagtggtaccaagaagctgaacctcctcagggcttccaagcactgatctcctggttgtttcctcctgcaatcatccttggcatggccttcaatgttccgggggagtacctctacatcggcgcagcagtgttcgtcgtcgtgttctgcgttatcgagatggacaaaccggacaagccacacaactttgagccggagatctacatgatggagagatcggctcgcgacaagctcatcgccgactacaacaccatggacatctgggacttcaacgagaagtacggcgagctctgggacttcaccgtcgacagaagagatgagattgtgaaatcgtcttagatatggtattcagaaatggggggtcacatttgttagatgcagctgcagaaacagttcagaaaatcagaaccactccaaagaaaagcagggtggcaaagctgcaagatgagtctcttcaaaataaagaactttgagatgaaatgatgtgtgtatggatcatctcatctactgtaaggcctgctttctatgtctctgacagtctcaactctgaagttctcagccaggtacaaaaggagactgaaaattctgtcatgtgtattttgttttccccccaatgtaatggagaaaatcctgtgaatgacatcactaattcaatagatatatatagtagtataatggaataactttggcatcagcctcc

SEQ ID NO: 17264 - DNA, 1416 bp, Oryza sativa
  ref <308>: DATABASE ACCESSION NUMBER: AK067718
  ref <309>: DATABASE ENTRY DATE: 2001-12-06
ggggccattctctcgccggattcggatcccgcggcggcgagccgactcggcggggggatttgccggcgggatgatggaggaggcgagcacgtcggcgtccggtggtgggggggccgccgcgaacggcgggcagcggggcttcccgccggcgagatcgggagtgttctataggttcactcagcagaacctcccagcttggaagccggcaatgacaccaggatgtgtgataactattttcttgatgatcggagttacttttgttcctgttgggcttgtttgccttcatgcttcaaatcatgttgcagaaattgctcaccgttatgatattgattgtgtacctaatgcttacaaaagaaataggcaggcgtatattaaagatagctcgatttcaaagaactgcactcaagaagtgaaggttaaataccttatgagagcaccaatttatgtgtattatgaactcgacaacttctaccagaatcatcgcaggtatgtcaaaagtagaagtgataagcaactacgctatgggcagaagtacacacatagttcatgtgatcctattgaaaggaatgatggccttccaattgttccatgtggcttgattgcctggagcttgttcaatgacacttatggatttacctgtggatccacggaaataaaggtcaacaggaagaatatttcatggaaaagtgaccgggagcataagtttggcaaggatgtatatccttttaactttcagaatggatccttaattgggggaggaaaacttgaccctgctttaccactgaaccagcaggaagatcttatagtgtggatgcgtacggctgctcttccccaatttcgaaagctctatggtgtcattgaagaggatctacaggctgatgaaatcattacgatgcacatagcaaacaattacaatacctacagttttggcggcaagaaaagcctaattcttacaacatcaacctggctaggtggcaagaatgactttcttggatacgcatatcttatcactggctccttgagccttttcttaaccattctctttgctctgattcacgtgaaaaatccaaggccacacggtgatgccaattacctatcatggaataggccaaacagcaatagctaagctgcctacataactgtacgatatgtaaggtaaacatttgacaaatacagtgtagttgtttccctgtaaaaccaagactattcttctttcatatgataacatagagttcagactgaatttcgtggcagtgcaaatagaacaaccaattttgtcattgccttttcttttaagaatgcacacaatttgtgcatttgaaaagaactggtataattggcagtttttagttcatccaaacatttggtatgttgggataataaagtgctgatgaggattgactggcttcttcatgc

SEQ ID NO: 17265 - DNA, 880 bp, Oryza sativa
  ref <308>: DATABASE ACCESSION NUMBER: AK067719
  ref <309>: DATABASE ENTRY DATE: 2001-12-06
ggtacatccaggtcttgacggcattcatcgccgaaatccccaaatggacacggcgagcttgtgcaccgtggagaagcgcggcgccgtccacgtcatcaccctcaccggcgccggcgagcaccgcctcggcccgcccctcctgtccgcgctccgctccgccgtcgccgccgtccgcgccgccgccgccgcgggcgccggcggcgcgctggtgattgccggcgagggcaagtacttctccaacgggttcgacctggactgggcgcgcaccgtgcccgccgagctgcacgcctccatgggcggcgccttccggggcctcgtcgccgacctcctcgctctcccggtgcccaccgtcgccgccgtcaccggccacgccgcggccgccgggtgcgcgctggcgctcgcgcacgacgccgtggtcatgcgcgcctcccgcggcttcctgtacatgagcgaggtggacgccggcctcaagatcgtcgacttcttcgccgagctgatccggcagaaggtccccgacgccgtgaacaggagggatctagtcctccggggcgacaagatgacggcggccgacgccctgcggcggggcatcgtggacgcggccgtcgacggcggcgtcgacgacgtggtggccgccgccgtccgggaggcggaggcgctcgcggcgaggggatgggacggggagatcgtggccgagaccaggaaggcgatttggccggagctctgggccaaggtgaaggaccacgccaccgacgagcctccgccgccgccgccacggccgctgctgtagtctaccttaccgtatgttgtatcgtgtatgcttccgctgcatcaagattggtgcgctgcaaatgtatcctcgcaggattgcatgatttgtatc

SEQ ID NO: 17266 - DNA, 1406 bp, Oryza sativa
  ref <308>: DATABASE ACCESSION NUMBER: AK067720
  ref <309>: DATABASE ENTRY DATE: 2001-12-06
gaagtagagcgccgcgccaacagaaacctctttactatctcctctctctcgcgtccatggcgggtcagatcccccaacccatccgttgcaaagcggccgtgtgcagggccgctggcgagccgctggccgtcgaggagatcgtcgtggacccgcccaaggcgcacgaggtccggatcaagatcgtctgcacctcgctctgccacagcgacgtcacgttctggcgtatgcaggatttccccggcgttttcccgaggatttttgggcacgaagccttcggggtggtggagagcgtaggggagcatgtggaagggttcgccgccggcgacccggtggtgcccacgttcctgggccagtgcaccgagtgcgtggactgcgcctcggagcggagcaacgtgtgctccacgtaccggttcgcggtgcgccccgggatgccgcgcgacggcaccgcccgcttccgcgaccgccacggcgccccgatccaccacttcctcggcgtctccagcttcagcgagtacaccgtcgtggacgccaaccaggtcgtccgcgtcgaccccgccgtgccgcccgccacggcctccctcctcagctgcggcgccaccaccggggtcggagcagcgtggaagctggctaaagtcgagccggggtcttcggttgctatctttggcctcggcgccgtaggattagcggtagctgaaggggccaggatttgcggtgcgtcaacgatcatcggcgtggatttgaaccctgagaaacatgaacttggaaagaagttcggtgtgacgcacttcatcaatccacaagaacttggggacaaacctgtcagccaagcgatcatcgagatgactgacggtggcgcggactactgcttcgagtgcatcgggctggcgtcggtgatgagcgatgcatttcggagctcccgagagggatggggcaagacgatcattcttggcgtcgaaatgcacggtgcccctttgtccattccttcgttggagatcctcaacggcaaatgcgtaatgggatcactcttcggaggggtgaaacccaagcaggacattcccatcctggccgacaagtatctgaacaaggagctggagttggacaagttcataactcacgaggttcccctgaaggacatcaacacggcatttgaccttctgttgcaggggaagagtctcagatgcaccatttggatggacaagtgatgtggctaagtgaaattgcaattgagcaaaccagttgtctacttaagtttgctgcccacttcagtaggttacaatacaattatacaaataactggtttgactgctgccccaagaagatttgtgtgtataatgactagtgaattttaacatcgtgtgtcaaatcatgtgcgttcagactttattgatatacaaaatcactctctg

SEQ ID NO: 17267 - DNA, 1726 bp, Oryza sativa
  ref <308>: DATABASE ACCESSION NUMBER: AK067721
  ref <309>: DATABASE ENTRY DATE: 2001-12-06
ggaggccgcttctctagtctagaccaaaggaaggaaaccaaccgagaggcgaggcgaggagaggagaggagaggagaggaggaggaggagggaggagaagatgagagagatcatcagcatccacatcggccaggccgggatccaggtcggcaacgcgtgctgggagctctactgcctcgagcacggcatcgagcccgatggcaccatgcccagtgatacaacggttggcgtcgcacacgatgcgttcaacactttcttcagcgagacgggcgctggcaagcatgtgcccagggccatctttgtcgacctggagcccactgtcatcgacgaggtgcgcactgggtcgtaccgtcagctcttccaccctgagcagctcatctctgggaaggaggatgccgctaacaactttgcccgtggccattacactgttggaaaggagatcgtagatctatgcctggaccgtgtgcgcaagttggcagacaactgcactgggctgcagggattcttggtgttcaatgctgttggtggtggaactggatcaggacttggttctcttctgttggagcgtctctctgttgattatggaaagaagtccaagcttggcttcacaatttacccttccccccaggtctcaacagctgttgtagaaccatacaacagtgtcctctccacccactccttgcttgagcacactgatgtggcagttctcctagacaatgaggctatctatgacatatgccggagatcccttgacatcgagaggccaacctacaccaacttgaacaggctcatctcacagatcatatcttcactcaccacctctctgaggtttgatggcgctatcaatgtggatgtcactgagttccagaccaaccttgtcccataccctcgcatccatttcatgctttcatcctatgcccctgttatctctgctgagaaggcttaccatgagcagctttctgtgcctgaaatcaccaatgctgtttttgagccctcaagcatgatggctaagtgtgaccctaggcacgggaaatacatggcttgctgcttgatgtaccgtggtgatgttgttcccaaggacgtcaatgccgcagttgcaaccatcaagacgaagagaactgtccagtttgttgactggtgccctactggattcaagtgtggcatcaactaccagccaccctctgttgtccctggtggtgacctggctaaggttcagcgtgcagtgtgcatgatcagcaacaacactgctgttgctgaggttttctcgcgcatcgaccacaagttcgacttgatgtatgctaagcgtgcgtttgtgcactggtacgttggtgagggaatggaagaaggtgaattctcagaagcccgtgaggacttggctgcccttgagaaggactatgaggaagtcggcgccgagggtgcagacgacgagaacgacgatggagaagactattagtagctggttaataagtagttctctggttaatgattggtttgtcagtatactccggttccgttgcattgcatattcctgttatgtgtgtttactttttgtactgtgctaaactgttgttagcccctcgttggccatgattgttcatatcttcccattttgctgtgcattgcttgctactcccccccaagcttggtacatatgccattctgagctgaattgcaaaactgtatgctctctatgcatggtccaatggagctatggatgctttcttct

SEQ ID NO: 17268 - DNA, 2217 bp, Oryza sativa
  ref <308>: DATABASE ACCESSION NUMBER: AK067722
  ref <309>: DATABASE ENTRY DATE: 2001-12-06
gagacgacgagaagcgaagcagcgagaagagaggttggtgtggtgagcgacgatggcgatggcgtcgtcgtcgtcggcgtctgcggcggcggcgcgaggggggagcctggtggaggagtggagcgggcgcgtgaaggcgctggaggcggggttccgcaagtggatggcggagcagccgacgcacatcgaggccgcggtgaccacggccgtgggggcggtgcagggggcggcgctggggggcctcatgggcacgctcaccgccgacgggggttccccgttcccgacgccgccgccgccgccgcccaacgcgaacccgcaagccatggcgtccttcaagcaggctcaggctttagctggtggaccattggtgcaagcccggaattttgcagttatgactggtgcaaatgcaggcatatcttgtgtaatgagaaggatacgtggtggtgaggacatccagggcaggtgagtcttggaatttcatctagattggcactacatttaaaagaacgcaacttatataactagtttggtgtttgatatatgcaaattaatcttgtaaatgcttgattgcgatttccagatatgaaccattaaagacagggataaattgttcatattcagatttctggatggaactattagttcgagttaataatacatactcgttgctttattctagagaaaaaaatgtcttttctgtatgtgtagcatggcagctgcttttggttctggtgctctgttctccatagttagtggaatgggaactcccaatccagttgcaaatgcaatatttcaaggtggctttttcatggtaagaatctagatgtatttgctggttaatggtttttgttgtcattttcctgctcgttccattttattactaacctttgacatcttctgtaccctgaagttgatttggtatgtcactatttgtggaaatacaattttatcctccttgtggagacctgctataacttggcagatattaacgactcctgaaatgttttgcttaatttaggagtatatttctaacaatcttgcttaagcctagctataggagtatatttctaacaatcttgccttaagcgtagctagagtatgtaattcatatgggtaccgcatgtatacttcattttattttgtcggttgaagtctatcatgtatggaaatgatgaaacagactaagtatttatgacagcaatgagctttggcagtgtcaccatgccactttttttctttcttgttagttgttacaaactccattttgaggtatccatagagcttggctagacatgcaaacctcctaaccttaggcctccagaagtgaagagatttggtacaaaagaagctactttgctgtttatggaagtatttggataggaccttgacgattttggatgggatacgcgagagcaaattatagtgagtttaaatttgaaacccatattccgatgaaacaattctgttgaagtacaggttctataagtatttttctttctaccttgatctttgcatgtggaattatcacacataattttagtagcacattttgattttagtaaatttactattatttggttatcttgtcactagccttcaaccattgatatgacgttttgatgttttatccagtattccttgtagcttactagttctacctgttaattcattctgttcagattgggcagaagttctcaaagccacagagcgaggatctgtactactcccgtgcaaggagcatgctgcaaaaactaggcctcgagaaatatgagaagaattttaagaagggtctactcactgatcaaactttgcctctccttaccgacagtgctctgagagatgtgaagattccccctggccccagacttctgatactcgatcaaattaaaagggatcctgagtttggaaaagcacggtgaagcctctcagcccttggctcatggctccttggattgcgtaggactgtattatctgaagctatgccatctttgttttttttatgatatgcttcctaggcaacgtattcatcataaaggttttttttttttgagagaagggggggggggggctagttactgttggatggtaattagtttttatcttcctattgaattttgtgcaactattagtcacatgcttgtgatacattgtatacatcctgttcaagaggcagatcatttgcaaggcgaataaaatgtttttgtgtctagtaaaggc

SEQ ID NO: 17269 - DNA, 3671 bp, Oryza sativa
  ref <308>: DATABASE ACCESSION NUMBER: AK067723
  ref <309>: DATABASE ENTRY DATE: 2001-12-06
tgcccatcgccgccgccaatgccggcctccacggcctcgccaccgccgcacctcgtctgaacccccgtcttgctgccgccggaaaccgcgtcgagaagttaaccatggggtctggctcactcctcctctccctcttgctggtgctcgtcgtcgtcaatgtcggggtggcggtgaaccaggacgggctgtccctgctcgacgcgaggcgcgcgctcgccgccccggatggcgcgctggcggactggaacgcgcgcgacgccacgccctgcagctggacgggcgtctcctgcgacgccggcgtcggcggcggcgccgtgacggggatctccctcgcgggcctcaacctcaccgggtcgttcccggcggcgttgtgccgcctcccgcgcgtcgcgagcatcgacctgagctacaactacatcggccccaacctgagctccgacgccgtcgcgccgtgcaaggcgctccggcggctcgacctgtcgatgaacgcgctcgtcggcccgctccccgacgcgctcgcggccctcccggagctcgtgtacctcaagctcgacagcaacaacttctccggcccgataccggagtcgttcggccggttcaagaagctcgagtcgctctccctcgtctacaacctgctcggcggcgaggtcccgccgttcctcggcggcgtgtccacgctccgggagctcaacctgtcctacaacccgttcgtggcggggcccgtgcccgccgagctcggcaacctctccgctctgcgcgtgctctggctcgccggctgcaacctcatcggcgccatcccggcgtctctcggcaggctcggcaacctcacggacctcgacttgtcgacgaacgcgctcaccggctcgataccgccggagattacgcggctgacgagcgtcgtgcagatcgagctgtacaacaactcgctcactgggccgattcccgtggggttcggcaagctcgcggagctccagggcgtggacctcgccatgaacaggctcaacggcgccatcccggatgacttcttcgaggcgccgaagctggagagcgtgcacctgtacgccaactcgctgacggggcccgtgccggagtcggtggcgaaggcggcgtcgctcgtcgagctgcggctgttcgccaaccggctgaacggcacgctgccggccgacctcggcaagaacagccctctggtgtgcgtggacatgtccgacaactccatctccggcgagatcccgccggcgatatgcgaccgcggcgagctcgaggagcttcttatgctcgacaataagctctccggtcgcatccccgacgggctcgggcgttgccggaggctgcggcgggtgcggctgtcgaacaacaggctcgacggcgacgtgcccgccgcggtctggggcctgccgcacatgtcgctgctcgagctcaacgacaaccagctcaccggagtgatctctccggtcatcggcggcgcggccaacctgtccaagctggtgctgtccaataaccggctaactggtagcatcccgccggaaattggctcggcctcgaagctgtacgagctctccgccgacggcaacatgctctccggcccgctccctgggtctcttggcggcctcgaagagctcggccggcttgttctccggaacaactcgttgtcaggtcagctgctccggggaatcaattcttggaagaagcttagtgagctcaacctcgccgacaatggctttaccggagcaattccagcagagctcggcgatttgccggtgctgaactaccttgacctctccggcaaccgtctcaccggtgaggtaccaatgcaattggagaatctgaagctgaaccagttcaatgtctccaataaccagctcagtggcgcgcttccgccacagtatgcgacggcggcatatcgaagcagcttcttgggcaacccggggttatgtggagataatgccggtctatgtgccaattcacagggaggtcctagatcccgcgctggcttcgcctggatgatgcgctcaattttcatatttgcggctgttgttctggttgctggagttgcgtggttctactggaggtaccggagcttcaacaattctaagctaagtgccgaccgttcgaaatggtcattgacatcattccacaagctctcattcagcgagtatgagatcctggattgtcttgatgaggataatgtgattggtagtggcgcatccgggaaagtgtataaggcagtgctcagcaatggtgaggtggttgccgttaagaagctttgggggttaaagaaggggacggatgttgagaacgggggtgaaggatccacagctgacaacagctttgaggcggaggtgaagactcttggcaagattcgccacaagaacattgtcaagctctggtgtagctgcacgcacaatgacaccaagttgctggtgtacgagtacatgcccaatggtagcctaggagatgtgctacacagcagcaaggctggtttgctggattggtcgacgcggtacaagattgctctggatgcagcggaggggttatcctatcttcaccatgactacgtccctgcgatcgtccatagggatgtcaagtcgaacaacatcctcttggatgctgaattcggtgcccgtgttgcagactttggggttgccaaagtggtagaagccactgtccggggccccaagtcgatgtcagtgatcgcgggttcatgtggttacattgcacctgagtatgcatacacactccgcgtcaatgagaagagcgacatatacagcttcggagtggttcttcttgagctcgtgacagggaaaccgccagtcgatccagagttcggcgagaaggacctggtgaagtgggtgtgcagcacaattgatcagaagggggtagaacatgtcctcgacagcaaactcgacatgaccttcaaggatgagatcaacagggtgctgaacatcgccctcctctgctcgagctccctaccgatcaaccgcccggcgatgcgcagggtggtcaagatgctgcaagaagtgcgcgccgaggccacaaggccaaggctggagaaggacggcaagctgtcgccatactactacgaggacacctccgatcaagggagcagcgtgtaaaggtaaaaacccccaaaagagaagaagatgacaataggccaatagctgcttccatgaatcttctcccatggcttgtagagctgtagctaggtaggaaagctgcaatcataacccagtcgtgtccaaaattctatagttgctgattttgagcgctgaatttgctcgccgccgacgccggcctccgacagcacggttaactctggagctgtgcactccagtccggcaatggaggacagtaagctggtgggtgcccggtgttcttggttgtccttgctgtatgtggaccgtgccattgatgccggtagggcagatcgctcgtctgctgtccatcgagagaagaaaagtctgtgacggaatcaaatgtaggtgtgtactgtaattagtactgctactttgccttttctcctgagataagctaggagtattgttcaaggctcatggtgatggcccatggggtggttggatcaagtatttcctgctcttcaactcagcaggagagatggaaatactaatgcaaacgagtgaatgaatgaatctgacctctttattacgagtact

SEQ ID NO: 17270 - DNA, 1652 bp, Oryza sativa
  ref <308>: DATABASE ACCESSION NUMBER: AK067724
  ref <309>: DATABASE ENTRY DATE: 2001-12-06
ggagtgtggtattttttcgaagtccacttaagtgatggtattatagcgaaaccaatcttttgtgatggtagatatgcaattttctccctcgcctggtatcgctgctgctctggttgtctctcgtcctgagtctccgactgagcgcctccaatctcaacagccacctcccacctgttccggctccggctagacctcgccgccggcgatccccagcctcagcgcatccaaccgacggaagaacacaaggcgccgcaccgcaccgcagcgatgacgctgatcaccctcatccgcgactacatcgatcgcatgctccacgacatccccgggatgaaggtcctcgtcctcgaccccgataccgtggggatggtaagcgtggtgtacagccagtcagatctcctccggaaggaggtgttcctcgtggagacggtcgacaacgcctccagctccagggagtccatggcgcacctcaaggccgtctacttcctccgcccctcctccgataacgtccagaagctccgccggcatctcgccgccccgcgtttcgccgagtaccacctcttcttctccaatgtattgaagattccacagattcaggtgctcgcagattccgatgagcaggaggttgtgcagcaagttcaggagttctatgctgatttttgtgccatcgacccttaccatttcacgctgaacatacgcaataaccacgtctacatgcttccaatggtggtggatcctcctggtatgcagagtttctgtgatcgggctgttgatggcattgcttctgtcttcctggctctcaagcgccgtcctgttattagataccaaaggacatctgatgttgcaaaaaggattgcacaagaaactgcgagattgatgtatgagcaggaaagtggcttgtttgattttagacgaactgagaactcttccttgttgctggtgattgacagaagggatgatcctgttaccccgttacttaaccaatggacatatcaggcaatggttcatgaacttattggaattgagaacaataaagttgatctaagggaataccctaatgtccctaaagaccagaaggaggtggttctatcatcagttcaggatgaattttttagggctaacatgttcgagaattttggtgatcttggtatgaatatcaaaagaatggtagatgactttcaacatctttcgaagaccagccagaatattcagagcataagtgatatgtcaaaatttctgagcaactaccctgaatatcggaagactcatggaaatgtaacgaagcatgttgctttggtcagtgagatgagcagaattgtggaggaaaggaagattatgctaatttcccagacggagcaagagttagcatgtacaagtggacaagcagctgctttcgaggctgtcacttccttgctaaacaatgaaagtgtgtctgatattgatcgtttacggttagtattgctctatgctttgaggtatgaaaaggagagtccggttcagttgatgcagcttttcaataaattggcttctcgttctgctaaatacaagtcagggctggttcaattcctcctcaaacaggctggtgttgataagagaacaggtgacttatatgggaaccgtgatctattaaatattgctcgcaacatggctcgtct

SEQ ID NO: 17271 - DNA, 2469 bp, Oryza sativa
  ref <308>: DATABASE ACCESSION NUMBER: AK067725
  ref <309>: DATABASE ENTRY DATE: 2001-12-06
ggtccattatttataccatttccgcgtccccccaccctcctcccccgctttcccaatcgaggcgagcaccgcaattgcagggttccggaggccgaataaaaaagtttggcctctccccgcaaaaaagtaaaaaacccaaaacaaccatccaccagcgcatcgcggcaccgcgagcgagcgagcggagggagggaggtggagagcaaaagttcgataaaaggagaggaggagacgaagcgtcgaagcccaagtaacatccccccaacctccgcctcctcctcctccccctcctcccatgcccgcatcgagatcttagccgcgccggagatcgagagggaggagcggcgacgcgggcgcccccgatccctcctcctcgccgccgccgccgccggcggcgccggagcagcagcagccgacgacgacgacgaccgccgcagcagccgatcgggggaggaggggaggggaggacgcgatggaggcggactccgggaagctcttcgtcggcggcatctcgtgggagacggacgaggaccgcctccgcgagtacttcagccggttcggggaggtcaccgaggccgtcatcatgcgggaccgcaacaccggccgcgcccgtgggttcggcttcgtggtcttcaccgacgcaggcgtcgccgagcgggtcaccatggataagcacatgatcgacgggcgcatggtggaagcgaagaaagctgttcccagggacgaccagagcatcaccagcaagaacaatggcagcagcatagggtcacctggaccaggccgtactagaaagatctttgttggaggcttggcctctaatgttactgaggttgaatttagaaggtattttgagcaatttggtgtgattacggatgtggttgtcatgtacgaccacaacacgcagaggcctaggggctttggattcatcacctatgactcagaagatgcggtggacaaggcactgcacaagaacttccatgagctgaatggtaagatggttgaggtcaagagagctgttccaaaggagcaatcacctggacctgctgcacgttcacctgcgggagggcagaactatgctatgagcagggtccatagcttcttgaatggtttcaaccagggttataacccaaaccctattggaggttatggcatgagggttgatggaaggtatggtctgcttacaggcgcacggaatggattctcttcatttggccctggttatggaatgggcatgaattctgaatctgggatgaatgcgaattttggcgccaattctagttttgtcaataactccaatgggcggcagataggttcattctacaatggtagttcaaacagattaggtagtcctattggttatgttggtcttaatgatgattcaggatcactattgagttcaatgtcaaggaatgtttggggtaatgaaaatctgaactacccaaacaaccccacaaacatgagttcttttgcaccatctggaactggaggtcaaatgggtattaccagtgacggtattaattggggagggcctactcctggccatggaatgggcaacatttcaagccttgggctggctaaccttggccgtggagctggagacagttttggcttgccttctggcagctatggaaggagcaatgcaactggtaccattggtgaacccttctctgcaccacccaatgcatatgaagtgaacaatgcagatacatatggcagcagctccatttatggagactcaacttggaggttcacgtcatctgagattgatatgcctccttttggtaatgaccttggaaatgttgatccagatatcaaatcaaacataccagcaagttacatgggcaactatactgttaataataatcagacaagcagaggtatcacttcctagcgagagtactattatattcatatatgacttgggatagatgaaagaagcattatatcaggtattcaggtgcatgactatgaattggtgatatcaggttaatatacgggttagttaattgtttctagctaaccagaggtgtggtttatggacaccaccatgctagaggagcgaatacaaacgttttgtgaaggtttcagattttagtttaattcctacatgtattaggtcttggtttttgaatgagatgtgcagtggtgattgcggcacatacttagagtgttccaacataagctggaatcctgtcatatggacaaacttgtataccaaaggaatgctttattatcttgcccatttatggctacattagctcgcttgttttcattccctttttaaccaattccatttgtatactagagatctgcttgacttactagtgaaactattcggggacgccgatcctatctttgcagttggctcccagaaataaagccaccaaaagtgcatacttatttgttctaccttgatttgccatatgtatatgcttctgttcgttttaaaatagaactttgggtttgatt

SEQ ID NO: 17272 - DNA, 2783 bp, Oryza sativa
  ref <308>: DATABASE ACCESSION NUMBER: AK067726
  ref <309>: DATABASE ENTRY DATE: 2001-12-06
gactggatctggtgatatagccccatgtataggaatcaggaagattagtagaacagaaaacacaaaagtatgctttaatagttggatggcatatacctttattcggatcaccgttccaaatgtgacgttagtatccgttagtggcatgctttttaatctaacaaggcgttcttcatcgtgtgaaagatggcgtctcacattgttggatacccccgcatgggccccaagagggagctcaagtttgccctggagtctttctgggatgggaagagcagcgctgaggatttggagaaggttgcgaccgacctcagggccagcatctggaagcaaatggctgacgctgggatcaagtatatccccagcaacaccttctcgtactatgatcaggttcttgacacgaccgccatgcttggtgctgtcccagagcgctactcatggaccggtggagagattgggttcagcacctacttctcgatggctaggggaaatgccactgtccctgctatggagatgaccaagtggtttgacaccaactaccactttatcgtccctgaacttggtcccaacaccaagttctcctactcttcccacaaggctgtgaatgaatacaaggaggccaaggcgctcggcgttgacaccgtgccagtacttgttggaccagtttcatacttgttgctctccaagcctgccaagggtgtagagaagtcgttcgctcttctttcccttctcagcagcatccttcctgtctacaaggaggttattgctgagttgaaggcagctggtgctacatggattcagtttgatgagcccacacttgttcttgaccttgactctcaccaattggctgcattctctgcagcgtacacagaactcgagtcggcactttctggattgaatgtgcttattgagacatacttcgctgacattcctgctgaatcatacaagaccctcacatccctgaacagcgtgactgcttatggttttgaccttatccgtggttccaagactcttgaccttgtcaagagtgctggtttcccctctggcaagtacctctttgctggtgttgtggatggacgcaacatctgggctgatgatctcgccgcatctctcaccaccctcgagtctcttgaggctattgttggaaaggacaagcttgtggtctcgacttcctgctcactcatgcacaccgctgtggatcttgtaaatgagaccaagctcgatagcgagattaagtcatggcttgcttttgctgcccaaaaagtggttgaggtgaatgcccttgctaaggcattggctggacagaaggatgaggcttactttgcagcaaacactgctgctcaggcctccaggaggtcatcacctcgtgtgacaaacgaggaagtccaaaaggctgctgctgctctgagggggtctgaccaccgccgtgctaccaatgttagcgctaggttggacgcacagcagaagaagctcaaccttccagtccttcctacaaccacaattggttcattcccacagactgtggagctcaggagagtccgccgtgagtacaaggctaaaaagatctctgaggatgagtacgtcagtgccatcaaggaggaaatcagcaaggttgttaagatccaggaagagcttgacattgatgtgcttgttcacggcgagcctgagagaaacgatatggttgagtactttggtgagcagctttctggttttgcatttactgccaatggatgggtgcaatcctatggatcccggtgtgtcaagccaccaattatctatggtgatgtgagccgccccaacgccatgactgtgttctggtccaagatggcgcagagcatgacctctcgccccatgaagggaatgttgactggtcccgtcacaatccttaactggtcttttgtcaggaatgaccagccgaggtttgagacatgctaccagattgctcttgccatcaagaaggaggtcgaggaccttgaggctggtggtatacaggtcatccaaatcgatgaggctgctttgagagaaggtctgcccctccgcaaggcggagcatgctttctacttggactgggctgttcactccttcagaatcacaaactgcggtgttcaggacaccacccagattcacacccacatgtgctactctaacttcaacgacatcatccactccatcataaacatggacgccgatgtgatcaccatcgagaactcccggtccgacgagaagctgctctctgtcttccgcgagggtgtgaagtatggtgctggcattggtcctggtgtctacgacatccactcccccaggatcccgtccacggaggagattgcggaccgcatcaacaagatgcttgcggtgctcgacactaacattctctgggtgaaccctgactgcggtctcaagacccgcaagtacaccgaggtgaagcctgccctcaccaacatggttttggccgccaagctcatccgcacccagctcgctagcgcgaagtgaggatcgcctttgcagcaagttcccttcgattttgaggaggaatgccatcatagccatcttgtttttgaataatctgggtccagtggatccactgtctgtggttaggtttagtcagtctcttggggccaagatcactcatacccattttactttgaatgaatttggtggtttttgaggcagtctgtcggtgtatttgtattgtaaactgagtggaaatcagcagtgtttcatctacatctgagttgttgcggatcaaattacaaaattttcaaggagagttgatgttatgttctgcc

SEQ ID NO: 17273 - DNA, 2027 bp, Oryza sativa
  ref <308>: DATABASE ACCESSION NUMBER: AK067727
  ref <309>: DATABASE ENTRY DATE: 2001-12-06
tgattgtacgctgatctctctggtcgaccaccggcttagctgagagatcctactcgtgcccggtgtcgaggagagcgcgcgatggagtcggtggccgtgaacgcggcgcgatgggtggtcggcaaggcgctgagcccgctgtcgggagggttcgtcgaggcgtgggctgccaccacggagctcggccctaatgtcgacgccatcaagatggagctgctctatgcgcaggggatgctgcacaacgctcgcagcagagagaccagcaaccccgcgctgcagcagctgctcctgaagctccgcggcctggcctacgacgccgaggacgtgctggacgagctcgactacttccgcatccaggacgagcttgatggcacctacgaggccgccgaagagcacgccaagggctgcctctatggcctcgtgctcaacacacgccgcacagtcagaaacatcaagaagaaggcgtgctcatgcggagataatggggaagcgagtcgccataccaacgatggggaagcacttgcaggcagcagctgcattcacaagctcttttccaatgctcgagaaagaagccagttcctctgctgcgcctatccttgcaaagcatcgcacatagagcacaccatgaaaacaccaaagctgaagtttgacagggtggatctgtccacaagaatgaagcacatcgtcgagcagctaaaaccagtctgcgccaaggtctccaccatccttaatctggagttgttggaatcaaaccgcaacattggcctcatgagtctcaatgctgcgctttcccggatgccagggcaagcaccttttcttccaagcagcgttgctatgagccggcctgtaaccacttcagagtttatagaccctaaatttcatgggaggatgagtgagataaataaaattattggcattactcggggtgattattgtggcaaagacctgaccatcattccaattgttggttcaggtgggatatgaaagacaactctcactcagcatatatacaaggaggtacagaaccattttgatgttaaggtttgggtctgtgtctctctcaatttcaatgtgtatagattgaaagaggagattgccaagttaatgcctgaactcaaagatgagaaatctggtggcccagacgatttaattgagcaaaggttgaaatcaaagaggtttttacttgtcttggatgatatgtggaattgtggtaatgaggatgagtggagaaggctcttagcacccctaagaaaagcacaatcaacgggaaatataattctagtcaccactcgttttctagcagtcgcagaaatggttaaaacaattgatcattcaatacagttggaagggctagaatctgaagtgttttgggaactattccaagcatgtgtatttggtgatgagaaatcaataggcaatcacgtggacttacttgtcactgggaagaagatagcggaaaaattgaagggctcccctttggcagcaaaaactgtaggacggttattgagaaatcaccttgacttggagcattggacaagtgtcctcgaaagtagagaatgggaactgcaaaccggtgagaatgatattatgccagcgctaaagcttagctatgactatctcccttttcatctacagcattgttttacatattgtgctctgttccctgaagattacagatttgaaagtgacgagatgattcacttgtggataggactagacatattacaatcgcggaatcaagacaaaaaagtcgaagagataggactgagctatttgaatgatttggttaattatggattttttagaaaagacatgaacaaaaatgggtctccgtactatacaatgcatgacctactacatgagttagcactaaaggtttcatcatatgaatatcttgctataagtagttctagtgtgagaagtgtgcaaattccaccatctgtacgacatttgtctattgtgatagacgacacggatgtaaatcatagagtgacttttgaaaatgttaagaaggattttagcactct

SEQ ID NO: 17274 - DNA, 2399 bp, Oryza sativa
  ref <308>: DATABASE ACCESSION NUMBER: AK067728
  ref <309>: DATABASE ENTRY DATE: 2001-12-06
tattttcctagtggcgagctcgaggagagagagagaggaggaggagaggtggttgcgccttgcgcggtgaaagggtagttaccgccgcgggcgactccggcgaggaggggcgaggggcggagctagcggcgggggaatggggggtggagtggaggagaggaaggtggtggacttggaggacggggacggggaggaaggggaggatgcggcggcggtggcggcggggtcgagcagggagacgcggatgctgccgaggatgccggtgcgggtgctgctcgctgagggcgacgactccacgcgccacatcatctgcgcgctgctccgcaagtgcgggtatcgagttgccgcagcctctgatggtgtgaaagcgtgggacatactaaaggaaaaatctttcaatatagaccttgttttaactgaagttgaacttcccttgatgtctgggttcctgctgctctccacgatcatggaacatgacgcatgcaagaatatccccgtcataatgatgtcttcaaatgattccgttagcatggttttcaaatgcatgctaaagggtgctgcagatttccttgttaagccaatacggaagaatgaattaaggaacttatggcagcatgtttggagaaaacaactgtccagcggtgttcttgatgtgcagcatactcaacaagaagataatcttacagaaaggcatgagcagaagaccggagtgacgaaagctgaacatgtgactgaaaatgttgtccacaagaacatggaatgcagtgaacaagaaagtgatgctcaaagttcatgtacaaggtcagaactggaggctgacagtaggcaaaccaacaatttactggaatataagcagccaatgggaaggcatttctccaagcctgaccacaagaacaccgagaaaaatggagggactaaaattcatgcatctaatgatggcaacttgattccacggagggaagaggatgcatcactgaggaggatgacatgttcaaatgatattaattgtgagaaagcttccagggatatggagctggttcatattattgacaatcagcagaagaataacacacatatggagatggatgttgcgagagcaaattcccgtggaaatgatgacaagtgcttttccattccagcacaccagttagaactttctctcagaagatctgactacagtagattagagagccaggagaaaaatgaacgaagaacactgaaccactcaacttcatctccattttccttgtacaactgcaggacagcatcatctaccattaatgctggtgatgctcaggcatgcagcacctcggcaacacatatagatcttgaaaacaaaaatggagattccaaaactccctctcaagacaagagggaaacaaaccaacctcccattagagttgtaccatttcctgttcctgttggaggactaacatttgatgggcagccattctggaacggtgcacctgtggcatcccttttctatccacaatcagctcctcccatttggaatagcaaaacatctacctggcaagacgcaaccacacaagcaatttctctgcagcagaatggtccaaaagatacggatactaagcaggttgaaaatgtagaggaacaaactgctcggagtcatctaagtgctaatcggaaacatctccgcattgaaattcctacagatgagccgcggcatgtttctccaaccaccggtgaaagtgggagcagcactgtgctggacagcgccagaaaaacgctcagtggcagtgtctgtgacagctcttccaaccacatgattgcccctactgaatcatcaaatgttgttcctgaaaatcctgatggtttacgccacctgagccaacgagaggctgcactgaacaagttccggcttaagaggaaagacaggtgctttgagaagaaggtgcgataccagagcaggaagctactagccgagcagcgaccgcgggttaagggtcagtttgttcggcaagatcatggtgtccaagggagctagggctgtccaaacttcaggagattgctgtgccacggttatcctggtggtcagtgtcagattttgtttgaagagtgaaagtatgattgccctgacctacagtcagcagtgtatggtggtgttgcatatatatacaggctaacttcgtgtgctaggttaggccatggacctcgtacattgtagagtttgtcagtagggatcatattttgcttcagatctagataagctgcgtttatcatgtagcacacgtatttatgttttctaaattgtatctagccaacagttaacgtgtaagctggacgtgtgtggatgtaaggtgtcaaggatatccaaagacaaagttcttttgtacagtttcttacactgaacatcgttggtgtagtttcatactttc

SEQ ID NO: 17275 - DNA, 4032 bp, Oryza sativa
  ref <308>: DATABASE ACCESSION NUMBER: AK067729
  ref <309>: DATABASE ENTRY DATE: 2001-12-06
ggttggggcgacttcgtcgagcacgcgtgccggtactgcgggatccacaaccccgcgtgcgtcgcgcgctgcaacgtgccgtcctgccgcaagtggttctgcaactcgcgggggaacacgtccggctcccacatcgttaaccacctggttagagcaaaacataaggaagtttgcctacacaaggatagtccgttgggtgaaacaattcttgagtgctacaattgtggttgtcggaatgtattccttcttggttttatctcagcaaaggcagagaatgtcgttgttcttctgtgcagagagccctgtttgagtgttaatgcattgaaggatatgaattgggacctcagtcagtggtgtcctcttattgatgacaggtgtttcttatcatggcttgtcaaggttccctcaggacaggagcagctgagggctcgtcaaattagtgcgcaacaaattaacaaagtggaagagctctggaaaacaaaccctgatgcctctcttgaagatcttgaaaaaccaggtgtcgatgatgagccccaacaagtggctctgaagtatgaagatgcttaccagtatcaaaatgtgtttgctccactgataaagcttgaggctgattatgacaagatgatgaaagagtcacagagcaaggacagcttgaccgtgcggtgggatattggactgaacaagaagcgcatagcctatttcgtgtttccaaaggaagacaatgaattgagacttgtcccaggagatgagctgcggcttcgatattctggtgattcttcacaccctgcatggcagtctgtgggtcatgtgattaaacttacggcacaagaggaggtagcacttgaacttcgtgctagtcagggagttcctgttgatttgaaccatggattcagtgtggattttgtctggaagagtactagctttgataggatgcagggggcaatgaaaacttttgctgtggatgagacaagtgtcagtgggtacatataccatcaccttttgggacatgaagttgagcatcaaataatacgtaatacactaccgagacgctttggtgcaccaggacttccagaactaaatgcttcacaggtcttagcagttaaaagtgttctccagaagccaattagtttgattcaaggtccacctggcacagggaaaactgtcacatctgctgcgatcgtgtatcacatggcaaaacaaggccaaggacaggtccttgtatgtgctccaagtaatgtagccgttgatcagttggcagagaagataagctctactggtctcaaggttgtcaggctatgtgcaaaatctagggaagctgtttcatctcctgttgagcatttgacacttcattatcaggttcggcaccttgatacatctgaaaagagtgaattgcataagctacagcaactcaaagatgaacaaggtgaattgtcaagcagtgatgagagaaagtacaaggcattaaaacgagctactgagagagagatattacaaagtgctgatgtgatttgttgcacttgtgttggtgctggagaccctcgtttagcaaacttccgattccgtcaagttcttattgatgaatctacacaggcaacagagcctgaatgtctcattccattggtgcttggtgtaaagcaggttgttcttgttggagatcattgtcaactgggcccagtcatcatgtgcaaaaaggcagctcgtgcaggattagcacaatcgctctttgaacggcttgttatccttggagtcaagcctttcaggctacaggtacaatataggatgcacccttgtctttcagacttcccgtccaactgcttctatgaaggcacactgcaaaatggagtaactgtaaacgagagacagacacctgggattgattttccttggcctgttccaaatcggcctatgttcttctacgtgcagatgggacaagaagagatcagtgccagtgggacatcatacctcaatagaactgaagctgcaaatgttgaaaagattgtaactacatttttaaggagtggtgttgtaccaagccagattggagttatcacaccttatgaaggacaaagggcatatattgtgaattatatgtcaaggaatggctctcttcgccaacaactatacaaagaaattgaggtagcaagtgttgattccttccagggaagagaaaaagattacataatcctgtcttgtgttagaagcaatgagcaccagggtattgggtttcttaatgatccacgcaggttaaatgtcgcattaactcgtgctcggtacggtatagttattcttgggaaccctaaagttctaagcaagcagccactctggaatagtttattgacacattataaggagcatgagtgtttggtagaaggacctttgaacaacttaaagcagagtatggtgcaatttcaaaagccaaaaaagatctacaatgatcgacgactcttcctgggtggcggtcaaggtgttatgcaaggagctagttttggtgctgcaggcacaaacccagtggcagataagagaagtggtagggggaaagggcattcctttgttccatttggcccaccaaatggggctcataaacctggtgtgcacccatctggctatcctttacctcgtatgcctttccctccatttgctggggctcattctcaaccctatgctattccaacccggggatcattgcacggaccgattggagctgttccacctgtgcctcaacctggaaacagaaactttggacctcgtggaaatactggtggccctattggtgggcaccttgctcaccaacagagttctcagcaagctatgggaggcatggggtcagcttttaactttcctggcctggagaatccgagcagtcagccttctggtggaggtccaatgtcccagactggattgatgacacagatgcctgtccaaggtctcagtcaaacattccgcgatgggttttccattggtgggatgtctcaggacttctttggagatgatttcaagagccaaggatctcatgtggcatacaacattgctgatttttccactcaggcttctcaaggaggctatggtgttgactactctcaaggaccccaatctggatatcctgggaattatttgaaccaaaatgcacacccagggtattcccatatgggtgcagcaaatgacattgtctctcaggatcacatggcccatggttcacatggaatgtttacacaagcgggatacaatgactcttcacaagatgagtcatcacagatgcattttggaatggctggtcctggtcttcagtctcagcccatgatgaacccgctctactctcagtcatatgctcattacaacacccaaccgcagtctctccaacctcctccccagtgatcaggaaagcttgtgatataattgctgaagccgcattaagttttggaagtttgatgggttgtatccttggcccacagcagcttggttgtgcctttctgcactgtaatgcagaaacgatggtgcatagacatcagttgcaagtattgggcacaagcatatgttggagcactacatggatatttattgaggcaagctttgtacaagatggctatggctgtcgaccattgaccattgctgaggagcacaaggattgcaacacatctctttcttgtcatggtagttcacagtggggcttgacaacaagaggtggcaacttgtgcactgagagatgctgacgacgctacccacatcgcttcacctgtatagaagacaaaatggagcttatagtggtacgatgtcaatacttcaggattggctggcgccgtgaagtctaaggtgcagccgctatcgcctgcctccatggtaccacgaaaacgcttgcagattggctttgtataggggtatagatggggggtggccagccctttcagaactctcgcacatggccattatatttatctgaacattatgtatgctttctttatagtttttgatatttaggttcacagaaatgatgtttggtgatcttgcctgaaagaacgaatgctagagcttgtagcc

SEQ ID NO: 17276 - DNA, 2540 bp, Oryza sativa
  ref <308>: DATABASE ACCESSION NUMBER: AK067730
  ref <309>: DATABASE ENTRY DATE: 2001-12-06
ggcgttcttcttgttgttccttgaatctgtttttgttgttgttgtttggcgattcttgaatttgttttggggtatttggcgatgggaggaaccatgtttcttgtttggtttttgggttcaggtggccattcttgatgaaaaactgagtgtttgagtttgagcagtgcaatggagttaccatttttgttcttctgattggattctttgtgatggttgatgtttttgttcagacaatggtttcaaggttctgtgattcttcagaccccatatcttaaaacctgttgtattgaagtaagcaaaaaaacaaatcttgatcaaggacagcctagttgccaatttttctttgcaaatctgaatgcaattcaatctctttcttccagcaaatgcgtgcagctttcccccagtaaccacaggcttatctctgacactgatttaactagattttgctaatctctttgatactagtttgtctgctaaaatagagtgcatgtgaggttgatgaaaattgatggtgaccttgctgattgaaactacacagggtgttggtagatatggaggaatcaaggtgtatgcggtgctcggtgatgatggagctgactatgcaaagaacaacgcatgggaggccttgttccatgtcgatgacccggggccaagggttccaattgcaaaaggcaagttcttggatgtcaaccaagctcttgaggtggtccggttcgatatccagtattgcgattggagggcgcggcaggacctcctcaccatcatggttcttcacaacaaggtggtagaggttcttaatcctttagcaagggagttcaagtcaattggaaccttgaggaaagagcttgcagaattacaggaagaattggcaaaagctcacaatcaggttcatctgtcggaaactagagtatcatctgcccttgataagttggcacaaatggagacccttgtcaacgacagactgttgcaagatggaggctctagcgcatctacagccaagtgcacttcccttgctccaagcacgtcatcagcgtcccgtgttgtaaacaagaaacctcctcgccggagtcttaacgtgtctggtccagtgcagccatacaatcccagtctgaagaacttctggtacccagttgctttctccagtgacctaaaagacgatacaatggtgccaatagattgttttgaggagcagtgggtaattttccgaggaaaggatgggagacctggatgtgttatgaacacatgtgctcacagagcttgccctcttcatcttggctcagttaatgagggcagaatccaatgcccttaccatggttgggagtattcaactgatggaaaatgtgagaaaatgccatccacaaagatgctcaacgtgcgcatccggtcattaccatgctttgagcaagaaggaatggtttggatatggcctggcaatgacccaccgaagtcgactatcccttctctgctgcctccttcaggatttacaattcacgcagagatagtgatggagctaccagtggagcatggacttcttctggacaatctattagatcttgctcatgctccttttactcatacatccacctttgccaagggttggagtgttccaagcttggtgaagttcttgacaccttcatctgggcttcaaggatactgggatccatacccgatcggcatggaatttcgaccaccatgcatggtgttgtcaaccattggcatctcaaagcctggaaaactagaggggaagagcaccaagcaatgttcgacgcatctccaccagctccatatctgtttgccctcctctaggaataaaaccaggctgctctaccggatgtctctcgacttcgctccatggatcaagcatgtccctttcatgcatatactatggtcacattttgctgagaaggtcttgaatgaggatcttcgactcgtgctcgggcagcaagaacggatgatcaatggcgcaaatgtctggaactggccagtatcatatgacaagcttggtatccggtatcggttgtggagagacgccattgagaggggagtagacaggttgccattcagtaaccaaagtgagagtggatcatagtagctgcattgccaatagcctcttttcaattcttgtcgtatttcttggcgagatgaagatgaagatgaagatgatgatggcagaactagtcagtggatgtatatgcacagtttgtttaggcgtgcgtccctgcatggttggttcaccatctccctgagcttcgttgcagattgaattgggttctggagaggaaaggctaatggaaggagagaatgataggcgacgtcattctgtgtaattttaagtgtacactagcgacagcatcacgggatgcaattgtaatctgaggttgatttgtttttcttcttttttttttcctccccttttacccatgtaaaagtcgatcgcatgtcacgctatgatgcatatatatgatcatactattgattattgagccatgaagaacatgtagcacgttaatcagagagacatggcttgagtctaaacgtcg

SEQ ID NO: 17277 - DNA, 3432 bp, Oryza sativa
  ref <308>: DATABASE ACCESSION NUMBER: AK067731
  ref <309>: DATABASE ENTRY DATE: 2001-12-06
gagttgcatttcccatttcgattcgagactcgaaaacccaccacccctctctccctccctctcgctcgcctcggctcggctcgccgtctgtctctctttcagatcacatcaaagcgggcaccagcaccagcaccagcaccaactcctctctagggtttggtaaaaacctccatttcctccgcggatcgaagggaggctagggttccgatcgagaggggaagctttcgggtactcgtttcagccatgatgtcgcggtcgtacaccaaccttctcgatctcgcggaggggaacttcgcggcgttgggcccgggaggcggcggcggcgggaggcggaggtcggggtcgttcgggctgaagcggatgtcgcgggtgatgacggtgcccgggacgctgtcggagctggacggggaggacgactcggagcacgcggcgacgaacagcgtcgcctccgacgtgccctcgtcggtggcgggggatcgagtcatagtggtctccaaccagctgcccgtcgtcgcacgccgccgtcccgacggccgagggtggtccttctcatgggacgacgactcgctgctcctccagctccgcgacggcattcccgatgagatggaggtgttcttcgtcggttccctccgcgccgaaatccccgtcgccgaccaggaagaggtctcccaggcgctgctcgatcgcttccgatgtgctccggtgttcctccccgaccccctcaacgaacggttttaccaccgcttctgcaagcgccacctatggcctctgttccactacatgctccctttctcctcctccgcatccccgagtccctcctcctcctcctcctcctcctcctccccctcatcctcatccggcagtggccacttcgaccgcggcgcgtgggaggcctacgtgctcgcgaacaagttcttcttcgagaaggtcgtggaggtcatcaacccagaagacgactacgtatgggttcacgactaccatctcatggcgctgcccaccttccttcgccgccgcttcaaccgcctgcgcatcggcttcttcctccacagccccttcccctcgtcggagatctaccggaccctccctgttcgcgaggagatcctaaaggcgctgctcaattgtgaccttattggattccacacttttgactatgccagacatttcctctcttgttgtagtaggatgctgggaattgaataccagtcaaagcgtggatacattgggttggattactttgggcgtaccgttgggatcaaaatcatgccagtgggagttcatatgggtcaattgaagacggttctgagcttgcccgacagggaatggagggtctccgagctgcagcagcaatttgaggggaagactgtgttgctcggtgtggatgacatggatatcttcaagggtatcaacttgaagcttcttgccttcgagaatatgttgaggacacatcccaagtggcaggggcgggcagtgttggtgcaaattgctaatccggcccgtggaaagggtaaggatcttgaagccatccaggctgagattcatgagagctgcaagaggattaatggagagtttggccagtcaggatacagccctgttgtcttcattgaccgtgatgtgtcaagtgtggagaagattgcctactacacaatagcagaatgtgtggtggtgactgctgtgagggatgggatgaacttgacaccatatgaatatattgtctgtaggcaggggtctgactccacatcagaagtgaatggaccaaagaagagcatgctggtggtatcagaattcattgggtgctcaccatctctgagtggtgctatccgggttaacccatggaatatagaggcaaccgcagaggcactgaatgaggccatatcaatgtcggaacaggagaaacacctaaggcatgagaaacattaccgttatgtcagcacccacgatgttgcttattggtcgaaaagtttcatccaagatttggagagggcttgcaaggaccacttcaggaggacatgttggggcatcgggttggggtttggttttagggtggtggccttagatccccatttcacaaagcttaacatggattcaattgttatggcttatgagcggtcagagagtagggctatatttcttgattatgatggaacactggtgccacagacttccatcagtaggacacctagtgcggaagttttgaggatcatcaataccctgtgctcagataggaggaacaaagtttttcttgtcagtgggagacgcagggacaaattgggagaatggttttcctcttgtccagatctgggcattgcagcagagcatggttacttcttaaggtggactagagacgaagagtggcaaacatgtacccagacctctgacttcgggtggatggaaatggccaagccagtgatgaatctgtatacagaagcaactgatggatcttacattgatcctaaggaaagtgctttggtgtggcatcaccaggatgctgacccaggatttggatcctcccaggcaaaggagttacttgatcatctggaaagtgtattagcaaatgaacctgtttctgtcaaaagtggccagttcattgttgaagtcaaacctcagggagtaagcaagggagtagtagctgagaagatactcgtctcaatgaaggagagaggaaagcaggctgactttgtattatgcattggtgatgacaggtcggatgaggacatgtttgaaaacattgctgataccattaaaaagggtatggttgctacaaacacatcattgtttgcatgcactgtgggacaaaaaccaagcaaggccaaattttacctggatgatacgtttgaagtggtcaccatgctgagcgcactggcagatgctactgaaccagaacctgagactgatcttaccgatgagtttgatgaactggccgtgtctgtctcctcagttgatattgatgatgaacaaacgcccagtgataaactgatcggaggatagtagtcaaggttgcttatatctgcagattgtcatgattaattcaaccatctctatacaatttttgatgaatgtgaaagctgggtactcaaagaatgactaacaccaggccctacgaatgctccagtgtgaagttaataccgtggagtgctcgattctccactgggggcaaaagccaatacaatcttgtgctggaaaagtaggtccatatgtccatagctgacttcacttttctttgcacgtttctgttttaactttttccatatcaagtaaaatggaaagcttcacggaaggcaagtgaatgtatgtatggcttgcacatgagaaagtttccacgtgcagcttgtgatgatgtgatccccccgcattaacgcgtaacgcggtgcattctttttttgtactcttgaggtagtagcaaatgtgaatgaagtttgtgctcgttgtttgatt

SEQ ID NO: 17278 - DNA, 1970 bp, Oryza sativa
  ref <308>: DATABASE ACCESSION NUMBER: AK067732
  ref <309>: DATABASE ENTRY DATE: 2001-12-06
gggttccccttcctctctcatcagcacacactgtcaccacaacagccaccaactcctctcaacttcttgatccggcggcggcggcaagatgttcggcggcggcggcggcggcgggaggaagccgctggactacgaggagctgaacgagaacgtgaagaaggtgcagtacgcggtgcggggggagctgtacctgcgcgcctccgagctccagaaggagggcaagaagatcatcttcaccaacgtcggcaacccacacgcgctcggccagaagccgctcaccttcccccgccaggttgtggcgctgtgccaggcccccttcctgctcgatgatcccaacgtcggccttatcttccccgccgacgccatcgcgcgggccaagcactacctcgccatggcacccggtggactaggtgcttacagtgattcccgaggtatccctggtattaggaaggaagtcgccgagttcatcgagaggcgtgatggttatccaagtgatccagaacttatttacctcacagatggtgccagcaaaggtgtgatgcaaatgctgaataccattatcagaaatgagagagatgggattctggttcctgttccacaatacccgctttattctgctgccatttccctctttggtggttctctcgtgccatactacttagaagaagaggctaactggggacttgacttcgtcaatctccgacagactgtggcgtcagcgcggtcaaagggaatcactgttcgagcaatggtgattatcaacccaggaaaccctactggccaatgccttagtgaaggaaacataaaggaacttctcaaattctgcttccatgagaacttagttctgcttgcagatgaagtctatcaacagaacatttatcaagatgagcgcccatttataagtgctagaaaggttctgtttgacatgggtcctcctatgagcagggaagttcagctggtttctttccatactgtgtcaaaaggatattggggggagtgtggacaacgtggagggtattttgaaatgacaaatcttcctcccaagacagtagacgagatctacaaggttgcatcaatcgcactcagtccaaatgttcctgggcagatctttatgggtttaatggttaaccctcctaagcctggagatatctcttatctgaagttttctgctgaaagcaagtctatcctcgagtctttgaggaggagagcacgcctgatgacagatggtttcaatagttgccgaaatgttgtctgcaatttcacagaaggagctatgtactctttcccccaaatacgcttaccaccaaaagctatagatgcagccaaaagggctggcaaagcggccgatgttttctactgcctcaagcttcttgaagcaactggaatatccactgttccagggtcaggtttcggacaaaaagaaggggtgttccacctgaggacgaccatcctgccagctgaggaggacatgcctgccatcatgaccagcttcaagaagttcaacgacactttcatggatcagtacgatggctactccaggatgtgaaatgaaaacaagatgagcactaccccaggagaagagagaaagaatctgcctcagcgtggctgatcgagcagttataattaaaaggcactgttaattaattaattaatcaatcaatcgaaaggctaattatttgctgcaacaatctgtaactcgatctactgaaggaaaaaaaaaacttcttgtccttgatatgcatgatgtatagataaaattatttctgctctttgggaattgaataatacgggcgcacccaccggttacagtctactatacatggtcctgtctgtaaggctgcagtagcgaactatttctatgttttgatactgtgaacaagttgcttggcaagtcacttgtgctggctgaaatataatgcagatcaatatatgatcagatcaatgcagaattatacattggtctctaaatt

SEQ ID NO: 17279 - DNA, 2353 bp, Oryza sativa
  ref <308>: DATABASE ACCESSION NUMBER: AK067733
  ref <309>: DATABASE ENTRY DATE: 2001-12-06
cctctccctcccccaaaaatccccgagatgccgaagaggacctcctcgcattcccccaccgtctccgccatgaatcccctcctcccttcctcctccttccccaaattcccccacccggacccaaacctcagctccccaaaccctagcccgtgtagctacctcctccacgccgacgccgacgacgaggcgctgatccaaatcccgtgcccgaaccctagctccggcgcggcctcctcctcctccgtcgtcctgccgcccatcgacccggcgccgcacatctcatcgcagttctacaccttcaccgccgagtcgcacgcgctcatgctgcgatgcgtcctcgccggccgccccgcggccgccgacgaggtccgctccgcgacgcccccctccgtgctcgcctcgtggcgggcggtgtggaaggaccggaacgaggacacggcctacctcaccgcttggaagcgcatccaggacaagctcggcgcgtcggccgacgggcggtccctccacttcaagtccaaccctgggcagcgcgtctcgcacgtcggccagtggcgggacatagtctcggaggcgcacgccgaccccgacctgctccgccatctcgggctcaaggacaccgtcgaccgaatcaagcagtcatggaccgtgggtgccaaattctacggcattccggagtcattcgtccgtgtttgtgtctctgcatgtgctgtatgtaaggccgcacctgcgggacagcctgattttgctatgtcatcgccagggcgggggaaacggcgccgcaggtttgaatatacggagacactagatgtgcccgcgcgagatgttccacgccgactgcaacagttggctgctaagcataaggtggttctctgtatcaggcagaagtatataaggcataaaccattcatggccgaggtgaaagattatgcatgccaccgtgctggggtgccaacttcaagtggtgtgaatgctacgtcttcttcaggaagtgtccctgatgggaagaagacacgagtattgaagcgggaaccatatcaatcaaagaggtgtggttgtgggtttcgtattcgggcaattgtgccaatagctaattacaatgagaaagacaagagttttgtatacgaggaggagggtactgcagtgttcaagctttatgcagtgcattcagggcatgagccagggccacttgatggcaatgcccgaattgttcataggttagttgggcataagggagctcttgagttcgatccagacatttatggtgtcagtgaggaaggagatcctaactttacgattaagggagattttgatgttgaaactgatgattcacatcttgcagttttgcagcaaattcgggatctcaaaacagaggttggcttgttagaagggaaggtgggtaagatgcacccagagcttttgggttcactatccaatgagctatctgagtgtttgcacaggatcaggaagtttaattttgatggcaatgtctgccagccagaagatacactgatgataggcaacgaggaggttcctggatgggggccagctgacgtttctcaccatttagatcagcatgacggtgcattctgcagggatgatgagatgcttgatgatgacgatactgattttggttcaagtcttgggcctattgtctcgtgggatggaatgacggcagaatgtgaggataggaagatgctcatgagtgatagtccaaagtgtgacaaatggatgctcaaggaagacgtgggcgactttgttgagaagagtattcttaactgtggtgatgacgatggtgtggaggattcaaaaattatcaagccattgatgcatgatgagaccatggtagctgacccaggtttggtaggtattcatgtagaaggattctactctggagccaaatggtatgattcaccggtaggtttggattccagtggtgatgcagatgtcagttttagacatggtggacttgtgtgagatgtgattgtccctgataccaggaacatcatgtaaattctgtatacaggaggacatcagcttgtaccaatttaatgtagtatctataggtagagcttgaaccaaagtgacctgcctgccctgatatatacatgctgcatttatcgactcaacctttgtttaacttatgtatagtccccgtgtgggtttccatcttgttacaagacaatataactttggttctgttcttgattagctatttagtcataacttaatgttttgtagaactctcaccctccctctctctctctcacgtgcgtgtgggcacgaatgtgcatgtgcattttgtaaatttaatgcaaggttttgcacacaataacatgctgtctctttactttgc

SEQ ID NO: 17280 - DNA, 1650 bp, Oryza sativa
  ref <308>: DATABASE ACCESSION NUMBER: AK067734
  ref <309>: DATABASE ENTRY DATE: 2001-12-06
gggtaaggcaatgcgcttcgcggcggcgctgcgctgctccctcgcacgcgcgtgaccgcgccgccgccgttgcctcgcctctcctcgcagcctctctctgcctctcctcgtcgccactgagcactgggtctcggtgccgccgccgccgtccgcttgtcccgagccgcgtaggccggaggacgggggcgcacaccaccggtccccgccgcggcgccgcatcggcacagccacagaccaccgccgagcgaaggcgtccatctgccgcaccgccaccggtcgccagctccgggagctcgggaaccccgtctgactggctccctctcgcactgtcgcctgaccctcatcccctgcccgtcgctgtcgaccgccgttcgcggcttctctaccctccgcgccgcggctcccggctgccgtctcctgctcctacaggaccaccggacgaaaatttcttgttacgccactacttcataagctactgcgacgatctctcttcctaggcacctccacccggtggcctggctacctgctacaccgattcaccctttacttgggtattgtttcccccatttgcaaaatgctgcctaaggatacttttgataatctccaagccaaggttcaaatgtgtttcgttaggataatagctatgagtgcaggaaaaccgactttatttgctccaggaatagttattgcgaagaagaagctatcatgctacgtcataacagacaaggggacattttgttatggttctgaagggctctatgctgctgtttttcctggcttgaacatggagagtgtggcgattaactttaccgatgtatcaattgctgatagttgtctctttcatgctaagcaaaccaaaatgcactaatccattagctgctgtgaaaatctgtgaatctggaccgttgattaatgaggatgtttacaccttgggatatcagaatccaaaagtaccttttatctcctggatcggtccggtttgtaagaaaggcggattttactcatgattgtgctacttccttgtgcctcatttgggtcccctgtctttactgttgatggtcttttggttgggatctgcttcgacaatagaggtgctgtccgggcctataaggtgcaatctattatacaacatgttcagaagattcaaacacagataaaaagcaaggcaatcaaggacattttgcagccttttatggaccaaaagaatgttttattagagaaaaggaagccaccagttgatactagtgccggagcttcaaaaaagagtaaaaccacacgttgatagcgtcagtctatcagagcttcgaaaaaagagaaaagcccttagcaatgcacataaaagatgaaggcgcaagctaacagatagacagtggttactttgtgcgtggatattcgcatgctctatgactcgtcatgcctcaatgatgcttcttcacccgttttcatttggctgatggaaaatcttttggaggccagcttgtggattgtaggtggctgccacaaaattgtgattcccttctaggggcaatccagggctgttaaaacctctcaagctttcaaattgtagcagctgtgtggtgatatgcttcctcagattacagattccggataccctattggtttctttatgcttcctcagatttcagatcc

SEQ ID NO: 17281 - DNA, 2305 bp, Oryza sativa
  ref <308>: DATABASE ACCESSION NUMBER: AK067735
  ref <309>: DATABASE ENTRY DATE: 2001-12-06
acaaaaaaaaaaaaaaaacggaaaccctagccgccaccactcccgtgacggtgcgtcgcttccccctcctcgcgccgcctctccccgccacaccgacaccctgcgcagttgcgccgccgctccatcctccagcacctaacctcgccccgacaccgccacatgcttcgccgcatgtcctccacttcctctctcttcttgctgccgatgccgctgggctcgagctagcgagtaggtcgatctggctttcaatcagcggccagatctggcgaagagaggaggagcgcatggcggagcgggcctgaagtgtgtagctggcaacgtccccggtgtggtggtggttcactggttcaggtggacaatgcctcgagcttgctagaaatggcgttggcatggagttctccaaggtgaggtggcgaggtatatgtctggcggtgcatggcttgattttcgagtgatgtgggtgctccataagcagtggcaaagctcctatttttttctggccaccagatggaggaggagttgtctcccatcgcctagccgttctctggatgcagcaagccatctcccattagtatctgatttttgccgttctctggatgcagcaagccatcttccattggtatctgattttcgtttgtattccccacaaaaatttgaggtgtttgttttgtgtggtgtcctgcctacaaggtgttcgttgttttccctacaagcatgggaatgtggcaatcttacatgacctgttagtgtgtaagcctgaatggtttgttgggctttagatttggatcctagcttccacttaatttgccctaaacatttgaacctaccttaatgttagcagttaaaatatctaatgaaatgcatcattgaaaatattcatttgtagttagctctgtagatgcatgcatttcatatagataatgattgctgataactgcttcttttgctagaatatttatgtgactacctaaatagctaacaaacttctccaattataatcagtcattgcttgtccctgtgattcataaatctgtatggttcttgtgattcctgattgagttttcaaggaaaatactaacattaggtggggaatactgtgcaaatgattctgtcacagctgaaagacactctaaaaaacctctcatgtatttcacatttgaatgcaccattcaggtgggaaggagattacacatttgttcattttattttcctttttttagttagtttgattagattaaggtgcttaacgagctggatttgctgttaaattttaaatgatttaaacagcgggccatgggttcactatttgctagaggtgttcgcatcgtttaattcttacatgcattccttggggtcctacatctacaatcctggttgcctttctaatttgagataatacaaagcatgtacagcctatatggctctatcggttttctgatcacaaaatttgtctgtatacatctattagttttctgatcacaaaatttttgttacaacattgaaaatgctggtctatctatgattagaaactttgctggttatttctgtgtataactgcaatatgatgttatctatatttgcgatacaattctgcaaattgctgattacagaagttgtcttgcaagagttgaaaaggacatgtttatgtgcttagatgttattctggttgcttgatctggcatcctgtcataatttgtttctaacactatcagaacaaaaggatagaatatatgttgcctaaatgctgtaattttcatggaaagaagcttgatgatattgccacctcatcccacaactatcatgtaagctatattggttgtatagaaaaccaagcatttgagaattttttttattgtcaaagattcaaaagccttgccaacccttggtattgtttgtattttctgtatttggtctatttggtagttaagaaattccctacaagtctgatttgatactttataaattcattctcttgcagtcctggagcattgttctgcttgacgggtggacagggataagtgtggccttttgttctgtagctgaaaaagtggaagctatgtaaggaatgttagctagcatatgatcagagtgatctaaggtttcagtctgttggataggattgcgttggcttaatgtttaagcttttgggtataggtggagatctcttagtagctttcttttaagctggtaacccccaagccttttgtcttctgaaaacatctctatgaaaatatttacagtttgtagttcagtaaagcaattgatcaacatgagtattatattttgatatgcgaatgttgttctc

SEQ ID NO: 17282 - DNA, 2265 bp, Oryza sativa
  ref <308>: DATABASE ACCESSION NUMBER: AK067736
  ref <309>: DATABASE ENTRY DATE: 2001-12-06
gagtagtactctcgtaataataacacaataggaggagcagagaggagagagccactgcaccgcgcgtccgcccgcgctccctccctctcctctcctcgcactcgccgtccctcccaatggcctccgctgccgcccacgcggccaccgccaccgccgccgccgtcctcctcgtcgtcttcctcgccccccttgccgccgcctccgactccgaccacaagtaccaatcggaggagaaggttatgctctgggtgaacaaggttggcccgtacaacaacccacaggaaacttacaactactacagccttccgttttgccatccgtccaataaccccgtgcataaatggggagggcttggggaggttctcggtggaaatgagctgattgacagccagatcgacataaagtttggaagggatgttgacaagggtaccatttgttcaattgaacttgatcctgacaaggccaaacagttatctgatgcgattgagagttcatattggtttgaattcttcattgatgatttgcctctatggggttttgttggagaggcagacagaaatagcgataacaaatatttccttttcactcacaagaacatcgtcatcagatacaatggcaatcagattattcatgttaatcttactcaagaaagtccaaagcttattgatgcgggtaaggcattggatatgacatattctgtcaagtgggaaccaaccaatgtaacatttgctcaccgctttgatgtataccttgactaccctttctttgaacaccagatccattggttctcaatcttcaattctttcatgatggttatctttctcactgggctagtgtcaatgattttgatgcgcactctaagaaatgactatgcaaagtatgcccgcgacgatgatgatcttgaaactctggaaagagatgtcagtgaagaatctggatggaagcttgtccatggggatgttttccggcctcctcgcagtttggctcttctttcagcccttgttggtgttggcacacagttgtctgctcttattctgctagtgattttgttggcaatcatcggaatgctgtatattgggcgaggagctattgtcacaacattcattgtttgttatgcccttacttcattcatctctggatatgtcagtggtgcactttattcacggcatggggggaaaaactggatcaaggcaatgattatgacagcatcactatttccgtttatgtgctttggaattggcctagtgcttaacacaatcgctatattctatcgatcattagctgccataccatttggtactatggtggttgtgttcatcctgtgggccttcatatctttccctcttgctcttttgggaactgttgttggtagaaactggagtggtgccccaaataatccatgcagagtaaagactattcctcgccctatccctgagaagaaatggtacctcacgccttctgtcattgccctcatgggaggactgcttccttttggtagcatcttcattgagatgtactttgtcttcacatcattttggaactacaaggtgtactatgtatatgggttcatgttgctagtctttttgatcctcataattgtcaccatctgtgtaacaatcgttggtacatatttcctgctgaatgcggagaactaccactggcagtggacttcattcttctctgctgcttctactgccgtctatgtttacctctactccgtatattattaccatgtgaagaccaagatgtcaggattctttcagacaagtttctacttcggctacactcttatgttctgcctaggtttaggaacactctgcggtgctgtcgggtatcttggatcgacactgtttgtgagaaggatctacaggaacataaagtgtgactaaaaattgaccccggtttagacagatggggcgaaaaactttgtatgtgtggcttgttccgtgaagtgatcagccatgttttggtggccaagaagccagggcagtttatggagtacaaacgttcttcggcgacattgctgggatgccatggtttttgttttcttgtcccttttgttctctttgatccccctctcggtgccacaattttcatgttcaactagccatatatagctgcgatcatagtttagatgttagtatataccagagttgttattcttgagcctcatatctgtgttgcttcacttaaagctgtaagatccatgacatttgttgacctttaatgatgaaaacatctccgaaagacatcattttcagattt

SEQ ID NO: 17283 - DNA, 1375 bp, Oryza sativa
  ref <308>: DATABASE ACCESSION NUMBER: AK067737
  ref <309>: DATABASE ENTRY DATE: 2001-12-06
tagtttgtttgttcgttcgttcccccaaaaaatttggatccgcctctgcagattggtgccttccttccgctggaggcaaccccccccccctcccttgtacgcttcgtcttcgtctccggcgacgagcggaagcaaaccttctccggcgagcagcaggatgcaggtgaagcagaaggtgtacgagctctacaaggggacggtggagcgggtcacgggcccgcgcaccgtgtcggccttcctcgacaagggcgtcctctccgtccccgagttcatcctcgccggcgacaacctcgtctccaagtgccccacctggtcctgggaggcgggcgatccgagcaagaggaagccgtatctcccacctgacaagcaatttctcgtcaccaggaacgtgccttgcctaagacgtgctgtttcgcttgaagaagagtatgatgcagcaggagctgaggtagttctcggtgatgatgaggacggtgaaggctggcttgccacacatggagtgcaagcatcaaagcaagaagaggaggaagacataccatcgatggatacattggatatagggaaaactgaagggataaagtctattccctcatatttcagtgctggtaagaaggctgaagaagaggaggatataccagacatggacacttatgaagactcagggaatgattcagtggctaccgctcaaccttcatattttgtcgcagaagagcctgaagatgacaacatccttcgtactaggacatatgacgttagcatcacatatgacaaatattaccaaaccccacgtgtctggcttaccggatatgatgagtcaagaatgccactaaagcctgaacttgtgtttgaagatatcagccaagatcatgcacggaagacggtgactattgaagaccatcctcacttgtcagcaggcaagcatgcttcagtgcatccatgcaaacatgctgctgtgatgaaaaagatcattgatgttctaatgtctcaaggagttgaaccagaagttgacaagcaccttttcatatttttgaagtttatggcctcagtcatacccactattgaatatgactacactatggacttcgatctgggcagcacaagcagatgatttgttaattgaaggaaagggaaagatcctgtagaaggtgtaccaaggcttatcatggtgccccaaataatcattgcttgttggaaagaattgtatatgcaatatgtgcgtgcatgtgtgctcattcgtttggaaagtaactggaaacaatgcagaaacatcagggctgatttgccatgtacatgtaacactacatacccgtttcacttgaattcgtttgccttccagattgaatccatctgttcttagatacacgttgagtatgcc

SEQ ID NO: 17284 - DNA, 1314 bp, Oryza sativa
  ref <308>: DATABASE ACCESSION NUMBER: AK099014
  ref <309>: DATABASE ENTRY DATE: 2002-08-28
gacccttcttccttctccagctctcgcctctcgcctcgtccttgttcgtcatcgcgctcgctcgatttctcctcctcctctctctcgatcccctctactgcgagagattcccttgcttgaattctcctcctcctcctcctctccctccggtgagcggtggcggcggcggcgaatccgagctcctggtggtgtcgtggggggcggggtgattccgtgatggtcgcccgccgcgctctgcggcggacacggacatgcagcgcaacctctcctccatctcctcctccgccgcgtcgccttcgccgctctcaccggccgacggcttcctctgcgtgaaggacggggtggacgagatgatcaagtacgtggccaacgagccctccgtcgggctctacttcgtccagcagcacgcgcaggcgtccatgcccctcctcctcgacgtcaagggaaaggttgcagaaaagattcatgaggtaacattgcatactgaagatatagaggactctatctgtgcagtgaggtccatggcagagtttggacttccaattgctgatgatatgatcaaggacataaataaatctctcaagataatgtcaaagacccaaccaaagagggggttaatccagaaccccacttgggggttccaatcagggaaaagctcaggaacatgggaagaagatttgggcacaaccgacggaggaagcagccgtaattatttctcttccatgttcaacactgcgaagcagaaggcatccactctcagatggccacagcctgatttcggaacaaaagatgacaccactgaggagtcagagtcatctgcagctcctgaatcatcacaagctggtggacatggtgcatcgacaccctcagatacagagaaggatgatcttcctgtttcaagccagcttttagataacaatacagctactatgaaggagagctcttcgactgatatctccaaatcggtggagaattataacaagttcaaggaagaacaagaactcaaactacaagaatggcttagacagtctgaagaagctgatgataataaagagtgaggtggttctagctggtgcaacctagtacatttgctagagcacataccatgccatgttgtatcctatacatgcttacttgatgcacttccagaacttcagatggtaactgtttatgaagcagagcttgtaatcatgatgaggtacataatttatctgcctattagggaacgctgtaaattgccatactctgtttgccgttgatttatttattgccaaggcacagagatcatcaatgtactgtagaatagcctgaact

SEQ ID NO: 17285 - DNA, 3606 bp, Oryza sativa
  ref <308>: DATABASE ACCESSION NUMBER: AK067738
  ref <309>: DATABASE ENTRY DATE: 2001-12-06
gggggttttgttgttgcaggttcagatcgggagccattccttcaccttcgaccatgtgtacggcagctccggcacgccgtcggcggccatgttcgaggagtgcgtggcgccgctcgtcgacggcctcttccagggctacaacgccaccgtgctcgcatacggccagactgggtcagggaagacctacaccatggggacggcctgcaaggagggctcacacattgggattatcccgcgtgccatggccacgctgttcgacaagatcgacaagctcaagaaccaagtagagttccagctgcgcgtttcgtttattgagattctgaaagaagaggtgagggatttgcttgatcctgctactgctgctgttggcaaacttgagaatggaaatggacatgcaaccaagttgtcggttccaggtaaaccccctgttcagatccgggaggcgtcgaacggggtcataacgttagcaggatcgaccgaagtgcatgtcactacccagaaagaaatgacggcatgccttgagcaaggatctctgagtcgtgcaactggaagtaccaacatgaacaaccaatcaagtcgttcccatgccatcttcacaatcacattggagcagatgcgcaaagcagatcccatcatgactttagatggaatgcctattgaagagatgaatgaagactatctctgtgccaaactccacttagtagatcttgctggatcagaacgtgctaaaagaactggttctgatggccttcggtttaaggaaggtgttcatatcaacagaggacttcttgctcttggcaatgtcatcagtgctctcggtgatgagaaaaagaggaaagaaggcgctcatgttccttaccgggacagcaaactcactcgccttctgcaggactctctaggtggaaacagcaagactgtaatgatagcctgtattagtccagcagatatcaatgctgaagaaacactgaacactttgaaatatgctaaccgcgctcgtaacatccagaataagccaattgtaaatagaaatcctgttgctgatgagatgaaaaggatgcgccagcaaattgaatacttgcaagcagaactcgtttcagctcgaggaggagttgtcttagatgatgttcagggtctcagggaaaggatctcaatgcttgaacagaaaaatgaagacctttgcagggaactgtatgaccttcgcaaccatggttacactgatccttgtgaacctgaactgcaaaaaattggaactggttacactaaaggtgaagggctcaaaagaagcttgcaaagtacagaaccatttgatgtccccatgactgactcagtaagagcaggcagccctaaagatattgatgatgaagtggccaaagaatgggaacacacaatgctgcaggatagcatgggcaaagagttgaatgaattaaacagacaactggagcaaaaggagtctgagatgaaaatgtatggatctgacactgttgcacttaaacaacactttggaaagaaacttttggagcttgaagaagagaaaagagctgtacagcaagaaagggacaggttgttagctgaagttgaaagtctaaatgctgatggacaaacacacaagttgcgagatgcccagctgcaaaaattaaaaacccttgaagcacagattctagacctcaagaaaaagcaggagaaccaagttcaacttctgaaggaaaagcaaaagagtgatgaagctgctaagaagttgcaggaagaaattcattctataaaggcacagaaggttcaactacaacataaaatcaaacaagaagcggaacaattccggcaatggaaggctacccgtgaaaaggaactcctgcagttgaggaaagaggggcggcgaaatgagtatgaacgccacaaacttcaagcacttaatcagcggcagaagttggttttgcagaggaagactgaagaagctgcgatggctaccaaaaggctgaaagagttactagaggctcggaaatcatcaggacgtgacaactcaggcatgaatggtacttctcctggctctcatatgactgagaaatcattgcaaaaatggctagagcaagatttggaagtcatggtgcatgttcatgaagttcgaaacgaatatgaaaagcaaagtcaattgcgtgctgcacttggtgaggagcttgccattttaaaacaagaagatgtcatgtctggtgcagctagtccgcccagagggaagaatggaaactctagggcaaatactttgtcaccaaatgcaagacaagctaggatagcatcacttgaaagcatggtgacaatatcttcaaatactctcgttgctatggcttctcaactctcagaagctgaagaaagagagcgtgcattctctgggcgtggtcggtggaatcagttgcgttcaatggcagaggcaaagagtttactgcagtatatatttaacgttgctgcagatgcaagatgccaagtaagggagaaagagatggagatcaaggaaatgaaggagcaaatgacagagcttgtgaccatccttcgacacagcgaatcacgtagaagggaaacggaaaagcagcttaagcaaagagagcaggcagctgtaactgccactacatctccaggaaacggaaatggttcagtgaagcactctgctgatgactccaacacaccattgtcaccagttgcggtgcctgcacagaagcagctgaagtactctgctggaattgtaaatagccccagcaaaggggttcctgcattcaacaaacaacatcttaagatggttcctatggcacagttgcctgttggcaagaaggtttcaatagcagggcaatcaggaaaactttggagatggaaaagaagccaccaccagtggctactgcagttcaagtggaagtggcaaaagccctggaaattgtccgagatgattcgacacagtgacgaaacgatgacaaggactcgacccagaccccagcttcttcctcatagacctcaaagagtgatgtgaaaaaggcttttcttttcttttttttcttcgtctccacatggactgacacggtttacacagctaactacctccacaagggtaacaatgcagctaaaagctccaggagatctccttcgtgcttcgattttacttagccacgggatcgaaaaaaaaaaagtatatgttcatagggtgactgtctttggatgtaaatttcttgtgcctatatagtgagtgtgaatgttagagatgaaaatttagcgagtgagcgagggagggagtggccgttcttcgcgaaagcactgactgagcacaatgcttcatgtttcagcactcatcaactggtgagatgtcatacttgttgtccttctgcatatgaggaaaaatctgtcgaaggatggcgtcttgtaaagtcctttctggtgtgcttttgtgatcttgcatgggtatagttgcaagaatgatgatgaaagttgagattttgggtgcttgggcagtgcttattttcttgtccttttttcttttttgttgatacaacactaagattacattggtttggtttgtgttaggagtctattgatgtactacagcaacttgtgcccctatattttggccaattgtgt

SEQ ID NO: 17286 - DNA, 3603 bp, Oryza sativa
  ref <308>: DATABASE ACCESSION NUMBER: AK067739
  ref <309>: DATABASE ENTRY DATE: 2001-12-06
gtcttctcttgtcacaacacaatactgcagtgcactgtaaaagaaaggaaagggaaggaagaaaaagcttttgttcatctgctcctttccccccctcaaatccctcccaaatcccaactaatcgcccgatttatcagcccattcctcgcgcaaatccgctccgttagcttctcgccggctattcaaccttggggccatcttttttggggttaaatttggtccagagttgaggctttttctttcgggaggagggatttgggtagcaatggcttgtccaatcgtggagatgtctcgtttctagtcgccaaaaccatctagaatccactagtgttttgggaggtcgctgttgcgggagcagccgccgccttttgtgtgtgtggagtggagatggtgaccgagatggcgatgcgaggtgagccgtggcggcgccaggagggggagcaggcgcaggcggaggccgatcgggaacgcgagctggacctcttccgcagcggctccgcgccgcccacggtcgagggctccatgggcgcgctccacgccgccgccgccgccgacgtgttcctggaggacgagctccgggccgacccggcctaccactcctactactactccaacggcaacatcaaccctcgcctcccgccgccgctgctgtccaaggaggactggcgctccgcgcagcgccttcgccccggcttgggtgggatcggcgacgggaggaagcccagaggtggaggtggaggccgcggcggcggcggcgctggagggatgggtccaggggatggcctcattgggatgcccggtctcgagattggccgccagaatagcttctccggtatctttcaggatgactcgtatcaacacgatacggatagacagggtgccaactgcaatggtacagacttgttgagttcttctaaagtgcagtatggtctacatcgtgagactggagctattagtggccttcactcagacagcaaagcaccatgcttgccagaaaaccagaatgaatcatcacactcatatgcatcaataataggatcatcactttcaagaagtgcatctccagatcctgaactagtgaggagagttcctagtccttgcctccccccaattggtgtgaaacttggtgctacagataagaagaataatgttggttcatcttctttcaattgtagttctcccaatattattgaatctgatgatttggtgtctgctctatctggtatgaacctgtcgtcatcaagagcaatgaacggaaacacaatggaccaatctaagctccatcaggatgtggatgatgttcgtaagttcctttttgatcagtacatggatcaaacaaatggcaatcagcgccattcctacatgaaacgttctgaacaaggacacgtgaaggttcctcaagaatattctggtgcttctatgaatccttctgttatgagaagccagatcaatgctggtggtttcacatcatttaacaactcatcggtgggatctggctttgcttctcctaggcttggatcccgatcaccaggtgggagtttatcttcacggcaaaatctaactggtgcatctaaccttccaaactacgttggaattggaagtccaactgcagcttctgcccaccagatgcctgttgatccactgtatgttcagttccttcgggcagcagaaattgctgcccttgcagctaactgtgaggatcctttgatggatagggctaatctaggaggttcttacatggatctatttggccctcagaaggcgtaccttagtccattgcttcagtcacagaagcaatatagttactacgggaatctcggggttggtcttggctatgctggtaactctttaacaagtcctattcttccctcgtcaccaggtggacctggtagtccacttaggcacggggatcgcagcatgcgctatccatctgggatgagaaattttggtggttcctttggctcctggaattcagatctcggtggtaagatggaggccaatttagttccatcacttctggaagaatttaagagcaacaaaagcaaatcatatgagctctctgaaatcgctggtcatgttgttgagttcagtgcggatcaatatggaagtagattcatacagcaaaagcttgaaacagccagcactgaagaaaaagacatggtttttgctgaaatcatgcctcaggctctcacattgatgactgatgtctttggaaactatgttgttcagaagttttttgagcatgggagctcagctcagataaaggagttggctgatcagctaattggacgtgtcttagcactcagcctccaaatgtatggttgccgagttatacagaaggccatagaagttgttgatttagatcagcagactaaaatggttgctgagcttgatggacaagtgatgcgctgtgtacgtgatcaaaatggaaatcacgttatacagaaatgtattgaatgcattccacagcatgctatccagttcattgtttcaaccttctatggtcaagttgtgatgctatcaactcatccatatggttgtcgggtgatacagagggtgctggagcattgtgatgatcctaaaacccagcaaatcatgatggatgagatcctacaatctgtttgcttgctggctacagaccagtatggtaactatgttgtccagcatgttctggaacatggcaaaccccacgagagatctgctattattgagaagttgattgggcagatagtacaaatgagccagcaaaagtttgcttcaaatgtcattgagaagtgtttagcctttgggaatcctgtggagcgtcaagtcctgattggtgaaatgcttggctccagtaatgagagcgaacatcttgaggggatgatgaaagatcaatttgcaaactatgtggtacagaaggtgttagagacctgtgatgatcagcagagagagatgatccttacaaggataaaagctcatctgaacacactgaagaaatatacttacgggaagcatatagtggcacgcgtggaaaagctcgtcgcagccggagaaaagcggcttgggcttcaaccatcaactgcagcttgaagaataagcgctatctagttgtacagctaacagtggctaggtttgcactggcgtcatgtttttctatctaaaccaacccctactagtacgaggctctgttctgaatggccttgttagaaataaagagagagagtagtagcttgcaccggagagtgtacattctgtagctgaggaactagcacaagggagggagataaaaagaatcttcatgtgtaccgtgtactatgagttctcaaactgtgtaaaaagaggaggagcaaggtgtacaaattttttagaactagagcgaaagagagggctgttgttagctgttttattaaacttttaaaaagccagtcactagtacttttttctttttgaaaaaaaaagaattaatctcagccctgcccggtatcgatgattcgatatcatatcagggcgtcgcgttttgttgtaacatatactactactactgtaccacagatgatgccttgagctgttctgtgggtgaagctggagctattaatctcagctttgctcttttttactact

SEQ ID NO: 17287 - DNA, 1378 bp, Oryza sativa
  ref <308>: DATABASE ACCESSION NUMBER: AK067740
  ref <309>: DATABASE ENTRY DATE: 2001-12-06
ggttgcctcctctctcctgcactcctgctgctactcagcatcgtctccatccatccattcgctttcgcggccgcgcggcaagccggggaatgcgacgctgcgggcgactccggcgccgagatcccagaactgtaacatatctcgtcggtgcgagctggaggaggaggagccattggtatctcgccagcggggcagtgagcctgggataatggctgatacccagttagggtgccatactataggatctcatggcattaaagtggcaaaattccatttgtatgattggatgatacttatctttctagctgttgtttatgggctgttcaacataattgagccttttcaccgcttcgttggaagtgacatgctgacagacttgagatatccactgaagggcaatacagttccattttgggctgttccactgattgcaattgtgctgccctgggccatctttggtggaatttacttcaaaaagaaaaatgtctatgatttgcaccatggcattctggggattctatattcggtgcttataactgctgtgattactgatgcaattaagaatggtgttggtcgcccacgcccagatttcttttggcgttgtttccctgatggaaagcctaatttcaataatgtcactggtgatgtcatatgccatggagaaaggagtgtcatcaaggaaggctacaagagcttcccaagtgggcattcttcaggggcttttgctggtctgggttttcttgcgtggtacttagcaggcaaacttaaagcttttaaacgtgaagggcatattgcaaaactatgcctagtctttctgcctctacttgttgcatcacttgtggcagtctctcgggttgacgattactggcatcactggcaagatgtatttgcaggcggcattataggtctcacagttgcttcgttttgttacctgcaatttttcccatatccatttgatgctgatgctatatggcctcatgctcacttccaactgctagccgagtcacgaagcaacggtaatgaaaactcacacaacatgggatggacagagaccgacgctttccatgaaggcgctggtgctgttgcgctgagagacacaagcctggttctagactcgatggagtctggcaggaggttttgaaacatgtgaaagggaagtatattgaagatgttcattgttctgtcttcatcagagttgaaactctgacgtgattagttaatgtggtatgtacagggtgaaactgaagtgcaggtagagtactatcattattcagagtatttggaactcactattgtttttattcacctttctgtaatgcagtatgccattgttttagtttatgcagaagcatgatatatatataaaaaggatttttgt

SEQ ID NO: 17288 - DNA, 2158 bp, Oryza sativa
  ref <308>: DATABASE ACCESSION NUMBER: AK067741
  ref <309>: DATABASE ENTRY DATE: 2001-12-06
gtgaggagacacgcaaaagcaaagcaaaccactcgccgaacaccaactcctcgccgccgccgccgaggaggaggaggagggagcgagcttgacgccggcgccatggcgggcgggggaggtagggagcggcgcggcggggggaggctgctcgtcggggtgctgctcctgacgctggtggtgtccgggcactgcctggagagcacgcaccaccgcgggctgaagcggcggcggcggaagcacgagatccactcgccgatcaagacggtggtggtggtggtgatggagaatcggagcttcgaccacatcctcgggtggctcagccgcacccgccccgacatcgacgggctcaacggcacgcaatccaaccgcctcaacgcctccgacccttcctccccggagatcttcgtcaccgacgaggccggctacgtcgactccgaccccggccacggcttcgaggacatccgcgagcagatcttcggctccgccgacacctccgccgtgccggcccccatgtccggcttcgcccagaacgcccgcgggatgggcctcggcatgccgcagaacgtcatgagcgggttcaagccggagtccgtgccggtctacgccgccctcgccgacgagttcgccgtgttcgaccggtggttcgcctccgtgcccacctccacccagcccaatcgcctctacgtccattccgcgacctcccatggcctcaccttcaatgcccgcaaggacctcatccatggcttcccgcagaagaccatcttcgatagcctcgaggagaacggcttgtcctttggcatctactaccagaacatcccggccacgctcttctaccagagcctccgccgcctcaagcgcctcgtcaagttccaccagtacagcctcaagttcaagcttcacgccaagtggggaaagctgccgaattacgcggtgattgagcagaggtacttcgattgcgagatgttccctgcaaacgatgaccacccctcgcacgacgtagcgagggggcagaggttcgtcaaggaggtgtatgagacgctgcgagcgagtccgcagtggaacgagactgctctgatcatcacctatgatgagcatggtggattctatgaccatgtgcctacgccggttgtcggggttccacagcctgatggaattgttggccctgatccttactacttcaagtttgatcggcttggagtgcgcgtgccttctttccttatctcaccatggatcgagaagcgcactgtgatccatgaaccaaatgggccgcaggactcctcacaatatgagcactcatccatccctgcaacagtaaagaagctatttaatttacattctaacttcctgacaaagagggatgcatgggctgggacctttgagaactacttcaaaatccggaaaacacccagaactgattgtccagagaaactcccagaggtcacaaagtctctgcaaccgtttggccctaaggaagattcatctctgtcagagtttcaagtggagttgattcagcttgcttctcagctcaatggtgaccatgtactcaacacctacccagatattggcaggactatgactgtgggtgaagcaaaccgctatgcagaggatgctgttgctagatttttggaagctggcaggattgctctaagagctggtgcaaatgaatctgctttggtcaccatgaggcctgcactcaccagcagagcctcaccgtcctctgatttatcatctgaactctgatggattgttctcagatttatccacaattctgcatcatgatttgcaccgcgtcagcttttggttgatgagaactcgtacaatgtgctaagaaaacataggtaggttggtgtacggcaaagtgtgctagtattatgtaattgatagatcttaaacatggctttgtacatagacatcatgatacttgatatctcaagcttttacttcagctgtcctctgataacgctgagatatcagctcagaagtatctgataagatcctactctggataagctggagagggaatttgtaaaccatcgatattcagctctgtacctgcttattcagcagttgaactgcacttctgatgaaatactttatgtacaccagttatagtggtattgaaagatttggcccgtatgaatgtatgatgtttgtaccg

SEQ ID NO: 17289 - DNA, 1869 bp, Oryza sativa
  ref <308>: DATABASE ACCESSION NUMBER: AK067742
  ref <309>: DATABASE ENTRY DATE: 2001-12-06
gcgtgctcggcacgtcggttgttgctgttgctgctgctgctcctcccgttttccgatcgcagccatgggaacccgcagcgtggccttggtgctcctcgcggccgtgctgctccaagccctcctccccgcttcggcggcggagggtttggtgcggatcgcgctgaagaagcgcccgatcgacgagaacagccgcgtcgccgcgcgactctccggcgaggaaggggcgcgccggctgggcctccgcggcgccaactcccttggcggcggcgggggtgagggcgacatcgtggcgctgaagaactacatgaacgcgcagtacttcggggagattggcgtcggcactccgccgcagaaattcaccgtcatcttcgacactggcagctccaacctctgggtgccgtcggccaagtgctacttctcgattgcgtgcttcttccactctcgctacaagtccggacagtcgagcacttatcagaagaatggaaaaccagctgccattcagtatggcactggttcaattgctgggtttttcagcgaggatagtgttacagtaggtgatctggttgtgaaagatcaggaattcattgaagctaccaaggagccaggtcttactttcatggttgcaaaatttgatggcattcttgggcttggatttcaggaaatatccgttggagatgcagtacctgtgtggtataagatggtagagcaaggtcttgtcagtgagcctgttttctccttctggttcaaccgtcattctgatgaaggagaaggtggtgaaattgtgtttggaggaatggatcctagccactacaagggcaaccatacatatgttccagtctctcagaagggatattggcagtttgagatgggcgatgtcctgattggaggaaagaccacaggattttgtgctagcggttgttcagctatagcagactctggaacatcattgcttgctggccccacagccataatcactgaaatcaatgagaagatcggtgctactggggtagtcagccaagaatgcaagacagttgtttctcaatatggacaacagatcctagatctgttgcttgctgagacacagccatcaaaaatctgctctcaggttggtctgtgtacttttgatgggaagcatggtgttagtgctggaattaagagcgtagtagatgatgaagctggggaatcgaatggtctccaaagtggtcccatgtgcaatgcctgtgagatggctgttgtatggatgcagaaccaacttgcacagaacaagactcaggatctcatcttgaactacattaatcagctctgtgacaagctcccaagtccaatgggagaatcatctgtggactgtggcagccttgcatccatgcctgagatttcattcaccattggaggcaaaaagtttgcactgaagccagaagagtatattctgaaggttggtgaaggagctgctgcccagtgcatcagtggattcacagccatggacatccctcctccccgtggtcctctctggatcctgggtgacgttttcatgggtgcctaccataccgtgttcgactacggcaagatgagggttggcttcgcgaagtcggcctaaacgtgttgttgtcacgttcctaatgacgaggtggacgcatacgccgagagaagaagaccgtagcttttaactagcgtatttatccggcgatgtgtgtatatatgcatgctacataacatgtttatgttttccaaggcctgagatggcgcccgtctattttagcttggcaagaatatctcggaccagtctctgttcgaattctcgtactgatatgtgaacttctgataacatgtgcactgtgttttgtgactgaattgctagtcagtccgaaggtt

SEQ ID NO: 17290 - DNA, 2149 bp, Oryza sativa
  ref <308>: DATABASE ACCESSION NUMBER: AK067743
  ref <309>: DATABASE ENTRY DATE: 2001-12-06
ggtcgtcagttgagcctcagctcgcgcactcacgagccgcggcttcactcaccactccccagtcgccacgcctcggcccgacgggatgggaaggggagccccatcctcccatccgccgccatggcgccgcctcctccgctacgccctcctctgcgccctcctccccccctggggcacttccgaggctaatgaacaacttgctgagtttccaccaagaggctggaattcctatgattccttttcatggatagttgatgaaaatacatacatgcaaaatgcggagatcttggcagaaaaattgctcccacatggatatgagtttgcagttattgattacctctggtaccgaaagtatgttcatggggcatacacagattcatatggatttgataacattgatgagtggggtcggccatttcctgatcttcaaagatttccatcatccagaattgataaagggttcagtcaacttgcgaacaaggtgcatggaatgggcttgaaattcggaatccatttaatgaaagggataagtttacaggctgtgaatggaaacacacccatattggacattaaaacgggaaaaccctacgtagaggatggccggcaatggacagctcgtgatataggtcttacacatagaacatgtgcatggatgccacatggatttatgagtgtaaatactgatattggagctggaaaggccttcctaagatctctttatcaacagtacgctgattggggtgttgattttgtgaaggttgattgtatcttcggtacggattacagcccaaaagaaatcataactatttcagagctcttggcagagcttgaccgccccatcatcctgtccatctcaccaggaaccgaagtgactccagcattagccaaaaacatcagtcaacatgttaacatgtacaggataacaggggatgattgggacaactggaaggatgttagttcacattttgacgtgtctagttcctttgctgctgcaaataaaattggggccataggattacgaggaagatcttggccagatttagacatgctcccatttggctggcttacaaatgcaggtgtcaatcagggtccacataggcaatgtgaacttacatctgatgaacagagaacacagatagcactttggtcaatggctaagtctcctctaatgtatggaggagatttgaggcatctcgacaatgacacgttaagcataataacaaatcctacattactgaaaataaatcactacagcataaataatatggagttccatcatgtgcacagtgaaaggacttccaaagaagacaagcattctagtcgtttcatatccgaagatcttgtacacgtaccaaagattgatggtgtatctcttggtctcactgcctgcagtgatgacaaagcaaatggatggtatatgttttcacaacatggtaaatcagatcatatatgcaggaactatgggatgcaggatgacaaaaatatctcattttgcctgggcaaaacaattcctctcctgacatcggatgatataatcgtacataatgaagaataccaaacaaagtttcacctggcaaatatggacagtgacgatgcttgtctggatgcatctggcagtcaacggaggacatcctcagatagcaagtttcccatgttttcaaggtgcaggtggcatgctatgcagatgtgggagctgaatgagaaaggaaacctcattagcagttactcaagattatgtgccacggtggaatccaacaataaaggagttgtaactacaggagcagtagcacgtgcatggatagcaactgggagtaaaggagaaatatacctggcgttcttcaaccttgactccatgagcaggaagataaccgcgagaatatcagacctggaaaaggttctcgggagtacattcataagaaaagacacgtgcagctgcactgaagtttggagcgggaggaatttcggtcgtgtggaggaagagatttcagcggtagttaaatcacatggttccatggtgtttgaaattacatgttgaggtatcccataattctcctattgcgcttactgaagcatgacaggatggaatagataagtagggaaaagagccttgagcatgtatcaggtaaagctaccaaaatgaacatccttt

SEQ ID NO: 17291 - DNA, 1278 bp, Oryza sativa
  ref <308>: DATABASE ACCESSION NUMBER: AK067744
  ref <309>: DATABASE ENTRY DATE: 2001-12-06
gggttggggacgaagtagccggcggcacggcgatgtcagcggttgggatgaagacggcgtgcgtgaccggcgggaacgggtatatcgcttcggcgctcatcaagatgctgcttcagaagggatatgctgtcaacacgacaatcagaaaccctgatgacatgaggaagaattcccatctcaaggggttggaggcactaggcaccttgaaggtcttccgtgccgaccttgacgaagatggcagcttcgatgaagccgtcaacggctgcgattacgccttcctcgtcgccgctccggtgaatctccagtcagagaatcctgagaaagagatgattgaagccggcgtccaaggaaccctgaacgtgatgagatcgtgcctgagagccggcacggtgaagcgcgtgattctgacatcgtcggcggccgccgtcgccctccgtccgctgcaaggcggcgtcggccatgtcctggacgagtcgtcctggtccgacgtcgactacctgacgagagagaagccaccatcttgggtcacattctactcctttcttttttggtcctccatcaaatcattcatatacattttttaccgggctgatgaaaatgacggctggctgatgctagcacaccccattgtttttgcgtttgcgttttgcaggcgtatggtgtctcgaaggtgcttttggagaaggcggcgtgcaaattcgcggaggagaacgacatcagcctcatcaccgtgctcccggtgttcaccttgggcgcggcgccgacgccgttgaccacaacaagcatcccaactacgctctccttgctgtctggtgatgaggcgcagctaaaaaccctgaaaggcctggcggccaccggctccattccggtggttcacgtggacgacgtctgccgcgccgagatattcctcgcggagaaggagtcggcgtcggggaggtacatctgcagcagcctcagcaccaccgtgatggcgctcgcacgtttcgcggcagcaaaataccctcagtacaacgtccaaaccgactgtttcgaagggttccctgagaagccgagagtgtgctattcgtcggagaagctgacgagggaagggttcgagttcaagtggacggatctggacgagatattcggcgacctcgtcgagtacggcaaggccctggggattctaccgcactgaattgatggttgctccgtcaatttggagttttggacataaaaattctcttgtgaaattgttagtcctcttgtcttgtgaaataagtcattgttgtgtgttacggt

SEQ ID NO: 17292 - DNA, 1184 bp, Oryza sativa
  ref <308>: DATABASE ACCESSION NUMBER: AK067745
  ref <309>: DATABASE ENTRY DATE: 2001-12-06
gattccaacacaccaacaataatactcctataacactccagcttatcggagaagcacacgaagggggagagagctcggtcacgcgaagccgccattgacccggatgacctggccgttcacccacgccgcggcgtcgctgacgaggaaggccaccaccggcgcgacgtccgtcgtctcggcgatccgccccatcgacctctcctccaccttcttcacgaacgcctcgtccttccccgccatgaacagctccgtcctcaccggccccggcgccaccacgttcgccgtcacccccttcgccgccacctccttcgccatgatcctcgtcatcgcctccaccgcgccgttcgtcgccgtgtacgccgcgtacccggggaggagcgtgccgaggatggacgacgagaacgtcacgacgcggccccccgcccccgccgggaagcggttcgccgcctcgcggcacaccaggaacgtgccgcgcacgttgacggcgagcatggcgtcgaagtcctccacggcggtgtcggccagcgacgggtacttggactccaggaggcccgcgcaggcgacgacgatgtgcggcggcgtgccgaacgcctcctccgtgcggtcgaacagcgcgcgcaccgccgccgggtcggacacgtcggcgcgcaccgccacggcgcgcgggagggcggcggcgccgcgggagttgaggtcggcggcgaaggcgtcggcgttggcggagttggaggcgtagttgacgacgacgcgggcgccgagggaggcgaggtgggcgcacacctcgcggccgatgccgcgggagccgccggtgacgagcgcgacgcggccgtcgagcgggagcgcgctggctgctggcgccgccatggcttcacacgcactcactcgctcggggtgttgctgcttcgcgtgtttgtttgggcgcgcgagtaggattttttggtgtgttgaggaggtgcacgatgggcaagctagggtcctttttatagacgaccaaaagctgtaaacgtgacgtacgcggtgacactgggctgggttgatttttactgctattgttatagatgtgttgtgaattatcatgttcatgatgcagccacaaagggccacagggatgtagtttacttgtgatcatatgaattgctatgttcatgcaaaagtaattatttaattagtatgataaaattaac

SEQ ID NO: 17293 - DNA, 2690 bp, Oryza sativa
  ref <308>: DATABASE ACCESSION NUMBER: AK067746
  ref <309>: DATABASE ENTRY DATE: 2001-12-06
ggacggcaagacggcggcgcgtggcggcggcgagacccatcgagcggcggcgagccgacgagggagcgaccaccacggccgtgggggagcacggtacgaggtgaagcggcggctgcggcgaagtagttcgtactcgagccctagtcccgacctccaggccgaagcgaaagcactccggcgcaaagagggggcctcggggctccggctagccagcgaccgaccggcggccaccgtggcgggattcaggagagctcgggactccgccgccgcggcgtccgacatgccgtcgttcccttcctccggcgcttctccgcagaagcagcagcacaacgccaggaggaggcagctgattcggcagcagaggaagtcgctccccatcgcctcagtggagaagaggcttattgaagaggtgaggaagaatgacacgttgatcgttgtcggcgagaccggaagtggcaagacaactcagttgccacaatttttgtatgatgctgggttttgtcaggatggaaaagtcattggcataactcagcctcgaagagttgcagctgttactgtagcaaagcgtgttgctgaggaatgcaatgatcagttgggcaaaaaggttggctattctattagatttgatgattcgacatcaaatgcaacgaggattaagtacatgactgatggtttgcttttaagggaggcacttctggatccacttttgtctaagtatagtgtcatagttgttgatgaggcacacgaaagaactgtacatactgatgtcttgttgggtttgctgaaaaaagtgcaacattcccgatccatttatgccaataagaatggaaagattttgcctgacatacaacatcagtctcaatattttactctgaaggcatgccaaggaacaaaaattgatcctctaaaactgataattatgtctgctagtttggatgcaaagtgtttttcagattattttggcagcgctaaagctgtacatattcaaggacggcaataccctgttgacatactatacacttatcagcctgagtcagattatctggacgctacactagttactatctttcagatccatttggaggaaggaccgggggacattcttgcatttcttactggccaagaggagattgagtcactggacagacttattcaggagcgtgctcgtcaacttccaccacagagaagtaagatatggactacacctatttactcatctcttccatcagagcagcaaatgaatgcttttaagcctgcaccagctggaactcgcaaggtggttttagcaacaaatattgcagagacttctgtaacaatacctggtatcaaatatgttattgatcctgggatggtcaaagctcgtgcttataatcctgtaactggaatggaatctctgatcattatccctgtttcgaaagcacaggctcttcagaggaggtaaatacttttaagcatttgtaaatcacgtgtgcctttttctcttaccttgtgatctatattcagtggccgtgccggacgagagggaccagggaagtgctaccgattgttccaagaaactcaaagctcttggaattgatgacatcataggttttgattttatggagaaaccatcaaggacagctattttgaaatcattggagcagttaattttattaggtgctctgactgatgattataagttgtcagatccagttggtcgtcagatggctaggctacctttggatccaatgtactccaaggcactaatagtagcaagcgaattcaagtgcttggaagagatgttgattgttgtctctatgctttcagtggaatctattttcttcagcccacgtgagaagttagaagaggcaagagctgctaggaagagttttgaaagctctgaaggggaccacataaccttggtgaatgtatatcgagccgctaaagaatgcttggagaaaagcaaaaatgcaaatgccaaagagaaaacaatggaaaaggcattgaacagatggtgcagggaaaatttcatcaattaccggtctctaagacatgcttgtgatgttcacagccaaattcagggccatgtccaacaaatggggcttaacgtatcatcgtgtggggatgacatggttctgttccggagatgcctcacagctgctttcttcttgaatgccgcaatgcgacagccagatggatcatacagggctcttgcaaccagccagagcgtgcagatccatccgtcatcggtgctcttccaaaagaagccagattgtgccatcttcaacgagttggttcgaacgagtcagaattacgtcaaggacctgacccggatcgatcccgtgtggctggctgaacttgccccgcaatattacgccactgaggattgattttgatctgctgccatagttcactgtaaccttgtaaacaccagagtctgcttagttaatcacagtgtcctgtcctggcactactcactagtgtggcgttcaaagctgtgaaacactcatgtctttgtttgaaagaaagctagtctcagttttgatctccgactgcatgctgaaatacatgatggttacagttctagcccaaacgggtgtgagagagactgtttgcgatagtcataaatcagagggtgggtaaggagatttcagatagaactagaagatggtttccttctcattgaagttttatccatcagaggatcttgg

SEQ ID NO: 17294 - DNA, 768 bp, Oryza sativa
  ref <308>: DATABASE ACCESSION NUMBER: AK067747
  ref <309>: DATABASE ENTRY DATE: 2001-12-06
ggatggccacgcatcaccatggcgctaatccaccaccacctcgccgttccagtggctcccgctcctcctcctcggggtctcggtccggccaccgccgcccggcggctgacccttcaccgccgccgccgtaggagtggcgccgccgccggcaggatgacagtcacagcttcgtcgatggtggagccggcaagtggggaggagacggcggcgcgttcggcggcggacgtggtgagggcgttctacgacggcgtgaaccggcgggacctggcggcggtggagccgctcatcgcggaggggtgcgtctacgaggacctcgtcttccccaaccccttcgtcggccgcgccgagatactcggcttcttcgccggattcatgggctccgtcagctccgacctccgcttcgtcatcgacgacatctccgccggcgacgactcccgcgccgtcggcgtcacctggcacctcgattggaaggggcggccattcccattcagcaggggatgcagcttctaccgcctccagctggacgagaagcagcagcagctgcagatcgtgtatgggcgagactgcgtggagccagcagtgaagccaggggaatccgcgctgctcatcatcagggccgtcacttggatcttcgaacgctttccacgccttgcaaacatgctgtaactaactggcctttaattttgtatggtaactagtatttattttctcgttatgtgcactgtactttagcttataaaagaaattgaaagattgaagaatttggcg

SEQ ID NO: 17295 - DNA, 2067 bp, Oryza sativa
  ref <308>: DATABASE ACCESSION NUMBER: AK067748
  ref <309>: DATABASE ENTRY DATE: 2001-12-06
gaccgcgcgcgcagcactcgcaggagaggatcgagttaaccaagtacgaagcgagtagttagcgggcgagtacgtggtgtttgtcatggaggacgaggcgacgtcggtggcggcgccgctgctgcggccgcgcggcggcgttgacgcggaggcggtgaagcagcagctgtggccggccggcgcgagggtggcgggggagtggtgggtggagtcgaagaagctgtggcgcgtcgtcgggccggccatcttccagcggatcgcgctgtacgggatcaacgtcgtctcgcaggcgttcatcggccacatgggcgacctcgagcttgccgccttctccatcgcctccaccgtcgtcgccggcttcaacttcggtttcctgctgggcatggcgagcgcgctggagacgctgtgcgggcaggcgttcggcgccaagaagtaccacatgctgggcgtgtacctgcagcggtcgtggctggtgctcctcatgttcgccgtcgcgctgacgccgacgtacgtgctcatggaggacctgctgctgctgatcgggcagccggccgacctcgccagcctcgccggcaagatgagcgtctggctgctgccgcagcacttcgccatggcgatgctgctcccgctcacgcggttcctgcagtcccagctcaagaactgggtcaccgcggtcaccgccggcgtcgcgctcgcgctccacctcgtgatcacctacctgctcgtcaacaccctccacctgggcctcctcggcgccgtcgccgccgccaacgtggcgtggtggatcgtcgtgctggggcagttggtctacgtcgtcggcggctggtgcccgctgtcgtggaagggattctccatggaagcgttcgccgacttctgggagttcatcaagctctcctcggcctccggggtgatgctttgcttggagaactggtactacagggtgttggtgttgcttacagggtacctgaataacgctgaaatcgctgtggatgcactctccatatgcttgacgatcaacggatgggagatgatgattccttttggcttcttggctgcaactggcgtgcgggtggcaaacgagctcggcgccggcagcggcaagggcgcgcggttcgccatcgtggtgtccgtcaccacctccgtggcgatcggcctcgtcttctggtgcctcatcattgcctacaacgacaagatcgctctcctcttctcgtcgagcaaggtggtgctcgacgccgtcagcgacctgtccgtgctgctcgccttcaccgtcctcctcaacagcgtgcagcccgtcctctcaggtgtggccattggctcagggtggcaagcactcgtagcctacgtcaacgtcggtagctactacttggtcggagttcccatcggtgccatattgggctggccattgcatttcggagttgggggaatttggtccgggttgattggtggcacagctgttcagacactgatattagcctatctcactatcagctgtgattgggatgaagaggcaaagaaagcaagtacaaggatggaagtatgggccagctcaaaatgaagcaaccaagtaccaacagtgtgttggtgaggtttcttggacacacaaagggggcacttcagtgggcagcagaagaaccgcaacttctgctcagtacaaagaggcaaaccatcagaatagatcaagaagacgagaacattttggaaggcatagctggtgtttcacatatagacatattcacgttaccttaggctgcagacagccagtttctgaagacgctcgtttgccaagagaacattggagaagagtgcagaggcttgcgtagggtgatagtatgtgtgagttgggattatatttattagccttgtaacctgaaatttgcactcggttgcaagttgcgacatgtaagcactgagtatactatttaatggatattgcaactgcaagcctgtgtgttgttcgcggattgtaagacgtccggacactacaaaatgggccagacggtagcccattaccatcgtgtatgatatatatgcaccgaaacgaatccactcctacggtcctacctcacg

SEQ ID NO: 17296 - DNA, 983 bp, Oryza sativa
  ref <308>: DATABASE ACCESSION NUMBER: AK067749
  ref <309>: DATABASE ENTRY DATE: 2001-12-06
ttccggtgcccgacgcctcggccggccgcgggcggggcccatcgagacggccagccaggagatgctcgaggcgctctaccatcaggccagggattcctactacagcggccagcctttgattgtcgatgacatgttcgacaaagttgagttgaagctccgggtttatggatccccatccgtagtgaagtatccccgttgcagcctcaagaggcaatcgacgtacgcagacgctgagggcaggaggacaaatcaatgttcatggcactctcaagcatctggatgctgctgctcttgtttggcacatcggcatttctcgttccctctctctgtattctaagcctcacttttggggatgcattcggagcaaggtatctcttgtatggtgcaaaatcgtttgatgtgataactagggtaaatgacatggttttaatcggattgggctatctgattggttatccgatttcatctgcatctgttggtgcactgcaaggcttgctgacaaacaatttggttgcactaaaaggttcttgcccaaattgcggtgagcaggtctttgcatttgtcaagacggataattccatcaaagctccccatagagcagaatgtcatgtctgcagctgcccactggagtaccgcactaaagttgagaaatccttgtcgggaactagaagaacatgggtttatggcagagtttatcttgtgaagcaagggcatccaaggaagcggaaatggttgaaagactaaattgccagtgctagatgctgaagaaagtttagaggatgattttaagttatgtggctattctgaacttctgattgactgaaacatatttagagatgttgctcttactgctccaatgtgcttatttgtttctctgttcaaccaatgtatcttgtaaagtggtaaattccttggaaagattgccaaacatgaacaaatgttaaattgatgatgcagtattatgaataatggcgtgccttctc

SEQ ID NO: 17297 - DNA, 1990 bp, Oryza sativa
  ref <308>: DATABASE ACCESSION NUMBER: AK067750
  ref <309>: DATABASE ENTRY DATE: 2001-12-06
gacgttcgaagcttcccctgtcactgtccatccatggtggtggtcagacaaccccagcacacaagaaatctgccatttgcccagtccaccgctgggttgcagtttttgatgaagagattgacttgacctgagcacccttccgattgtaaatagcagtttttgtattgctgttggttgagtgattgggcaatcatccaatacatatcttggcttcttggctggactccagtaaccgaggtcgcgtgcctccgctcgctcgctcgctcatcgtcgtcgtcttcctcggggcctctctcgtcgtggagcggaggcgtgccgcgtagcagggggaattcaactgaggtgagaaatgggggcaaaggactccaagccctcatacagctattcttcttcatatgatcatgggaattcatcatcgggatataactcgagataccctgcataccctgcaaatgcatcttccagtcagaacacaaggtatgctccttctatggagaactatgtgcagccagaaacgcatgccaggttgcagaggaagtactcgaggattggtgatgactaccgctctctgaatcaagtgactgaagctttggcacaagcaggtcttgaatcatcaaatcttattgtaggcattgattttacaaagagcaatgaatggacaggtaaactttccttcaatcgccgatgtctgcatgatattggaaacactccaaatccatatgagcaagcaatatctattattggaaggacactttcagcttttgatgaagataatttgattccttgctttggatttggtgacgcatcaactcatgatcaggaggtattcagcttttatccagagaaccgcccatgcaacggatttgaagaggcattagaaagatacagagaaattgttccgactcttcgattagctggaccaacatcttttgccccgatgattgaaacagcaattggtattgtagacagcactggtggtcagtatcatgttcttctgataatagccgatggacaggttactcgaagtgttgatacacagtctgggcagttaagcccgcaggagcgtgatacgattgatgctatagtaaaagctagccagttccccttgtctattgttcttgttggggtgggtgatggaccatgggacatgatgcatcagtttgatgacaatatacctgctcgctcatttgacaatttccagtttgtgaatttcacggacatcatgtcaaagagcatagcagctgacaggaaggaggcagaatttgcactatccgccttgatggaaatcccaacacaatacaaggcaacacttgatctccaacttctaggccgtcgccaaagaatacagccaagaattcctctgccgccacctatgaggaatgcttattcgaggtctactagctttgaccaacattctggtgtttattcacgatctagtagcttcggcccacaaacaagtggctttcagcaatctgaaagcttcaaacagagacagcctgtggctaccactgcacctgacacttatacctcggaaagttctttagaaggaagacttttgtgcgctatctgtatggataaatcaaaggatcttgcatttggatgtggacatcagacctgttatgaatgcgggaagaatttggtgcgctgccctatgtgccagcagcatataaccacaaggatcaggctgtactgagaaaacaaaaatggatatcctgaagtttctgaagcctgcagaaacagaatctccaacatcagaagaaactcctgtgcaaaatttatgaaccagcctaaattgtactgttctttcgtcttgtaattggtggtttactattattattgcagtgagaaatgtttaggcagatagtgatccatataaaaagctaaggcacacactgtagtattaactacagtagttatgtgaagaagaggtacactaaataatgtacagtaattagcttctctattatacattctcctttctttcccttgg

SEQ ID NO: 17298 - DNA, 2637 bp, Oryza sativa
  ref <308>: DATABASE ACCESSION NUMBER: AK067751
  ref <309>: DATABASE ENTRY DATE: 2001-12-06
gtctttctccttctcctcctccttcctctcgctctctcctccttgacaaaatttcctccacccattcccttctccacccaccctgccgatctctctgaattcggtcgcctcctccgcaccatctttctctcctcctctcttctagcaatcggtcgtttcctccggttgttgtgctgattcttcgttctttctctccctctctctctctttctttcttcctctctctgccttggagaggatcaagaaacgaagggagggaggagaggagaggagaagggaaatcgagaaaagtctgttctttggtttggctcgtgtggttcttgagagctgctgtttggaaaatctctgcacctgttgctgaccacttgcttcaattgttgaaagagatgaacagcacctgagatgctattgccagacatcaattgataaagagcacatcttcagtaatgcaaggacagaagaactctgttgagcagcttgctgatgtgtttggatttgaccatgcatccagttcaggaaaccctgtcatggatcaacaaggatattggaacaacattcttggttcagtggagtcacataaccttcaaggttatcaggtgaaccgtagtgatggaactattccctatggaaacggtgtgcatcaaaatggcacttttttaggtttttgggaatcaggcgaagcaagtgcaagtggcagttcactacattttgggggctctaatgagatcaaagctgagcaacgtaatatcggtggtggcctaaggattggtgaaaggcgcttggtagctgagcgcaacctttctttggataatgttgatataggccttaacatcaatggtaatgatctatctggtgaaaattcaaatgtgaatggtgcttcacaaggctctgaactacatggtggctgctctcatactggttcaaatggtcaagcctctgagctgagattacatccatacaggacattcatattaggtgcagatcaacctgagccttttaattctttgaatggcagtgaaaatcctttaggtgatttttccttgatgccagaaggcattgatcagcgaccaggcagttccctggatggccgccggctggcatgcaagaggaaaaatatagaaggagttaatgggcagtgctcggcaggtgctagcactagtttttcccacaggaacgatagtattttccataacattgcttcttcgagtcataatccctctcctagtacaaatttaccctctcctaattgtctgttggttccaagcactcttgatgaacaactcccgcgttatggagctactacagctggattgtcatctagtagctatgatcctagtggaggcaataacaattcaggaggctcacaaagaagttttcggccaagaactagcctggctcaacatattggcccctatggtgtgtggccatcttcaagtactatcagacattccagtggtcagtagcctgaactttcaataccagcatccaatgaatgtcgttcctggcattccacagatgtcacaccggttcactggtccaggggcctcatcatcaagaacaggcaatttggagaacagaattattggtagtgaggaatttagcgcgaggaatgtagtggctaccagcttccctgatgcagttcctccggccgcactagacatgaggcatttgataccagaaccatctagttggaatgtagatggcagagctactaccattccaggaaatgttccttcttcatcgagagctaataccaattcgatggttaatccaccagcaggctctccatttattgcccatcaaaacttgcatagacgtaatcctcgtaatttgtcagaggagataagtcgtttatctggagctcttcgtggccatcagcacccacgcctaaggtccggttttctgttagaacgacaaggtgatggtgtttggggtgttccgttgtcaactaggagcagggaaggaagaagattaattgagatccggaacgcgcttgaaatgattcacagaggggaaaatgtaagatttgagtccattttctatggtggagtcgacattcatgacagacacagggatatgcgccttgacatagacaacatgtcttatgaggagctattggcactggaagaaagaataggcaatgttagcactggcctcagtgaggaagaagtgacaaagctcctaaagcaaaggaaattctcatcatggaggttggaagcatctgtggaagaagagccatgctgtatctgccaggaagagtatgttgatggggatgatctcgggacactggactgtggacatgacttccatgttggatgcgtcaggcaatggctggttgtgaagaacacctgtcccatatgcaaaaatactgctctgaagtcttagaaaaagcacagggcagtaaacactgtgtgcttgttcgatcgcaagatcgtttagtgattcatattaccgtgccgttttttgattagaaattttttttgccattgacctacaaatttgattaaaaaaaaaggtaaaagaactggtccctgcaaactgccccctcctgcagtaaataatccctggaatctgtcgctctgcattcaactgaatatttatggctggtatattggatgatggctcaatatttttttc

SEQ ID NO: 17299 - DNA, 1739 bp, Oryza sativa
  ref <308>: DATABASE ACCESSION NUMBER: AK067752
  ref <309>: DATABASE ENTRY DATE: 2001-12-06
ggtcctttgccttcctgggtcttgctcgacagcaccgtgggcggcggccgccgggcgccatcgagagagggtcgtcggagtgggcgtcaaatgcacggagaggcagctcctctacacccacccatggccggtcgagaagagagccgctgcctcgatggcgaggggcatgacgctccacgcgcgcctcgccgagcctccgggtgtgtcctccctacacgtccgcctgaacgccgacgagctccgcaggtgcaggtcgtgctcctcccggccgccgcatctaaaaagcggcgagtcagaaggcggtaacggcgagatcatcgacgatagcggcggtggcgagtcgaaaggtttctccccgaacgcgatcgtcgagaccgcggacaagaagctcatcgtcctcagctcgtcggtgccgcattgccccgatatctgcttctacgtcgtctacgaagccgccgagacgtcgctctccatgattccccacttaccttctaactgccgacccaccttcacgcagcggcctctccccgtgcgccgccgtggcggcgacggcgatggtggtggctacaccttggccctcatggcgagcgcctcggtgtttgacgaacaggggggtcgaagccgcaaggacgtcctctgcatgtggccgccgccggactcctctaagccgctgccgctgttgacacggaggggcatcgagccatggcgggccaagcggccgcgcttaccctccgacaagccggacgacttcgccgccgacacggtgttctcgttcgatggacagttggacacgctttctgggccgacctcgcacagggcgtcctctgctgcagctgcgatgacgtgctctccggcggctacgacgtcgagttccggtacctcgcgctgccgccggagtgccggctggacgccaactggaccacgaggaggcagccgcagaggtaccggacgatgagccgcgtcggcgacacgatcgagttcgtgtccatcggcgacggtctccaccgccaggaattcacggccagcacaacgctggcggtgtgggctctggtcccggccaccggcgagtggaagtggaagaagctccacgagctgagcatggcgacgctgtggagactcgacggcttcaagaacgccgggttgccggaggtcatgccgatccatcccatcctgagcacgaagcaagacggtgtcatttacatggtctcgtcggctgatgacctcgcgtccgcgggtcgtgaagacagctccgcctccgagtccgaggggtgggactctgatgtcggggacgagagcgacgacgacgacgaggaagacggcgtcctcgttgaggaggagcggcagtacttgatcggtctcgacatacgcaacgagagtctcctgtcgtggagacgtctcccgggtagcggctatctcgaccggcctgatctcatgggtttcgacgtgtccaaatgccttgacgaacattgcctgtgccctcccgccgacgccgctccgaacactgatggggctgaggtgcttatatacggttccagctacacgcaagaggaagttgccaagcagcccaaactctcgttgatctgaattaccttttctctgtataggagtcaatgttttaaatagtgggctaaggcatttagcggtaaacttcccaaacagctatagctgcagctataatgggctaaatgaagctatagcggctaaattgtacatgatagcaaatagttagaacccttccc

SEQ ID NO: 17300 - DNA, 1163 bp, Oryza sativa
  ref <308>: DATABASE ACCESSION NUMBER: AK067753
  ref <309>: DATABASE ENTRY DATE: 2001-12-06
gagttgctggagcatctcagcttccaggagcgcgagagaaaatcgatcatggcgagagcctgcagccccgcgttgaggctgcagctgccgccgaacccgccgatcacgccgcagctcccgagctgcaggactcactccgctggcgccaggtgcagaggcttcgccgccgcccactcgcagccgcctgcagccgggcgcccggacgagcctgccgcggagccgtcaccgaagcaaccggagatcgcgcagacgcagaacctcaggaggagccgcaggagggggccggggtcgcggcagagcctcgtgtccgtcgggacgtcgtgcggcggaggggatcagtggagcagcgacttcgacctgacgctgcggcagctgcacctagacgacctcatcgaagacggccagaacgacgacgccgacgtcctggtgcacctcctagttcagcagcatactcagtttggaatgtcaatcaaaggccgagtggtcacgtccttcagcaaaatatgcgattcctgctcctcgccgtactgcgcaaagattgatgagcagttcaacctcacggtgctgtcctcaaccaggaaagaacagagtgagatgcctgatattggagacagcgatccatctgttatctacgtgagaccaggtgtagaggttgatcttgactccgtgatccaagagacgatacggctaacggcatctgccaagagttcatgctcagaggcatgcgaaaaatctactgtcgtatggcaatatggtggtaaccagaagaagcgttacagccaacggtggtcgaaacttctggacctgaagaaaactctggataaggcggctaactgaaccacgacgcacattcattcaacagaatgaacacatgctagtacaaaatgagtcaaatgacgctggaacccaagacgcagcggattgctctaccaaaatacaagtgtttctggctatatatcttatatccgaacaaggaacggagggtgtagcagagaaacaagctgcatcgcaacccgctagctcttcgatctgatcatctgaatcctgtgtatagaactgtgccatgtatacgtatagatgacaataaacatcactggacacgattagccagttagcacactgtaaattttttggggaaaaatgaatcagagtttctgccattt

SEQ ID NO: 17301 - DNA, 1599 bp, Oryza sativa
  ref <308>: DATABASE ACCESSION NUMBER: AK067754
  ref <309>: DATABASE ENTRY DATE: 2001-12-06
ggggagcaaacggcggcgacgcttcgcctccctctccggccgccgccgccgccgccgcagcccatggcgtcgctgctccgcctccaggccctcgccctgaacctaacggcaccccgccgcctccccttcctccctctccgcgtcacgactgcgacggctccgctcgccggccgcctctccaccgccgccgcctctggcagctcgccggagtcacctgcctcggaaccggatttggattccgggctgtatcttgtggcaacgccaatcgggaacctcgaggatatcaccttaagggcattgcgtatcctcaaatgtgctgatgtcatactatcagaagacacaaggcattctggaaagctacttcaacattataacatcaagacacctcttctcagctttcataagtttaatgagcgtgaaagagagcctaatatcttaaagagacttcatgaaggggaagcagttgcattgattagtgatgctggtactcctggaattagtgatcctggcatggaactggctagactatgtgctactgagggaatccctgttatccccattcctgggccgtctgctgcaatagctgctctttctgcatctggtttgccaactgatgaatttacatttgtggggtttttaccaaagcatgctcgatcaagaaaagaaaggcttgaaatatctgcctgtcaagctgccacacaaattttctatgttcctccccatggaattcaccaatttctttctgatgctgcttcatcatttggtgattctaggtcatgtgttattgcaagggagataacgaaattacacgaagagttttggcggggaactattggtgaagcgaatgaagcctttgcaactcggcagccaaagggagaaattacagtgctcatagagggaaagttaatttcagctgatgaaactccatctgaggatttccttgagcatgaactcagagaattgatgacgcagggacatcctctgtcagcggcagtgaaaatggtgagtgaagctacatcagcaaagaagaaggatgtttatgccctcgcattaaggttatttggaaaatgagtaaaatgcgatgttttgctctcatatggtaactaaactttcagaaaccatgaaggatgtttggaatgtgtcatatttttcagtccatttgaacatcgcggatatcttattgcctgtgtgcgtgcgcagtaaatagcctattgggcacgtccaaggccagggccactcactagcaaaggcagctttctgaagatgggaatagcaatggcagctttctgaagaactagctgattcaaacttttgaaagaggtgatatttggggaattttcagaaggtaccattcaaatttgctggaggatgatgctgttctggcgatggaaaaagtcttcgatctgtagcttcatcgttgtacaacagaagcttcgctgcatctgcatgacaagctatagctacctggttaggttaggcggtaagttagtatgatcaccttagattttatcgcaatagttatcgcagtgtatacattttgtcttagattcacatttatcgaaatcattattatggagctaatgggccgaatccgtcgtg

SEQ ID NO: 17302 - DNA, 1668 bp, Oryza sativa
  ref <308>: DATABASE ACCESSION NUMBER: AK067755
  ref <309>: DATABASE ENTRY DATE: 2001-12-06
gatccagccgagcgagctaaggaaggaagaagcatacaggcggcagcgacgagccatggccacacacgcagcgctcgcggcgtcccgcattccggccaccgcccggctgcacagcaaggcggcgtccaagcagagggtggacttcgccgacttctccggactgaggccgggatcgtgctccatcagccacgccgcgagggaggcgtccttctccgatgtccttggctcgcagctcgtcgccagggctaccggagagaacgccgtgagggcgccggctgaggcgaagctcaaggttgccatcaacggcttcggccgcattggccgcaacttcctccggtgctggcacgaacgcgagaactccccgctcgaggtcgtcgtcgtcaacgacagcggaggcgtcaggaacgcatcacaccttctcaagtacgactcgatgctcggcaccttcaaggccgacgtcaagatcgtcgacgaccagaccatcagcgtcgacggcaagctgatcaaggtcgtctccaacagggaccccctcaagctgccatgggctgagctcggcatcgacattgtcatcgagggtaccggagtgttcgtcgacggccccggcgccgggaagcacatccaggccggcgcgaagaaggtcatcatcactgctccggcgaagggtgctgacatccctacctacgtcctcggtgtcaacgagggagactactcccacgaagtggccaacattatcagcaatgcttcctgcacaaccaactgcctcgctccgttcgtcaagatcttggacgaagagttcggaatcgtaaagggaaccatgaccacaactcactcctacaccggcgaccagaggttgctggacgcgtcgcaccgtgacctgaggagggcccgggcggcggcgctgaacatcgtgccgacgagcaccggcgccgcgaaggccgtggcgctggtgctcccgcagctgaaggggaagctcaacggcatcgcgctgcgcgtgccgaccccgaacgtgtccgtggtggacctggtgatcaacaccgtgaagaccggcatcaccgccgacgacgtgaacgccgcgttccgcaaggccgcggcggggccactcagcggcatcctcgacgtctgcgacgtgccgctggtgtccgtcgacttccgctgctccgacgtctcctccaccatcgacgcctcgctcaccatggtcatgggcgacgacatggtcaaggtggtcgcctggtacgacaacgagtggggctacagccaacgcgtggtcgatctggcgcatctggtggcgagcaagtggcccggcgcggcggtgcagggcagcggcgacccactggaggacttctgcaaggacaacccggagaccgacgagtgcaaagtgtacgaaaactaagaccactgtccaagtacgggctcgcgtaggtgcagaaatatatactcctataatgtaacgaagcacacacattgactgtccccgggcagaactgctatactatatatactgtgctcggattggctgcccgtacgttgttccccttcgacagaggaacgcatgactgtcgaagaagaaacacagctgcagacacgggccattttctgtgaggtgtaatactgaactttggtacagacttcaggatttttttcttttcgagtcttgttttactttcttcg

SEQ ID NO: 17303 - DNA, 1202 bp, Oryza sativa
  ref <308>: DATABASE ACCESSION NUMBER: AK099015
  ref <309>: DATABASE ENTRY DATE: 2002-08-28
ggtattcttagtgaccaccccccatatcacatcctctccttcctcttcctctgctcactcagctctcccccgcgcgcgccaccgtcgtcgccatgtcgggcaacatcgccttcggccgcttcgatgactccttcagcgcggcctccctcaaggcctacgtcgccgagttcatctccaccctcgtcttcgtcttcgccggcgtcggctccgccatcgcctacaccaagctgaccggcggcgcgccgcttgacccggccgggctggtcgccgtggcggtgtgccacgggttcgggctgttcgtggcggtggccatcggcgccaacatctccggcggccacgtcaacccggccgtcaccttcggcctcgccctcggcggccagatcaccatcctcaccggcgtcttctactggatcgcccagctcctcggcgccatcgtcggcgccgtcctcgtccagttctgcaccggcgtggcgacaccgacgcacgggctgtccggcgtgggcgcgttcgagggcgtggtgatggagatcatcgtcaccttcgggctggtgtacaccgtgtacgccaccgccgccgaccccaagaaggggtcgctcggcaccatcgcgcccatcgccatcggcttcatcgtcggcgccaacatcctcgtcgccggccccttctccggcggctccatgaacccggcgcgctccttcggccccgccgtcgccagcggcgactacaccaacatctggatctactgggtcggccccctcgtcggcggcggcctcgccggcctcgtctaccggtacgtctacatgtgcggcgaccacgcccccgttgccagcagcgagttctaattacccatttcgccatcggcaacacgcataaaaatggtggtcactccatcgtcagaatcttgtgaggatgtgttgtgaaggactgatttggttcagatggggaagaaggcttttgttgcgaggatgtgacacttgggtgatgatcgatccatgtttagtttcttcttgattaatttgtaatgtgatcagtgtggagcaagttggatgagatgcatgtttaagatcgaacacttctgttgagtttcattgtgagatttcatttgattcgggccatgtcatttcagtttgtttgtagcctccaaaataagcttgtgtcttctcctcgcaaataggaaatcagaaataaaattgttccgggaaatc

SEQ ID NO: 17304 - DNA, 2460 bp, Oryza sativa
  ref <308>: DATABASE ACCESSION NUMBER: AK067756
  ref <309>: DATABASE ENTRY DATE: 2001-12-06
gaccagaccacgcctcactctcgtcggctcgtcgccttgtccgcgcgtgcgccaccgtttccacccagattcgcgcccgccacttccgactagctcttcgcggcaaaagagatcgccggctcgccggccggcccggagcgcgggggttccgcttccgcggcggagcagccgtcggctggggaggggagatggacgccggcgagctgcccatcgtgtaccacatcggcatcgtgctggccgcgctgtgggccgcgggctccctcggcttccgccactccgtcctcttcctcctcgccttcctctacctctacatggtaaatgctcgctgtgcaatgaaattgcggaagagaatacaacatgaagaaatgaaatctgcctaccaacgaagactgctatctgatgcagaatcagtacgctggttaaattatgcaataaaaaagatgtggcctatctgtatggagaagatcgtctcgcaacttctacgacccataataccatggttcttggataagttcaaaccttggacagttagtaaagcaggagttcaggagctttatatgggcaggaattcaccactgtttacttcaatgagagttttacctgagacatcagatgatgaccatttggttctggagatagggatgaattttctatctgctgaagatatgagtgctgtactttctatgcagctgcataagagtgtcggacttggaatgactgcaaacatgcatctgactagcatgcatgttgagggaaagattctagtcggtgtgaagtttgtccggagttggccatttcttggccgtgtaagactatgttttgtggagcctccttattttcagatgactgtaaagccactcattggtcatgggcttgatgtcactgagtttccaggaatttcaggatggctggataagttgatggatactgcatttgggcagacattagttgagcccaatatgcttgttatcgatgtggaaaaatttgtatcgactccctcagacaatgactggttcagcattgaggagagacctcctgttgcatatgtgaaacttgagattttagaaggatccgacatgaaaccatctgatatgaatgggctctccgacccttatgtgaaaggtcgtcttggtccttttaaattccaaactcagatacagaagaaaacactatcccctaagtggtttgaagaattcaaaatacccattacatcgtgggagtcattaaatgaacttgccatggaagtgtgtgataaggaccacatgtttgatgactcgcttggaacatgtactatagatatccatgagctgaggggtggtcagagacatgacaaatggatatcactcaagaatgtcaagaaaggaaggattcacttggcaataacagttgaagatatatcagaggagaaggggttggaagaatcatcaaggaaagttgatgctgaactaccaatatcaacatccgtcaacaagtttaatgctgatgaactgcctgatgaaaagcaagtcttagtagatgaagtggagcacattaacattgatgggcaagaacaacctggaggattatatgtgcatcgccctggcactggagttcccaagacatgggaatcacggaaagggcgagcacgtaatcctgacacggagatttacaaagaagttgacaaatcaaaggatgcgcctaccccaaaaagcagtggacaagggggtttttttggctcctttttccggaagagcttgaagaagggaagtttccatgatattgatcccggtattcctacaacgccagggcctcagagtgcaacagagcttgatccgaagatcccacaaactccacgtccaaaccttaaggaggccggtgaaaaacggacatcgataaagatagtagtcgatgaagatgcgaaaccgacaaggagtgcgggagatgcagagaacttgacagaagatgtagccaaggtgatggagaaaaacgcaggtgagccaggtagatcactgacaagcatactgagtagaaagatttccaggaagaaaccagaggacaagctgtctgatatcccagagcagactgaagctcaagcatctgagttggtgaaagaagggcctgttccagttgagggtaaacctattgatggtcatccgacaactgaaaatggccatggagatggtgcttcaggagaagcagctgaaacgcaaactagtgctcagacttcacaatgattacaagatcagccgctgctgttgttgctggtagttgtaggtttgctttgttgtgcttgtagaacaaaattactttagagattgtgttacttgtaaaatacaacaaaacatgatcatgttgtaaagttacctgctcaggtttatacacgtccatgtaaatcaaagttcatactgtaataacttgtaagtatgcaaacatgactacacgagaggtttgagggtaccattttctcatgttttcggtgcc

SEQ ID NO: 17305 - DNA, 2627 bp, Oryza sativa
  ref <308>: DATABASE ACCESSION NUMBER: AK067757
  ref <309>: DATABASE ENTRY DATE: 2001-12-06
ggtcctcctcctcctcctccctcgccgtccgccgccgccgctcgcttcctcccctctcccacgaaagatggcgtctcacattgttggatacccccgcatgggccccaagagggagctcaagtttgccctggagtctttctgggatgggaagagcagcgctgaggatttggagaaggttgcgaccgacctcagggccagcatctggaagcaaatggctgacgctgggatcaagtatatccccagcaacaccttctcgtactatgatcaggttcttgacacgaccgccatgcttggtgctgtcccagagcgctactcatggaccggtggagagattgggttcagcacctacttctcgatggctaggggaaatgccactgtccctgctatggagatgaccaagtggtttgacaccaactaccactttatcgtccctgaacttggtcccaacaccaagttctcctactcttcccacaaggctgtgaatgaatacaaggaggccaaggcgctcggcgttgacaccgtgccagtacttgttggaccagtttcatacttgttgctctccaagcctgccaagggtgtagagaagtcgttcgctcttctttcccttctcagcagcatccttcctgtctacaaggaggttattgctgagttgaaggcagctggtgctacatggattcagtttgatgagcccacacttgttcttgaccttgactctcaccaattggctgcattctctgcagcgtacacagaactcgagtcggcactttctggattgaatgtgcttattgagacatacttcgctgacattcctgctgaatcatacaagaccctcacatccctgaacagcgtgactgcttatggttttgaccttatccgtggttccaagactcttgaccttgtcaagagtgctggtttcccctctggcaggtacctctttgctggtgttgtggatggacgcaacatctgggctgatgatctcgccgcatctctcaccaccctcgagtctcttgaggctattgttggaaaggacaagcttgtggtctcgacttcctgctcactcatgcacaccgctgtggatcttgtaaatgagaccaagctcgatagcgagattaagtcatggcttgcttttgctgcccaaaaagtggttgaggtgaatgcccttgctaaggcattggctggacagaaggatgaggcttactttgcagcaaacactgctgctcaggcctccaggaggtcatcacctcgtgtgacaaacgaggaagtccaaaaggctgctgctgctctgagggggtctgaccaccgccgtgctaccaatgttagcgctaggttggacgcacagcagaagaagctcaaccttccagtccttcctacaaccacaattggttcattcccacagactgtggagctcaggagagtccgccgtgagtacaaggctaaaaagatctctgaggatgagtacgtcagtgccatcaaggaggaaatcagcaaggttgttaagatccaggaagagcttgacattgatgtgcttgttcacggcgagcctgagagaaacgatatggttgagtactttggtgagcagctttctggttttgcatttactgccaatggatgggtgcaatcctatggatcccggtgtgtcaagccaccaattatctatggtgatgtgagccgccccaacgccatgactgtgttctggtccaagatggcgcagagcatgacctctcgccccatgaagggaatgttgactggtcccgtcacaatccttaactggtcttttgtcaggaatgaccagccgaggtttgagacatgctaccagattgctcttgccatcaagaaggaggtcgaggaccttgaggctggtggtatacaggtcatccaaatcgatgaggctgctttgagagaaggtctgcccctccgcaaggcggagcatgctttctacttggactgggctgttcactccttcagaatcacaaactgcggtgttcaggacaccacccagattcacacccacatgtgctactctaacttcaacgacatcatccactccatcataaacatggacgccgatgtgatcaccatcgagaactcccggtccgacgagaagctgctctctgtcttccgcgagggtgtgaagtatggtgctggcattggtcctggtgtctacgacatccactcccccaggatcccgtccacggaggagattgcggaccgcatcaacaagatgcttgcggtgctcgacactaacattctctgggtgaaccctgactgcggtctcaagacccgcaagtacacagaggtgaagcctgccctcaccaacatggttttggccgccaagctcatccgcacccagctcgctagcgcgaagtgaggatcgcctttgcagcaagttcccttcgattttgaggaggaatgccatcatagccatcttgtttttgaataatctgggtccagtggatccactgtctgtggttaggtttagtcagtctcttggggccaagatcactcatacccattttactttgaatgaatttggtggtttttgaggcagtctgtcggtgtatttgtattgtaaactgagtggaaatcagcagtgtttcatctacatctgagttgttgcggatcaaatt

SEQ ID NO: 17306 - DNA, 2548 bp, Oryza sativa
  ref <308>: DATABASE ACCESSION NUMBER: AK067758
  ref <309>: DATABASE ENTRY DATE: 2001-12-06
gaaacaaaaagaaaaaagaaaaaagaaaagaaaaacgaaacgaaagcttcttcttcctcctcccatggagtcgcttgcgtcgcaagcgaagccggcggccgtgctctggctcgccggcttcctccaggccgcgcgcctccaccgcgtcgtctccttctgcgccagctagaggcctctgtcggccaggatcgcgcagtgcttcctgctcaacgggttcatcttcctggggagcttgttaaccctaaaatcggtggtcattccaatcctttcgtggatactgcctggggattgcagtcagttgcaagggcagcatctgtgtgatcacacagtagctgtagcgacctattcatttctacgctctgttcttattcaaatattctatgtattatggttttatccactttacatcttcagcttcgtgttgagtacactttggtatggactattgttttaccatcctcaagattcccgtatttcatatactaaacagtggtgggcccaattgtaccttttgtaacattggccatctcacgtcaggtataatgacattgctaagcatgctttggatgttgtgaaaagaaagagcctagatgcaactaaagcattggatgctcacaccatatctgaatcaacagagaaacctgaagggtttgatgagtaggttcacatgaaaactcgttgattgcttgttgtttttacatgttctgcatgttgacatgctattgttagggttgcaattggtattggagaacaggtctattcaattcttcttttaactattttctttattgaggtttcagtaattggttacataccttactttgggaagcctatgaatttcctgctattatctttgatgtatgcctactactgcttcgagtacaagtggaacttctttgcagtgagcctgaatgagcggcttgatttctttgagtcaaattgggccttttttgctggattcggtatgttgataatcattcattgcatatggtgcaaaatatatgcttttgccttcttaggccatgatgccctgcctgtttcagctttggactgtaatgcaaagtgattttgcattttaaagttttgatttttaagaataattttaggtagatttttacttgtattcttagcaatctcgagaagagaactggacaaaagtcacaaagagaactcctaaaatccttatggttatgcaaatgtaattgttggaaagtaatctaaactataaacctttttgtttcttgtgcatatgttcttggcaagaaatacatgcatctctaatcgtctttatggaaagtgttggtacttatgggatcttaattctctcaacttgtggtcatcatgcttggcagttagcagataagtcatctattggaagtaatcctgtaccaagctgaacgttgagcattttcttgtaattttcatggacaaatatatctcggataggttctcaggcagtcctagctatttgcggcatgcatgttccttataaagtttgcaggatcctatataactgacagttgttgatctgttttgatgtacctttataaatggcatatgttactatgtaattctgtttctgtacattcttcgacttactccgtgtatgctagcatttatgtgattgacatgttctttgataccatttttatataggtagtccatgtgtacttccaattttcttcttctctcctcttacaagttatggtgtaatggcaatactttatccactggtatggagaaacactcactagcagcattttttgtttccatttaaacagcatgcagacatacttgctcttgtaaaataggcatagaagctagacatggaaaatcccttaaaagcactaactcataatgccattcccaattcttatttgggccaatttgtttggttccatcacaaaaaacacaagagttggaaaataccgtcgcacgtgtcattgacaggtgggtccagacaccacatgtcaattgtcattcttacatatgatgttaaattttaactcatttatctctacgatggtatttttccaaattctcttattaaaaagaactcaatccgcaattctacatccagtccttttctccaccgaaactggtgtggaaactggatgagaaaaaacagtatcttcctttgttcccttccatctaataatatttcccatccaacatattctgagtgcagttatgcaatgttgtctgttgcagtttgtattgactgctgcaggtacccaagcagaaaaagtaattgatcaactgaaaccttcgcatggagggaaactgcagagaatacctgttttcttcatagctaagcgactaacgactcaagtgctgcaattgtttccagaggtacacaaagaacaatgaaaggatccacataaccatagcaaaggaaacaaacgctgtgctgggctttatcacagtgctgctgttgaagttacacccgaagggtgtataaccagaactgtaaaactgtaaatattccgccattgcgattgtatatatggggataaagggaattaaaaaaaaaaactatacttgtgcg

SEQ ID NO: 17307 - DNA, 594 bp, Oryza sativa
  ref <308>: DATABASE ACCESSION NUMBER: AK067759
  ref <309>: DATABASE ENTRY DATE: 2001-12-06
gagcggtgtggcagccggcaggagagccacggttgggagagacccgaggcaggtgggcggggagggaatcgatgacttcttcccctcccacacgcatcccgtcgtctcccctgctcccctcttgcacggatcctccaccggtgactggatcccgtcctctctctggccgctagcggcggccgtggccttccccaccgtgagcggccacggcagctccctccactacttccgatgggtggatccggcggtggcggtggcggcggcggtggcggtggccaagggcggatccggcggcagtcggtggtggtggcatcggtgacggccaccgcctctcttctgccttcggtggcggtagtggcgtcgggtggatccggcggcagcggtggcagtgtgtggcagcggcgagtggatccggcggcagtggcggcggccgagggcgatccggcggcagtcggcgacggccgcgggtggatccggcggcagccgagggtggatccggtcgcctttttttttcgcccgagtttgtttctttttcgtggaatcagacattaggatcaagttcatgagctctactcggattaaaattgctctttt

SEQ ID NO: 17308 - DNA, 2377 bp, Oryza sativa
  ref <308>: DATABASE ACCESSION NUMBER: AK067760
  ref <309>: DATABASE ENTRY DATE: 2001-12-06
gagtcgtggagcagtcaagccgcgcacgcagagagaggcaggcaaggcaacgcaacgaaggcgaagctgcctgcctctgccgcgccgcgccgcgcgagatctgggcggaagggaaggcgcggcgcgacgcgacgcacgagagaaacaaaaggaaaagggaggggcgggggggacaaaaaccttcgccgcacaaagcggttaccgcgtccccccagatctcgtcgccgtgccgtgccgtgccctgcccttgccccgctggataccggcggcgcaccggcgcggccgcgcgatccgatgaggcggcggccgttcctcgaccagcggcggccgtcgtcgttcaagcgccggtggcagcagcgcccgtggtggttccgcctcgcggtcaccctcctcctcgccctcgcctgcctcttcctcctgctcgcgctccggggctcgcccgaccccgacccggtggtgctcccctccaccgactcgtccagatccgcggccaccacctcccctctcctccatcagagatcttacctcgatggcgttacggatgcgttcaacatgaccgacgaaatgctgagtgctcactcgttttcaaggcagcttatggaccagatttcccttgcaaaaacctacctcgtcgttgcgaaggaagccaataacctgcagtttgcagcagagcttagctcgcagatacggcgggcgcagagcatccttgcgcatgctgcagcccatggtggcacggtgacggagcaggatgcggagaaggcaattagggacatgtcggtgttgttcttccaggcgcagcagttccgctatgatagtgcagttacaatcatgaagttgaagggtcagattcaatccctagaggagaaatcgaaagctgaggcggaaaagagcaccaagtatgggcagattgctgccgaggagcttccaaaggggctttactgccttggagtccggttaaccatggaatggttcaagacaactgagctccagaggaagtttactgagaggagcccagcagtacagagcaacctaagggataacagcctttaccattactgtgttttctcggacaacatccttgctgtttctgttgtcgtcaattctacaactctaaattcaatgcgccctgaaaagattgtttttcacttggtgactgacgaggtgaattatgctcccatgagggcgtggttcgccctgaatgattacagaggagccactgtggagattcaaaaggtagaggatttcacttggctcaattcatcgtatgttcctgttcttaaacagctccaggatgctgccacccagaactactacttctctggcagtggtaatcgtggaacaccagtcaaattcaggaaccctaagtacttatcaatgcttaaccacctgaggttctatatcccagaaatctatccagaattgcgtaaggtcgtatttcttgatgatgacactgttgtccaaaaggacttgtcggaattgtttaccatcaacctcaatggaaatgttatgggagctgtagagacttgcatggagacatttcacaggttccataagtatcttaaccattcccatcctctaatccgtgctcattttgatcctgatgcctgtggctgggcatttggtatgaatgttcttgatcttgtgatgtggaggaataagaatgtgacaggtatatatcattactggcaagagcgcaatgctgatcataccctatggaagcttggatctttaccacctggtcttcttgctttctatggcttggttgagccattggaccccaaatggcatgtcttgggactgggctacacaacagtggatcccgctactatcaaagaaggtgcagtgttgcattacaatggaaatatgaagccatggctaaaaattgggatggagaagtacaagggcttctgggataactatgtagactattcacaccctctgcttcagcggtgcttcacgcactaatgaatgtgtatcaacattagaattttttgtgaacttcctagtggaaatgcttcaatgccttactcaacagccacacgtgaacacagtaacagaactgattaactttgtcctgaaattacatcctcagattagacatgggcggccgtttatactacctgtagttgatgaagtacagcaaccacagatgtgactggcacaggtaaacatcagaaagagccaagattgccatggattaggctgttatttgagcagcgtccattatatacattcataactcgcaaccaccaatgtaattttttcaattttgattttttgggtgagaaaattgagggcataattgtagatttgatttaaaattcttgtggtgtcacagcaagttttgagatatatatatttattggatgttcagagc

SEQ ID NO: 17309 - DNA, 2131 bp, Oryza sativa
  ref <308>: DATABASE ACCESSION NUMBER: AK067761
  ref <309>: DATABASE ENTRY DATE: 2001-12-06
gtcttgcctcaagtccctcaacaaacgaacgctgcttttcgacgaagaaaaggagggttcctcgctctgacgccttgcgcagttgtaccgtacattcgtactaccacacagcttgaagaagaagagggaattcgacgagaaatagtagaagcttggcgttcgtgcgaggaattctcggtggttgatcgatccgtgtttcgcggcggatggggcaggcgttccgcaagctgttcgatgccttcttcggcaccagcgagatgagggtcgtgatgcttgggctggatgccgcgggcaaaaccaccatcctgtacaagctgcacatcggggaggtcctttcgactgttcctacgattgggttcaatgttgagaaagtacagtacaagaacgtgatgtttacagtatgggatgtcggtggccaagagaagttgaggcctctgtggaggcattacttcaataatacggatggtttggtatgttttgtttcctttgtggttatctttttgggaatacgtgaaagatttgtgcatcgttgcattaaagaaggaaagaagtggttatttgattttgacagacttgtgtaatgatatagtattatatagccattctgcataggttattgtggttgactttgagacaaatatttcttagtttgacttattggttaaagttgtatggcatgtatgcaattgttttatccaaagtatccataaggctggtgaggttgctagatgatcctttgaacatttttaattaaaaaattaaatgcataccaatattgataccgcaaatatgtgtgtttaaaatctatggtaattcgatttgaatttatgtggagttatagaactcatttatttaaacaattatgatagtgagataacccaaatgagtggtatagaatttcccagttctcttttaattaacatgaaaacttacggatctagaagtaccctgtgcttggcatactatctattttcatgtaatggtattgtaatataatataatcatgcttaattatccagttaatggataatgttgtcgagtttgtcagatctttcactgtatgagattatagcaatgtttctactaattcaacacttaatgaattgctcttttgttgatactgtaaatgatatctttgcttgatttgatttggtttgatttattacagctgaacagagccatctttccagatataagctcattctggattattttgtgctatattacctaatgaagttactaattagctaatgttatgtctataatgtaaaccatactactcttcagttactaattagatgatgctcgtcagtaaaactttattctattttcttgttgatttgttttccttgagagatcggcgtgatactgaaattcggatgtattcatgagcatacccaactacatttataaattgtaatagcaacttattcctatatgttatttttgcacgttctgatttgcagatctatgtagttgattcattggatagagagagaatcggaaaagcgaaagcggagtttcaggcaatcgttaatgatcctttgatgcttaacagtgtaatattggtatttgccaataaacaagatatgaaaggggcaatgacgccgttggaggtgtgcgaaggccttggcctctatgatttaaagaatcgcatctggcatatccaaggctcttgtgccctcaaaggtgatggtctttatgagggcttggactggttggcaagtactctgaagggactggaagcctcaggtcgcctcccctcaggagggacctcattgttctaagtagcaggtctgcctgtaagattcttccgttgacactaacaatctttgcatcaaagatgatcatgggaacaaattatcttggtgtggaaggccttacatggtcacaccttacattgctcaggcgatatgcttcgcggtgtcgattctactgaaggcaaaagatgcatgagagcctgactacttgaaacattaccactgcagttttgtcatgggtagtagtgtagtagtacccatcgagtcttgtgaatttccttgaatgttacagctaactatcggatgcatttgttcacatgtgatgagtgaaacgcatgttgatgtaaaaagtttgtgtaaagttatgtttg

SEQ ID NO: 17310 - DNA, 1293 bp, Oryza sativa
  ref <308>: DATABASE ACCESSION NUMBER: AK067762
  ref <309>: DATABASE ENTRY DATE: 2001-12-06
gatatccatagctcatcatccaccctctcttccttccttccttccttccttccacacagaccagaccaggcatcccgacactacacgcagactctcgactttgtcactagcatcattgcttgatgatcgatgctgagctgcaaccaagcaccagcatatcctttccttcattccttcctggtgctggtagaagaagaacaagctagctagagtgataagagctagctaccttgcagatcgatctccggccagcgattgatcccatccagtataataatggcggccatcacgctcctacgttcagcgtctcttccgggcctctccgacgccctcgcccgggacgctgctgccgtccaacatgtctgctcctcctacctgcccaacaacaaggagaagaagaggaggtggatcctctgctcgctcagaaagactagatacaagaacttcgacgagctctacatgtactgctactatgttgctggaactgtggggctaatgagtgttcctgtgatgggtattgcacccgagtcgaaggcaacaactgaaagtgtgtacagtgctgctttggctctcggcattgcaaaccagctcacaaatatactccgtgacgttggagaggacgcgagaagagggaggatatatttaccacaagatgaacttgcagaggcagggctctctgatgaggacatcttcaatggcgttgtgactaacaaatggagaagcttcatgaagagacagatcaagagagctaggatgttttttgaggaggcagagagaggggtgaccgagctcagccaggcaagccggtggccggtctgggcgtctctgttgttataccggcaaatccttgacgagatagaagcaaacgattacaacaacttcacaaagagggcgtacgttgggaaggcgaagaaattgctagcgcttccagttgcatatggtagatcattgctgatgccctactcactgagaaatagccagaagtaggaggcgggaagaggagataaagggaagatgatgagcaggttaggcttagataggaaaaatcagacagcatctgccttccgattaatgttgaggaaattatattattgtgtgtatcatacatagcatgtatagggaaaatgctgcaggcaggcaggcaggctaggtgatggttgaatatttccttcacatcatgtatgtatatccttccttgatgctacagcacatatgtatgtatgactctgaagaaagagcaacctgtatagtagctaaccggctatggcctatgtatgggccgcagaggtgagc

SEQ ID NO: 17311 - DNA, 875 bp, Oryza sativa
  ref <308>: DATABASE ACCESSION NUMBER: AK067763
  ref <309>: DATABASE ENTRY DATE: 2001-12-06
gtcttccccgccgccgcccgagcaacactaaaccccccatctccgccgctcccgcctccccctcgccgccgccgcctcccagatctcgccatggcgtcggagaagaagcaggcgaacccgatgcgggagatcaaggtgcagaagcttgtcctcaacatctccgtcggcgagagcggagatcgcctcacccgcgcctcgaaggtgctggagcagctgagtgggcagtcaccggtgttctccaaggcgaggtacactgtgaggtcgttcggcatccggcgtaatgagaagatcgcgtgctacgtgacagtgcgtggtgagaaggcaatgcagctcctggagagtggcctgaaggtgaaggagtacgagctgctgaggaggaacttcagtgagactggatgctttggttttggtatccaggagcacattgatcttggcatcaagtatgacccatccactggtatttacggtatggacttctacgtcgttcttgagcgtgctgggtaccgtgttgcgcggcgccgtaggtgcaagtcccgtgttggtatccagcacagggtcaccaaggaggatgccatgaagtggttccaggtcaagtacgagggtgtcatcctcaacaaggcccaagccaacacctcctaagcgtcactagtgcctagttctctttagaacttgagttatttggatgttggatttgtatgcttcttaaaactaaagatgttttgttattttgtcaactttgagttggatcagttttggtggtatgtactttcatcttaatgctcagatctatttactctcttagcagagatagatatatgatttgacatatgctacgaactgctgtcaatgttgataaaatgaaaagagaatggttt

SEQ ID NO: 17312 - DNA, 1945 bp, Oryza sativa
  ref <308>: DATABASE ACCESSION NUMBER: AK067764
  ref <309>: DATABASE ENTRY DATE: 2001-12-06
gacgcgtgcgaggaagcacagttgaactcaagcaagacgaagtcgttgtcgctggccgctggccgctgggggagtagatgacgtcgccatcggagcaaccactgtcggagaagacttcgagctcgccgccggcagcggcaacaccgcgagaaaatgcggtcgacgccggttaggccttgagctcgccggtggcagcggcgccacaacaaggaacaaccgttatcaaagaggacccgagctcggcggcggcggtggcgtcaacgtcacaaggagataccgctagcgccggttagggcccagagctcggcggcggcggcacttggagggagcgggttgaagcttgaggcgccgttgatggagatggctgtgagctcgccgacgaattaaggtgaggatggtgggagcatcgagctagcaaggatttgttccatgctagtttctttatgttgcacacaagtgtttcttgatgttgcattttggtattccttgatgttgcaattcatatttctggatgttgcatttggtacttgatgttgcaggtgatttctttagatgttgcatatgtttttgctcttgaagtctgtgttttttagtgtttcatccgactgaaacattttcagtaaaataatgaaacattctttcataaaggatggaacatcaaagaaacaactcacgttggaacattttttctggaacggggaaacatttgcaacaacttatggtgaaacattttatttggaacagtgaaacattgcaacatctcttttaacatctagtgaaacattgcaacatctctttaatatatagtggaacaccgtccagagatttgtaaaactccggacgtccgatgtgtagtcatctccttttatgccatctgcaaaacaagcccggcactaacaaaaccacgccttgtttctattttttaagataatggaaatagattacatcttcggcttttatcctaaaacacacagctataagtttaatagtaataaaaaaaagttaagataaaagtaaatcaaaataagaaataaggtgatcggacaaatctcatgctcctctttattatttctttattattaactagcgttaaaccatatagttttttttctagcaattctaatggaactacgtcactcatagtgaaaatataatggaagggatggtgattttacatgagacttcatgagttgcacaagaaaaatatggatggggttattttcaaaattggttgtacacattcattcgtggcgatcaatcttgccacgatcgaggattactacgactctctgtgctatcactttatgtcaccatctaaactcaacagtaaaccagagcatgtggctaccatccatcccccgacccatcatacaggtacagccgtatagcaacctcttcacctctgtttcttgcacatgcgcaattccgccgttttttcttgcactagaacctgcactgcgtgtaagagctctcctacacgatgggaccaggaagcaacaactccttcccggccgagaaaagggttgcagtggtgacaggagggaacaaaggacttgggctcgagatatgcaagcagctggctgccaatggagtcaccgtcgtcttgacagcgaggagcgaggagaggggcgccggagcagcggccgcgcttcgtcagctcgggctatcggaggtcctgttccatcagtttgatgtgtctgagccttccagcgccgctggcttggctgattttataaagcacaagtttggcaagcttgacatattggtatgtgcttttaaatatgttttgttatatagtccttaaggagatactatgagataccaatttttatattgtaaatttggtatcacttagtatctaggtactatgaggtaccaaatagtacaatttggtacttcatagtaccttctcaaagatcgtaaaattgctcaaatttttggtacc

SEQ ID NO: 17313 - DNA, 2329 bp, Oryza sativa
  ref <308>: DATABASE ACCESSION NUMBER: AK067765
  ref <309>: DATABASE ENTRY DATE: 2001-12-06
gggccgtcgcaaggccgccgcatactcttctcccctctttgactcgttttgcgcccaagtcgatccccaacgtctcctcctcgctggttcgcccgccgcgccgcgccgatctccatccgttccacgagcagcggtgaccgggtgctgtcgtcctgctccccgcttcccttccggctccgatttgaggcgctaaagtttccattccgtgttacgaaaagctgcattaggacatggacatggcattgccaatagtgaatgccaccgcagcggtgcttgctcgtgtctcagctgcattcaatgccccttttgcccgcgcagttgtctttggggttcatatcgatgggcacctggttgttgaagggctccttatagcggtcatagtgtttcagctttctaggaagagctacaaaccgcccaagaagccactcagtgaaaaggagattgacgagctatgtgatgaatgggagccagaacctctgtgtcctccgatcaaggatggggcccgaattgacacaccaatgttggaaagtgctgctgctccacatacaaccattgatgggaaagaagttataaactttgcatcagcaaattatcttggtttgattggcaatgagaagattattgattcttgtgttggttcactggagaaatatggtgttggttcttgtggtccacgtggcttttatggaacaattgatgtccaccttgactgtgaggcaaaaatagcgaagtttcttggaactccagactcaattctgtattcatatgggatttctacaatatttagtgtgatacctgccttttgtaagaaaggagacatcatagttgctgatgaaggtgtgcactgggcagtgcaaaatggtcttcatctgtcaagaagcactgttgtttattttaaacacaatgatatggcttcacttgcaaacactttggaaaaacttacacgtggaaataaacgagcagaaaagatcagacgatacattgttgtagaatctatctaccagaattctggtcaaattgctcccttggatgagattgtcagattgaaggagaaatatcgattccgtgttattctggaggaaagccattcttttggtgtgcttggccagtctggacgaggccttgctgaacattatggagttccaattgacaaaattgatattatcactgctggaatggggaatgcattagctactgatggtggcttttgtacaggaagtgttagagttgttgatcatcagcgtctaagcagttctggctatgttttctcggcttctctgccaccttatcttgccagcgctgcggtttctgctgtcagctacctggaggggaacccgtcagttcttgcagacctgaggagcaacatttctttcctgcataaagaactgtcaggtactccaggacttgaaatttccagccatgttctgtcacctatcgttttcctcaaactgaagaaatcgacgggttcatcaaacaccgatatagatcttcttgaaactattgctgagagggtattgaaggaagattcagtttttatcgtggcgtcaaagcggtcacctttggataggtgcaaacttcccgtcggaatacgcctcttcatgtcagccggccacaccgattcagacatctccaaagtgtcctcatccttgaagcgggtctcagcatcagttctgtcagattacatctgatcccctttctctacgagctgtgcactaatctctgtgtgcatgtttggttaatgtacataacctgtacatttgtaggttccgatgattcccgttgccgctcatacttgcaaacacttcgaaaaatagacgtagaacagtgaaattaggtgtgttatgtatcgttcggtcttctggtagtggtttcccggtagaattcattctatatctttaattttgtcctctattcatcacttttatcattttggcttcaattcatcactttctggtggatttatattcttttttttagtgtagattggttgcgcaaatggcgaaaagaccccaaattctcaaatcggcacaaatcgtttccaggtttcatcttacccaatcgctccttccttgcaaatccaacctgagcagccatattaaccaaactgaaagcgctgcctatcgaacaccacaggcggagacgatggatttgtgccggacaaccggagcacgtgcaacgcgtccatgttcagcacaaaaaaatataactacttcaagctattaggacaatgttatatccaaatacatagaaaaaatattgctatattttggaatggagatagtacttccattcaaatcatgatatatataaatattaaatttgaaaatgc

SEQ ID NO: 17314 - DNA, 953 bp, Oryza sativa
  ref <308>: DATABASE ACCESSION NUMBER: AK067766
  ref <309>: DATABASE ENTRY DATE: 2001-12-06
ggtgcgcctcctgaatcaagtagaaatagtactactacgcaagtaacgtagatcagcacgtagatagcttgcgaagacgttctgaaagagtgcagagagtttttgctagctctcggtggtgatatccatggctaacgcggggctgaagccggtggccggccttctcctggttctcaacttctgcatgtacgtcatcgtggcggcggtcggcggctgggccatcaaccacgccatccacaccggctacttcatcggttccgggatggcgctgccggcgaacttctccccgatctacttcccgatggggaacgcggcgaccgggttcttcgtcatcttcgcggtgatcgccggagtcgtcggcgccgcggcggcgctcgctgggttccaccacgtccgcgcgtggagccacgagagcttgccggcggcggcctcctccgggttcatcgcatggacgctcaccctgctcgccatgggattggccgtcaaggagattgacctgcacggcaggaacgccagattgaaaaccatggagtccttcaccatcatactctcggcaacacagctgttttatctgctcgccattcacggcgggaggtagaagaaggtcaggtttttctgattaaagttgtgaaggtgaagacacctttgtgagcattattgggcatagatcatggactttacgagcctaatttgatttcaccggtttgtgagattaagttcgacatggatcaaccagatcgaggcgctgtttgtgcttgtctacgaatacgtgtgtgtgtgtgtgtgtgtgttttatgcagtgtgtgactagcacttcttagtaattcgtgtgccgaatactcgaactcctgtgtgatttgttgattatttggatgcgttgatttatactgtattgatttcgccgtgtctggttaatcgatttgattatgtggacgtgatggtttacctgtttg

SEQ ID NO: 17315 - DNA, 1352 bp, Oryza sativa
  ref <308>: DATABASE ACCESSION NUMBER: AK067767
  ref <309>: DATABASE ENTRY DATE: 2001-12-06
gaccttccgcctcgccttccgggcttcctccgctccacgccggcgagtccacactcctccgaccagccgccgccgccgccccgcgtcgtcacgcgcgcgcgcgcgcgagagagagagatccccctgccccagccacgatggcggtcggcatcgcgctgctgctcgacctcgcctcccgcggcccccgctacgcctccggggtccacgcccactccgcgatctccgcctccgccgccgccgccgcggccgcagccgccgcgctctccgccaccggcatccccctctccgcgcgccacctcttcggtttccctgggtttactatagcccattgtgatgctggtgcaccaactggattgaatgatgctcctgatcttattaatggtcttaatgacaaaatacaagactccctccagtacccaataaaggaataccccttggagttgaagccactcttttcggcctttgctttaaagaattttagcttgacaaccctgaggtccttcttattgtactatttgccacttttggaacctcatccgcacactgatggtgatgatgaggatgacctgcttcaagatgagtctgaaaataggccacctgttgatttggttactcccttctacaattcagtgaagcaaatcatccgtgagacttctgttgtaacaaccagaagaatattggaaaggattgcagtttgtcatgtttcacaaagaacagcatggaagcttctcaaggatgcctcaaaatcatcaaagaggaaatctgtaagggggatgcccttccaagagtactcatattgtgttgctagaacgactttccgagcgcatgcattgggagttgctgctgcttgggttgtgcaatccatagttgaggtttacagatgttttttcggtaagccttccaatgatcaggcaatgtttgatgagatggacaaagtcaaactgttcgggaaaaagatatacggcataaccgtcaaatgcgggttctctttggtttttgcctcaataggagctggcattggggtccttgtgcatccagtacatggacagtggcttggttgtacattgggagatttcgcgggaccaattgtcgccatacttgttttcgagaagttccagttgccgctctaaggtgaaaaatgaaaccccgcggcttctacgcaactagccttggtggagatctccatgactccatgagacctgacttgaagttcgatgaataatttagctgtcagcctctatgcgcaaaagtccatagcttgttttattttttttcaagacacgcctttgggcatcatgagatgttgatattatgttctttagattttgaaactcaggctaacagttttgact

SEQ ID NO: 17316 - DNA, 953 bp, Oryza sativa
  ref <308>: DATABASE ACCESSION NUMBER: AK067768
  ref <309>: DATABASE ENTRY DATE: 2001-12-06
atctagtattaccaccaagggtaccgaccagccttcgcagagaagaggaagtcacagataagagtaataataatagtgtaaaacagcttactggtgtgtgttgcccagagaaatgcactggcaatacttcaacagtgcacactaaaactggaataactgagcgtactgacagtatctcagaggcttgcggtaatttacaactattagtctaccgttggcccagcaaggaaaagctaactactttcactcgcaaggatcttgacccaaaatcagttttgatttttgttactcctgaagacagcagaagtgaagcagttaaaacggtacacatttgggtaggaggtgaatatgagagcagcaaatgtgttgacactgttgattggcagcaagttgttggtgatttttttcatctaaaggagctcggcaatactcttcctgttaaggttttcaaagagcatgaaacggagaatcttttggaagtgctgaatgctcgttaatggtaggctcaggctgtaggtatcagcatattgtagtagcttaacaaagtcagccgtgaagtatgattgaatgaaggcatctcctccagaatcgctccatgcggtggtgattttcagcgaggtataagccgttacaactattccccttgaacatatagaccacagattccatttagtagaactgatgatggattggcaattgtgcctacctcatatgatttgcttatggtcagaaaatgggcaggaggctgccagaacgttgtatctgtgagttaaaacacacatggatcaggttttggcacaatttgggtgtatattctccgctcccctgtaatgtaagctcagaaactgggaggcaacggtgtcgttttcaccctaaaaatttcttgtacatctcgaaaaagaaacagatcagatgtgtaatcctcttgtcttataagtccctccattggtctt

SEQ ID NO: 17317 - DNA, 1817 bp, Oryza sativa
  ref <308>: DATABASE ACCESSION NUMBER: AK067769
  ref <309>: DATABASE ENTRY DATE: 2001-12-06
gcataatctccacgcctcctccttccttctttaaccgccgccgccgcagcttcatcgccaagccacctccgccgccgaagccaccaccgcttccctcccactcgggcgagctcccccgtctctccgtagccatggcgaagaagaaggacgtggaggtggaggagttggatgaggaggtggttgccgctgccgccgcccccgccgcggacggtggcgaggagcaggaggccgagccaccggcgcgtcggccgtcgacgttcgcggagctgggcgtcgtcccggagctggtggcggcgtgcgacgccatggggtggaaggagcccaccaggatccaggccgaggccatcccccacgccctcgaagggagggacctgattgggctggggcagacgggctccggcaagacgggcgccttcgcgctgccgatcatccaggcgctgctcaagcaggacaagccccaggcgttgttcgcctgcgtgctgtcgcctacaagggagctggcttttcagattggacagcagtttgaggcactcgggtccgcgatcggtctgagttgcacggtgcttgttggaggagttgatcgggtgcaacaagcagtatcccttgcaaaacgcccacatattgtggttggaactcctggacgtcttttggatcatttgacagatacgaaaggttttagccttaataaattgaagtacttggttttggatgaagctgataagttacttaatgtggagttccagaaagcccttgatgatattctgaatgttatccctaaagaacggaggactttccttttttcagccacaatgaccaataaggtttctaaactgcagcgtgcttgtctaagaaatcctgttaaggtcgaggtagcgtccaaatattctacagtggacacacttagacaggagttttattttgttcctgcagattacaaggattgttttctcgttcatgttctgaatgagttgccagggagcatgatcatgatctttgtccggacctgtgaatcaacaaggctccttgctctcaccctaaggaatcttcgttttaaagctatctctattagtggccaaatgagtcaggataagagactaggcgccttaaacaggttcaaaacgaaagactgcaatatccttatttgcaccgatgtggcaagtcgtggtcttgatattcaaggagttgatgtggttatcaattatgatattccaatgaattccaaggattatgttcatcgggtgggtagaacagcacgtgcagggaatacaggatatgctgtatctttggtgaatcaatacgaggccatgtggtttaagatgatagagaagctccttggatacgagattcctgatcgtaaggtggataacgcagaaatcatgatacttcgtgaacgtatctctgactcgaagaggattgcgctgacgacgatgaaggagggcggtggccacaagaaaaagcggaggaagaacgaagatgatgaggaagaggaggagcgcaatgctcctgtttccagaaaatcgaagtccttcaacaaatcaagaagacggtgaaagcattggagcaagtgatcgtgaggcgagcttgggatgagttagattagtattatactggcataccaccgccacaattttatgtaaccattcaagaatagatatttatgtaggtccatttcgacgaattagctattttattatttgtgaagctggatcttggaaaatttgctcatctgttgctacaaaagcatatatggaaaatttgctcatctgcttccacaaaagccggtggcatcaggtgatctggacgagagtcattgtact

SEQ ID NO: 17318 - DNA, 2391 bp, Oryza sativa
  ref <308>: DATABASE ACCESSION NUMBER: AK067770
  ref <309>: DATABASE ENTRY DATE: 2001-12-06
gatccccacgcgcgcgctactcactccctccggccgtcccagcacgattactccgcccccgtgctcctcctcactcctctcctccttgctctacgcctcctcgccgctgacaccgctgagcgctccgcgcgcccccgtagctccctacacactgccttccccacctccgctgtgccgccctccccatgacaccacttcccgctccgccccatgcgccggacgagaccacgccacggcgccggcccccacgaccgccgccgccgccgtagcagcagcgtcggactacgcgcactacccgaggctctcgccggaggacgttgccccgcctacccctgcaccctaccacgccgcggccgcccttctcgggcaatccctacgtctcctcccccgccggcggcgtcgcacccgcctccaagaatacaatggatacggtgaagaatgttcttggcaagatggggaagaggttaggagaggcggctcgcaagacggagtccctcaacgcccgggactacccccgacggttccccctactgctggagccactgcggcgctcgaccagggacgccggactagcgccgacgggccactgtagcgccgagccaccaccgcggtcccacgttctgcctattcgcgcacgccacgctggtccgagtttgtccccgcctgcaccaagtttgtccaacgttccgccaaacattcttcgagatgcttgggaactagtgatttggggactacttcaagatggaggcatctcactcagatttcaaggctgttcagtgaggaaaactgaggggtagatctgttgatgatttggggatataatggtgtagcccctgattttttgttacaacatgacagaaattcagtattattggatggattcacgcaatgcgctgcaatttgtgcagaaaaggcagtttttttgttgtgtatgatagatcaagtttattggatcagcttctcttcggaactccccattcgagttgttgtgttttggtatgtgggaagtatatacgcgattttgctccaagtttgtcttgatagaatttatctgcgctggcacacttgattcggcacaaagtccacaacactgtgcctccgccgacaccgcagccagatcgaccagtcaagcatccactgtgccgatgtaatccccagtcaagccagattgatgggcagatccgatgcaccggccagaagaacgggctgctcagttgtaggattggtttcgcccaaaactgaagtgaaaagaatttgttggtgaaaaaagaagttcagaatcacaggttatgtctcttgattgcaagacaaactgattaactgtgcttgcaagggtgtttgtagaaacggcttaaccactatttcttcccaatcctggtaacaagcaacagacacaaggtaataacctttggtgccagatgctgcatcacactcctgagtgagcagcaaatgtttgacaaaatgcttcttaggtactgttactactcttgcatgctatttgattctttttttccaggcccagttggcagctaaactagtattgtttacaagtcaaagatatatatattgcagagaagatctttggtatgtgtttggccttttatgttaagcgataaatgacatgcaaaacataaatttcaggtttgtcattactcaaatacccattgactgtatgcgttgtttcaagttgcagaaccataccattgtcctttacagtatatctaatcatactttttttttgtccattcatactccatacaaactattctcaattctcaactaccaatgtcttcatatggatgatcttcagttgatgatcttgctaatttaagtgtcgtgacattatcaggctctaaggaaggacatggcgatctgcgagagcagcattgatattatcaaggtaacagcggccagtgtagtgccggttaatcttgtatgaatacagtctttatatatgcacactgccgatgtagtactatgtctctatgcatgcttgtaacaatgcctaaaagaccagggagaggctatgcagagggattggggaatggggactgccaattttctacattgataagtttagtgtttcccctggaagggatatggcagggatattcacaaagtgcagaatacgtgattcagttggagaaaggcaacacatgtggaagatggtttgcataataaattatcttaggttaaactaatgtttttttctgatctggtgttttgtaccctcataaccatctagctgttgtaattcatcaagtacccatgttaaagtggttgtaccctatagcaacctagcagggctttacattttgttctgtgcaaaagttggcatggagtaagaaacagggttatgtttacaattttcaaataaattattccttacct

SEQ ID NO: 17319 - DNA, 1701 bp, Oryza sativa
  ref <308>: DATABASE ACCESSION NUMBER: AK067771
  ref <309>: DATABASE ENTRY DATE: 2001-12-06
gagtgctggtgttcaggttcctgttgagcattctccactgcgacctgcggaaatgctgaatcatgtggtttccgctccccctaatggcaacagtcaaattccactgcaggcgaccgctggtattgatagtgtggaagccacacgtgatccagcttacacagattctctattctcaaatcaggatccttggaatgcagtgggaaatgcttctgtagcgcctccaagactgaataagttggctaaggagcctgctgtttctggagatccatatgtggaaggccatgggcttgccatcaacagttcaaatgctgctacactcttagaagaaggcaatcttccactcatccaggaccgcacttttaaggacatctatcctgaaccctctcaaatgagcaaaggatacggagaagaaactattaagcgacagttacaagctgttgctgagggtgtggcagcatctgtccttcagtcacctttccctgaaaaaccaaccgtattctctggtgatcacacagataaacaaggagctgtaattgatccaaaattggaggatgcggtgaacaatcaatcagacaaaacaagccaaggagttaaagttttagatgatattgataatcttcagataataaagaatagtgatctagaagaattgcgggaactgggttctggaacctttggtactgtttaccatggaaaatggagaggttccgatgttgctataaaaaggatcaatgatcgatgctttgctgggaaggcatctgagcaagagcggatgagaactgatttctggaatgaagctgacaagcttgcatcattgcaccatccgaatgttgtagctttctatggtgttgtactggatggaccaggtggatctgttgcaacagtaactgaatacatggctaatggttctcttcgacaagcattgcaaagacatgaaaagatatttgatcggcgtaggcgtctcctgattgcaatggatgttgcgtttggtatggagtatttgcatgagaagaacattgtacactttgacctaaagagtgataatctgcttgtcaatctaagagatcctcagcaccctatatgcaaggttggtgatttgggcttgtcgaaagttaaatgccagacgctaatatctggtggggtgcgaggaacacttccttggatggccccggagctgttgaatggaagcagcagccttgtttctgaaaaggtcgatgttttctccttcggaattgtaatgtgggagctgctcactggtgaagagccttatgccgaattgcattatggcgccatcataggcgggattgtaaacaacaccctgcgccctccggtgcccgagtcatgcgaccctcggtggaggtcactgatggagcaatgctggtcgtcggaaccgtcagaaagaccgagcttcacggaggttggcaagaggctacgggccatggcaaccccctctaccaaggcgcaacctcagaaataaaatttttttttttgccccctcaacctcctgttctgcggcctgtctcctgtacaaaatcttggaagggagccatggcttgctctgtactagtctgtacatgaataaggtaaaaaagagaagagaaaaaaaatggtaatgcctatagagatgatgacgaatgcttgatcctccctgtgaggttgtgacgcttttcaaaaggacgatgcatggcaatggttggcgtt

SEQ ID NO: 17320 - DNA, 1695 bp, Oryza sativa
  ref <308>: DATABASE ACCESSION NUMBER: AK067772
  ref <309>: DATABASE ENTRY DATE: 2001-12-06
gacttctctcccaccaccgagaccgccgcctattctttccttcctccctctctccggtctttgcttctcgcgaggaagttggcatcctagatacatactccttccatggcgccgtcccagatccgcttcggccaccagatccccttctcccgccccgactccgacgaggaggaagaggaggacgacgaggacgaggaggtggaggaggaggaggaggaggaggaggaagaggagtacgaaggggaggaggaggagatggagggcgaggtgccggtgtcatcgccgctgatgctgccggcggcgaggggaggaggaggaggaggggtgtccgtcgtggagacgtgcggcacgtctcgcacgtcaccttcgaccgcttcgtggggttcctcggcctccccgccgacctcgagcccgacgtgccccgccccgcgcctagcgccagtgtgagtgtatttggagtttcaccaacgtccatgcatgctcatacgataacagaggaaacagtgtgccaacaatactattgaccatgcaaaagaagttatatcaacttggggggcttcaggctgaaggaatcttcagaataaatgcagacaatagtcaggaactacatgtcagggagcaactaaacatgggtgttgttccggatggtgttgacatgcactgtctgacgggcctcataaaggcatggtttcgtgaacttccaagtggagtattggactcattgactccagaacaagtgatgcactgcaacactgaagaagaatgcgctctccttgcgagtactctacctccagtggaagcagcactacttgattgggccatcaatctgatggcagatgttgtggaacatgaaaactacaataagatgaacgctcgcaacattgctatggtttttgcaccaaacatgactcagatggccgatcccttgactgctttgatacatgcagttcaagtgatgaattttctcaagacacttatcttgaagactgtgaagggacgggaagaaacagctatgccatcaagtgcattcccatcaagctctggttccccaagtgacaaagatgaacctcaggcattagagcatttggacaagcccaccatttgttcaactcagcaaaataatgattttccaatgattagtggggctactcttgatcacttcctctttagagcagaaccattgcgtcataatgacgcacaaggtagtgctggacgacccaagaaacgcgacaataaggaccatgacaacagcagcagggaattttctcccatagatagtgattcaagtagccaagccagcaattctgcaagcaaattcagtaatgacaatgtggaaggtttatttgacagatttaaatttcggaaaggagtagggaggctgtgcagacaccctgtttttcagttgagtaggtccatgaaaaaatcaggtgaagcgggacaagcctgtgtatgaagtaatgacacgatagggtgtagttgatagtttccattatttttagaggcatgtttacttaacatttcatcaaccattgtcctagatttcgtgagtagaactgtagaaggtattagccaatttggtggtagtagtactgaactactgatgtcgagttcctgcctgtatatttcaactattcatttctgaccaatcaacttgtacgatgccatcattactttcggttgttagttatacttgtt

SEQ ID NO: 17321 - DNA, 1131 bp, Oryza sativa
  ref <308>: DATABASE ACCESSION NUMBER: AK067773
  ref <309>: DATABASE ENTRY DATE: 2001-12-06
ggggggagggtgtggcacacgtggcggtggcgatggtgcgagactgcgagctcctgtctcctaccggatgcagcgatggcgagggcacagccacggaagcctcagcgcggagatggcggcgacagtgggggtacggcgcagagatggcgtccctccccctccctctcctcctcgtccttggcctcttcgttccttttgtcgaatctgggagacggtggcggcggggactggggctcgagggagatgatggcagatccaggaggatgacgataacgacggtggcatgctgagcattttgggctgcccacggttaactttggatggccttatttccaatctcaagtcatttaatacgaatgcggtgtttggaattaagcacctcagagttggaacactcttcagtttacggaaggagcagtacgaagagttattatccttgttgaataccgacaagacacaggaggtgcataatcgggggccaaagattccttcatgctaatcagtttttatcagattgcaatgatggatagatatgctcctgatattgagatgtgccctatttgtcagaactacaaacttgtttatgattgccgagatgaaggatgtgatgatagaggccgagtttagttccaaattttttcttcaaactttcaacttttctatcacatcaaaactttcctacacacacaaacttccaacttttccgttacatcgttccattttcaaccaaacttctaattttagcgtgaactaaacacacccaaaagatcaggtaatttcaagggttgtgctgtttgcatactgagatgttatgagtgtggaaggtgtgtagacaagttggcattcaaggagtcattttctttggactgggtttgccctaattgtcaagagaagaaggatctgtctcccccaatgaaataggggtttgtcccccaacgaacactcttcctctgctaacagagaacagcgtgcaatgctgtcatgcaagccatcttaacgtatcatttctactgagaaaacagacaaaaaaaacgatgagtttgttattcttgaaggcgcagccatcctgacatgctgcattagcttcttgcaagaaaaagaacaaaaaaagagtagttagtttgattcagc

SEQ ID NO: 17322 - DNA, 2089 bp, Oryza sativa
  ref <308>: DATABASE ACCESSION NUMBER: AK067774
  ref <309>: DATABASE ENTRY DATE: 2001-12-06
ggccgagcagcgccgcggaggcgtcgtcgtctccggtgggttgcaggaggcgaatgcgatggggtccaagacgaaggggtgctgcgggtggctgatcgtggcgctggtggcgtcgctggtggcgacggcggcggtggtggccatcatgaagaagaaggtcggcggggggagcgggcgcaagctcaagccgctgccggtgcccggcccgcccggggccatcgactccaagtacggcgacgcgctcggggtggcgctccagttcttccaggtccagaaggcggggaagctggagaacaaccagatcccgtggaggggggactcggcgctggatgatgggaaaccagcggggctggatctttccaagggaatgtatgatgctggtgatcatatcaagtttagtttcccgatggccttcacggcaacggtgctctcgtggtccatacttgagtatggagatcagatgagcgccacgaagcagctggaccctgcgcttgatgctctccgatggatcactgatttcctcgtcaatgcgcatccatctgacaatgtgttctacattcaggttggtgatcctgatctagatcacaactgctgggaaaggccggagactatgtctgagaaaagaccactcacacagattaacacaaagtctcctggatcagatgttgctgctgaggcagcagcagctatggcatcagcatcaattgttttcaaatccagagacactacatattctgattcacttcttcaacatgctcagaagttgtttacttttgctgatacttataaaggcctcgccagtgacacctatccaaagctccaaaactactataattctactggttatcaagacgaactcctgtgggcagcgagttggctctatcatgctacaggagaccaaacatacctcagttatgtgactgtagagaatggaaaagcttttgctgattggggaaggccaacatggttcagttgggatgacaaacttgcagggacacaggtgctcttgtcaagattaaatttctttggatccaaacagacatctaatgctgaaaacatgggactcaaaatgtacagagacactgctgaagccgtcatttgtgggctcctaccagattctccatcagctactgccagtaggactgggggggattggtgtggataagtggatggaattctctccagcatgccacaaatgcagcattccttgctgttgtttacagtgactacatgctcacatcgcaaacagcagcagtgcaatgcagtggaaagtactacagtcctacagatatacgcaattttgctatatcacaggctaattacatcttgggagacaacccaatgaagcttagctacctggttggatatgggagcagctacccacagcaggtacaccacagaggggcgtcgatccccgctgatgcaaagacaggctgcaaaggattccagtatcttcattctacgagcccaaacccaaacgtcgccatgggagccctcgtgggcgggccgttccagaatgacactttcgtcgactctcgggacaatgctgttcagacagagtcaagcacttacaacagcggcaccctcgttggtcttctttctggtctggtcacaacttcctctgtggcgcagtcgttcacctagagctctctcagagtttgggcaatggctttgaccaaccgggaggatatacatgtagccatgtacaatgagagatttttggcgtgaccaaaggcaatgtgccatcagcgaaacgccttcacggtgttcttcgttgttcatcttttgggtgatgggtggttagcagtagtagttcttgtgccatagtgctattgtttatacaaatactgctgcgtagttgcatccggtttgctggtgtactatctgatactacgagtgttgtatttgtaggacggattccatttgttgattctaaaatgatctctggtagcttgtattgatgatctgtaaaatccctcccaagatgaacattgcactgaacatgtgagatcacatggggagagggaagtattaatccagtttgttcagtatgttcatacataaattggacatcttttcagtatggttc

SEQ ID NO: 17323 - DNA, 2044 bp, Oryza sativa
  ref <308>: DATABASE ACCESSION NUMBER: AK067775
  ref <309>: DATABASE ENTRY DATE: 2001-12-06
gcttccctttcctcccccccctccgatccaaccgccggcggcggcggcggcgaccggcggccagagcgagctccgtcccgatccggcggggaggggcctccccgcacccacgcgctaacctccccaggcggcctcctcctcctcctcctccgcagcgatgggctccatggagccgttcaaccggctggtgaggctggcggcgcgcgccttctacgacgacatctcgatgaagggcgacaaccagcccaagacctcccgcggggacaaccgggggatggctgtcgtcgtcctcgacgcgctcaccagacgccaatgggttcgagaggaggatttggctaaggcattgaaactccactcaaagcaattgcgccgtatcctccgattctttgaagaagagaaactagtgacacgagatcaccggaaggagtcagcaaaaggagcaaaaatatacagtgcagcagctgcagctgctggtgatggtcaatcaattaccaaggagggagaagagaaagtaaagatgcatacccactcgtactgttgcttggactatgcacagatctgtgatgttgtaaggtatcggatacatcgcatgaagaaaaagttgaaagatgaattggacagcagaaatacaatccaacactatatatgccctaactgtaagaaaaggtattcagccttcgatgcattacagcttataagctacaccgatgagtacttccattgcgaaaattgcaatggtgagctagttgcagagagtgacaagcttgcttctgaggaaatgggagatggtgatgataatgcaagaaaacgccggcgtgagaaactaaaggatatgcagcaaaggatcgatgaacaattgaagccattgcaagcacaacttaatagggtgaaggatcttcctgctcctgagtttgggagcttacaatcatgggaaagagctaacattggtgcttttggaactgctgaccctagtgctgctgactcgtctaggaacccacaagggcagtatggtacaccaatgccatacctcggagagacaaaggttgaagttgcattgtctggcaccggtgtaaaagatgaaggtgctgaatcaggtacaaatggtaacgggctgaaagtcttgcctccatggatgatcaaacaaggtatgaatcttacaaaagaacaaagaggagagaccagtaactcatcaaatctagatgaaaaatcagaagtcaaggatgagaaaaaacaggactcaaaagaagatgagaagagtatacaggatgaatacataaaggcttattatgaggccttaaggaaaagacaggacgaagaagaagcgaaaaggaagatacagcaggaaggggatacatttgcttctgcgtctcattctgaacggcaggtgggcatgaaatccaaacgagaggatgatgatgagggtgttgaatgggaagaagagcaacctgcagggaatacagctgagacatacaaactggcagatttgaatgttgaagcccaagaatctggtgatgaagaagatgaaattgactgggaagagggttaaaaggcagtcacaaattcgttaaagtagttcaatttcattccaggaattggatgatgagcaatatcaccaactgaacaagaagtcaagaaaaaggcatgaaaagcattgccaccaaagaattagtttgtatggtttgtttgaccaagggaacttttcggaagtgaagcgttttccttttaatagcgaaaacatttcccaaccccaggcggcattttctccccaagatccttaaaaagctaccatactgtaaagtattatgctattgacatcttcaagggccatgtgggtggaatttattgtcgcaaaatcagctctgttttcagtgaatgatcttttttttttttatgttgtgagactgtacgctatggccataaacatgccatttttcagatgttcttgccatgacctgtatattatgatggctatgcgctagattaaatttctgagattaatgaattgatttactccaagattaataatatcaatggtagtttgccc

SEQ ID NO: 17324 - DNA, 2017 bp, Oryza sativa
  ref <308>: DATABASE ACCESSION NUMBER: AK099016
  ref <309>: DATABASE ENTRY DATE: 2002-08-28
gggctgtctcatcactctgtaaccgataaggctgccgccattgctgctgctgctgctgcttccgccgcgtcgccttctccggcgatggaggcggcggcggcgattggaggggcgcggtccccgctctccttctcctccagcctctgcaatgcaaaagtatcctgtggtttagctcttcacaatgtgaagatcaagagcagtcgaaggcttgaggtggtttgccatggaatgttgacaaccagaaagttcatgcagaagaagaagaaagaggaggtatataaggatgctgctgatgaagcagagcagaagaattggaggatgatgatgagggagatagaagagtcaggatcagctgtctccattctgaagactcagcgaagcaagaaagaaccactgccaagggatgctgttcttggaactcttatgcggttcaaacagctcaagaaatggaacctggtcagcgagattcttgaatggctacgcacacaacattggtggaacttcagtgagatggactttttgatgcttgttacggcctatggaaaattaggagattttagcagagcggagagggtcctgaagtatatgaacaagaaaggttacaaaccaagcgtgatatctcagactgcactgatggaagcatatggaagagccaagcagtatcgtaaggctgaagcagtgtttcgcaggatgcaaacatcaggccctgagccatcagctgtgacatatcaaatcattttgaaatcttttgttgagggtgacaaatacaaggaagctgaagctatttttgaggaccttcttaatgagaaaagagcttcttttaagcctgaccagaagatgtttcatatgatgatttatatgtacaagaaagctggcgactatgcccaggctcggaaactatttgctcagatgtcagagagaggaatccctctatcaacagtcacctttaatagtttgatgtcatttgaaacaaattacaaggaagtttcaagtatttatgatcagatgcaaagaactgcgctaaaaccagatgttgtgagctactccctgctcatcaaagcttatggaaaagctagaagggaagaagaagcattagcagtttttgaagagatgcttgatgcaggagtcaggccaacacgcaagtcgtataacattttgattgatgcatttgcaatatctggattggtagaagaagctcatacagttttcaaggccatgagaagacacagggttgagcctgatctctgttcttacacaacaatggtcttagcttatgtgaatgcttctgacatggatggggctgagaaattcttccgccggattaaagaggacggtttgaagccaaatgttgttgtttatggaactttgatgaagggctactcgaaattaaataatgttgagagagtaatgagagtgtacgagagaatgcggatgcagggtgttgaacccaatcagactatttatactaccatcatggatgtgcatggaaggaactctgattttggaaatgctgtcatctggttcaaagaaatggaggctcgtgggtacccagcagacaagaaagcaaagaatatccttctttctcttgccaaaactcctgaagaacaagaagaagcgaatgaattgacagggaattgtgcaattcagctggaagcaaaacccgatggaacaacatatggtttagaaataaatggtactggaaatgagtataaacatggacaaaatgatgctgggcatgacagtttgttagatggcgcatgcaccacaagtaatcgaaatggtaaagtcgaggctgggaaaggtcattttgaggaggttaatgacgatgatgatgatgatgatgacgatgattacgatgaagagttaaattttgtttctttcaaagataagcgagaactaaattttgccacttgatgttttgattaatgtatatctttatattccaaacttgtgatggcatttcctatacaaaggtatccatgctgtttgtgaaatgtcaaatatagctatttttatg

SEQ ID NO: 17325 - DNA, 2242 bp, Oryza sativa
  ref <308>: DATABASE ACCESSION NUMBER: AK067776
  ref <309>: DATABASE ENTRY DATE: 2001-12-06
gatcacagtccacgggaatagtccaaaccgcctccatccacggcagacgcgacgcgacccgaacacgagagaggagggaagcaagcaaagcaaagcgaagcagcgagagggagaagcatacgaagaagaagaagaagaggaagaggagggcatggagatgcagcacgtggtggaggtcgagcagggccgcgcggccgccgacggccggccctccgtgggccccgcctaccggagcgccttcgccagacaacagaatgcttggtcaccgtgagattgttgacgggaaggctggtgcatacgtttggaagacatacaaggaggtgtttgacctttcgactaagattggtaactctattaggagccgtggacttgcaaagggaagccgttgtggtatctatggtgctaattgtcctgaatggattatcacgatggaggcctgcaatgctcatggaatctactgcgttccattatatgacactcttggagctggtgctgtagagtttattttgtgccatgcagaagttgagattgctttcacagaggagaaaaaaattgagcagatcttcaagactttccccaagtcagctgaattcttgaaaacaatcgttagttttgggaaggtaactcaggaacaaaaggaaaatgcctccaaatatgggctggagatctattcatgggatgaatttctttctttggcagaccaagaattcgatcttccagtgaaagcaaagactgacatatgtactataatgtataccagtggaactactggtgaccccaaaggtgtactgatctccaatgcaagcattatttgcctagtcgcaggtgtagatcggctgcttaactgtgtaaatgagcagctggagcaaaccgatgtttacatgtcttatcttccacttgctcatatctttgatcgtgttgtggaagagctatttatgttccatggtgcttccattggattttggcgtggggatgttaagctgcttgttgaagatattgggacactgaaaccaactatcttgtgtgctgttccacgtgtgcttgaccggatattttctggactccaagctaaaattgcatctgggggtttcataaagagtacattgttcaatcttgcttacaaattcaagcaatttagaatgatgaaaggagctaagcacaatgaagctgccgcaatatgtgacaaagtagttttcagtaaggtgaaagaaggtcttgggggaaatgttcgtgttattttgtccggagctgctccacttgctactcatgttgaagaatacctgagagtggtgacttgtgcacatgtcttacaaggatatggtctcacggagacttgtgctggatctttcgtctccctaccaaatcagatgtgcatgatagggactgttggtcctccagtgccaaatattgatgtctgcctggaatcagtgcctgaaatgaattatgatgcacttgcaactagaccgcgtggcgaaatctgcatcaggggagaaacagtattctcaggatactacaagcgtgaagaccttacaaaggatgttttgattgatggatggttccatactggagacattggtgagtggcaacctgatggaagtatgaaaatcatagatcgcaaaaagaatatcttcaagctttcacaaggagaatatgtagcagtagaaaatttggagaacatttatggtcttgtttctgctatagattcgatatgggtatatgggaatagctttgagtcattccttgttgctgtggtcaatccaaacaaggaagcattggagagctgggctgcagcaaatggaatcagtggtgatttggaggcattgtgtgagaaccccaaagcaaaagaatacattttgggagaactgtcaaaagtaggaaaagagaagaagctcaaaggttttgaattcataaaggctgtacatcttgaaccagtgccatttgacatggaccgtgatttgattactccaacatataaaaagaagcgccctcaattgctcaagtactaccagggaacaattgacaacatgtacagaagtgccaaatgagctcgccatgccgtctagaacatccaagatcaaaggagctgacagaagcaccaatctcatgctgtttgtatgttcatagtagggacggaaaaatgttgtaatatctcttttggaaacgtcttgacatatatgatttattcgtagaaacggggtatgcacctgtacgaagaatcgcaagcaccgtttctgtattgcct

SEQ ID NO: 17326 - DNA, 3581 bp, Oryza sativa
  ref <308>: DATABASE ACCESSION NUMBER: AK067777
  ref <309>: DATABASE ENTRY DATE: 2001-12-06
gacccaggcgttcgcccttatcgttgcgcgagcccttcttcttcctcctctctctctctctctctctctctctctcgccaaccaatctcctcccccctcctttcctcctcctcccgaaccaccggaatccgacgcggcgccgccgcgccaccccgttccgccggctctcttcctcacctctcctccccaggagatcgtcaatctcctcggtcaggtgtttgatcgattgcctgtgggaagcatatgggcggttagattcgtgaagttgagaggaatcagaagacgggaattgtttgaggggactgaatttgatctggaaaatggggtggtttcgggctgcgtcaggattggctcgggtggcgctgaggaggaacctggcgcgtgctccggcgaacccttttgccggtcctgcgccacggtacttccactccacccgcccccggcggttcgccgctcctgtgccccgcgccgtgccgctctcgcgcctcaccgacagcttccttgatggcaccagcagcgtgtaccttgaggagctccagagggcgtgggaggctgatcccacctctgtcgacgagtcctgggacaatttctttcggaactttgtcgggcaggctgcaacttcgcctggcatatctgggcagacaattcaggaaagcatgaggttgctgcttcttgtgcgagcgtaccaggtgagtggtcacctgaaggctaagcttgatcctctcgcgctagaggagcggcctatccctgatgttctggaccctgcgttctatgggttctctgaggctgatctggaccgggagttttttcttggtgtgtggaggatggctgggttcttgtcggagaatcgccctgtgcagacactccgttctgtgttggagcggcttgagcaagcttactgtggtaccattgggtatgagtacatgcacatacctgacagggagaaatgtaattggctgagggataggattgagacggtcaatgcaagggagtactcctacgaccgtcgccaggtcatgcttgataggctcatgtggagcactcagtttgagagcttcttggcacagaaatggacgaccgccaagcggtttggtcttgaaggtgcggagacactgatccctggcatgaaggagatgtttgacagggcagctgatcttggtgtagagagcattgtgattggtatgccacacagaggtaggctgaatgtcttgggaaatgtcgtgaggaagcccttgcgacagatcttcagtgagtttagtggtggtaccaagcctgccgaagaaggggagggcttgtatacagggactggagatgtcaaataccatctaggaacttcatacgataggcctaccagaggtggaaagcatatccatctgtctctggttgcaaacccaagccatttggaagcagtcgatcctgttgttgctgggaagaccagagcaaaacagtactattctaatgatcttgacaggaccaagagtttaggagtcttgttgcatggtgatggaagcttctcagggcagggtgtagtgtatgaaaccctgcatctcagtgctcttccaaactacactactggtgggacaattcacattgtggtcaataatcaggttgctttcactactgatccaagggcagggaggtcttcgcagtattgcacagatgttgctaaagcattggatgctccaattttccatgtgaatggtgatgacttggaggcagtggttcatgtctgtgagcttgctgcggagtggcggcaaacatttcattctgatgttgtggtggatattgtatgctaccgccggtttgggcataacgagattgatgagccttccttcacccagcctaaaatgtacaagataattaggaaccaccagagtgctcttgagatataccaaaacagacttttagaatctgggaagatatccaaggaagatattgataagatgcagaagaaggtcagcactatcttgaatgatgaattccaaaacagcaaagaatatattcccaataagagagactggctctcagcttactggactggattcaagtcaccagaacagatttcacgaatccgaaatactggtgtcaagccagagattctaaaacgtgttggagaagccatgactactctgcctgaaaatttcaagccccacagggctgtcaaaaagatttttgagctgcgtcgtcagatgattgagacgggcgaaggcattgattgggctgttggtgaagcacttgcttttgcaactcttataattgagggaaaccatgttaggttaagtggtcaggatgttgagaggggtacattcagccaccgccatgctgttatccatgaccaggaaactggagagcaatactgtccgcttgataatcttgttatgaatcaagatgaggaactatttactgtaagcaacagttccctgtcagagtttgctgttttgggctttgaattgggctattccatggagaatccaaactcactggttttatgggaagcccagtttggtgatttttccaatggagctcaagtgatatttgatcagtttctgagtagtggagaggcaaaatggctccgccagaccggtcttgtcgtttgccttcctcacggatatgatggtcaggggcctgaacattccagtgcaaggttggagcgtttccttcagatgagtgatgacaacccttatgttattcctgagatggatccaactctgaggaagcaaatccagcagtgcaactggcaagttgtgaatgtcacaactcctgcaaactatttccatgtcctgcgtcgccagattcaccgggacttcagaaagcctttgattgttatgtctccaaagaatctccttcgacacaaggactgcaaatcgaatctttctgaatttgatgaccttgctggtcaccctggatttgacaagcaaggaacccggtttaagcgtctaattaaagatcagaacaaccataaggaccttgaggagggaatcaagcgtttagttctctgttctggaaaggtatattatgagttggacgaagaaagaagaaaaaaggagcgtgatgatgttgctatatgtagagttgaacagctctgtccattcccatatgacctcatccagcgcgagttgaagcgatatccaaatgccgagattgtttggtgccaagaggaacccatgaacatgggggcgtacagctacatcaatcctcgcctcctgaccgcgatgagggcgcttggtcggggcacgatagacgacatcaaatacgttggaagggccccatctgcagccaccgcaacaggtttctactccgtccatgtgcaggagcaaaccgagcttgtgcagaaggcactgcagcgagaccctatcaactctccattttgaacctgtagattttatttggatagccgtgggtaatcaaacctttgatccaacagcaaaattattgcctgtgcagccatttggtgaataatccgcttcggatgtttggtaccgcatgagagaaaccatttgaaacccatgttgggatgcatcattttgtgtttcttaacatcaaattaaaccaagttgcatccaatgcttacttgaaatatt

SEQ ID NO: 17327 - DNA, 979 bp, Oryza sativa
  ref <308>: DATABASE ACCESSION NUMBER: AK067778
  ref <309>: DATABASE ENTRY DATE: 2001-12-06
tagggcccaattcggactctcccccatctcggcggcgacggcggcgatggcgtcaaccggcgtcaagctcatcgacatcgccgtcaacttcaccgatggcatgttcaggggcatctaccacggcaagcaatgccacgccgccgacatccccgccgtgctcgcccgtgcgcgggcggccggcgtcgaccgcatcatcatacgctgctttgctgcctgccattccccctttcgcttcttatttcttgcttatggctcagatttggtgtgcttaatctctcgctttcttggtttggtccggcggaaggtcaccggaggttcgctgaaggagtccagggaagcgctcgagatcgccgagaccgatgggaggctgttctgcatggtgggcgtgcacccgacgagatgcgggtgctttgctgaatgttaggagtttgaggagagtggagacccgaaagggcatttccaggcgctgctggctctggcgaaggaaggaatcgcgaaaggcaaggttgtagcagtgggagaatgtggtctggattatgatcgacttcacttttgtccatcggatgtacagaagaagtacttcaagaagcaatttgaattggctgaagcagtaaaactgccaatgtttcttcacatgagggctgctggtgaagacttctgtgagattgtatcagaaaatctgcatagattccctggcggtgttacacactccttcactggaacttcagaggaccgtgataagcttctttcctttgaaaagatgtttataggtcatctcccccctccccttgatgttacatatttgcatgtagtgcatcttgataattatagaacttaaagagtaccacaacacttctatttgtagtcgaagttcatttcagtttctgctgcaagtttgttctttttttggtgaagacctccatttgggcaattagatgtgaataaaaatattagtagcaattaaaacgttctcattccg

SEQ ID NO: 17328 - DNA, 2050 bp, Oryza sativa
  ref <308>: DATABASE ACCESSION NUMBER: AK067779
  ref <309>: DATABASE ENTRY DATE: 2001-12-06
gccaagactgaaacactccgcagactgacacgcttgcatgggggcggcggtggggaaggcggctccggcgaaggcccggctcgacattgccgagaacaccatattccagcggaaccgcggcatatgggacgcggcggccgcctgcaccaacgaacgcctcctcgacgcggtcgacgagatcctcgacctggcggaggcccagcctttccccgcggcgtccgcggccgccgcccgcctcgacagcgccctccgcgccgccatgtcgctcatgatggacgggttcatgtgcctcagggtctggaacgcctcctcccatgacctgcgcctcgccgtcgacaggctcgcggtcggtgcttccgccaacgccctgtggcagcacaccttccccagcaccggcgacaggagcagctcggcgggcaccgtggggcgcgcgtcggccggaagcccgtcgagtgcccctggcgacttggtcggcttcttggacggcgagttcttggatgagctccagctgctctgccccgcgagcctgctcgtcctccatgagatcgcgcaccgggtaatccgtgccggctacacgaaggagctcgtccagaaattcacaaattcgccatgcgatgttctggacaggtacgactattttcttgcagtttaacctactatgtttttttttaatctgaaccgtgacttctttggttctaaagaaacgttttgtttttactgtaatcgtggaacaggttcttgtcgatttttcagggggaatgctcgcggcggacgacagtggatctgatcaagcgatggagcctggcgactcatctcgtcgggaaggccctcgtcgtcatgcagcggcagctgtacacgcacaactcccccggcgcctttgatgctctcaaggacgagtacttcttggccatcacaaagaatcgaatcttgaacctgctcaagttcgcagacgatttcaccagcatcacgtcgcacgagaagctcatttacatccttggcatgtaccaggctctgagcgaggccgcttcaggcctcctgctcatgttcaccgggccgcacaaggagctcgttgccgagaggtccgaggaaatcctcgccaaattggctatgtcgataaggtccatggtcgccagcctcatagcgaaggtacgagacggtgtctcgaacacgaagaacatcgtcggcgtcggcgtccatccgctgacgaaatacgccgtgctctgcatcgtgcggctggcgccgcaccgcgacacgctcgacctgatcctcgcgagcggcggggacgacgtagcgtcgctgtccgatctcgcgtcgcgcgtggtagggtccctggaagagaagcccgtgcttccctgcgatgacgacgcgacggcggcggcgaccggttcgcggcaccacctcttccacgccaacaacgccaacttcgtgctgcaaagctgcaagcctctgctcggggacgagtgggcggcggcgcgcgagagcatcgtggagcggcacgtcgcgggctacgccgaggcttgctgggcaccggtcgtggcttgcttggaacccgcgggcaggaagccggcggcaaaagtcgtggccaagttcagcgccgcgtttgacagagcgtatgagagtcaggcgcgctgcgaggtccgcgatcccgcgctccgcgacgcgttgcgaagggccgtgtccgacaaggtcgtgactgcttacggcgtgtacctgaagacgcaccccaagctcgagaaaaaactcaggtacaccgccggggagctgggcgagcggctttcggaattgttcgaaggagaagctgcagagcacaacaaatgaaggccgatttcaacttttttttttcaaacttttaaatttttcgtcgcatcgaactttcctacacacacgaacttccaatttttcagttacattgttccaatttcttcaaatttccaattttagtgtggaactaaacacagccaaacaacagactatagttgtttaccatggattcttttgtaataacacatgtaattttagaaaataaagaagagtaaggaaattcatttgt

SEQ ID NO: 17329 - DNA, 919 bp, Oryza sativa
  ref <308>: DATABASE ACCESSION NUMBER: AK067780
  ref <309>: DATABASE ENTRY DATE: 2001-12-06
gacttttccctccttcacacttcaccagcttcactcgccctctccctgttctcctcactctcctccatggctctgccctccggctcattcgcggcatgtagcatccaaccaagggtgcgggcggcgttgcgcgcgccgacgctgccgtcgcagaacgccgccgttgcaaggatggccggccaccgcgccggcgcgacgaagggcggcgtgtccgcggtgtgcgagccgctggggcccgacaggccgctctggttccccggcagctcccctcctccgtggctcgacggcagcctcccgggagacttcggtttcgatcctcttggattagggtcggatccggagctgctgcggtggttcgcgcaggcggagctgatgcacagccggtgggcgatgctggcggtggcggggatcctggtcccggaggtgctggagaaatgggggttcatggaggactactcatggatcgacgccggcgcgcgcgactacttcgcggacccgtggacgctgttcgtgtcgcagatggcactgatggggtgggcggaggggcggcggtgggcggactacctcaaccccgggtgcgtcgccgtcgagccgcggctgcccaaccggaggaaccccgtgccggacgtcggctaccccggcgggctgtggttcgactggggcaactggggccggggatcgccggagcccgtcatggtgctgcgcaccaaggagatcaagaacgggaggctcgccatgctcgccttcgtggggttctggttccaggccgtctacaccggcgagggccccattgataacctcctgcatcacctcgccgaccccggccactgcaacgtcttctcggcattcacgtcccattgacgggattagagtttgggacgttgcagtctacagatgaaaatgctaaaagcgatgttgc

SEQ ID NO: 17330 - DNA, 1436 bp, Oryza sativa
  ref <308>: DATABASE ACCESSION NUMBER: AK067781
  ref <309>: DATABASE ENTRY DATE: 2001-12-06
gcacactagcagcgaagcccaagcagccgacggaatcccgaatccccacccacccgcctcctcctcctctcgtccgcccctcctccgatggcggcgtgggctgacgccgcgctgctccgcgcctcctcctcccccgcctccgccaccgccgccgcgtcctcctcctcctcgtcctgctgcctcgccaggccgcgcgcatccctggagtccaggctacaccgccgcaagagctttctttataccagtagccccaaatctggtttcctaattaatagttgtcgagcaaggagcttgaaggttaaagcaaaaatggattctggtgatggccttacaagacttgctccacttatgtttgaaactccaagcggtcaacttctggtccagatactccaatcacaccctcacctacttcctgcaacagttgaccagcaacttgaaaaccttcaatcagagaaagatgctcaagagaaagaagcctcgaaagttccccaggacctcctttacaagagaatagcagaagtcaaagagaaggaaaggcagaacaccttggaagagatcatctactgttggattatttataagttcatggagaatgacatatcaatgacacctgcattagcaccattaggtggccctgtacgtgacatctcctcattgcctaaccaagaggataggttgcaaagcatacattccccggacgctcttgagatgatacaaaatcatctcaaccttataatgggtgaaaaggtagcagccccactagatacagttgttgaaatcagcaacttaaatctgggaaagctttatgcagcatccatcatgtatggctacttcctaaagagggtagatgagcgattccaactcgagaagaacatgaagactctcccgccaaatcctaagcaacagatagtacttgaaaacctgaagcctaatccattctgggatatggaatcattggtgcaaattacacctgatggggaggagatcgatttggatgatgaagaatcaaatccaaacaagctgaggtcctatgtttcacgcttggatgctgatacgttgcaaaggtatgctactatcagatcaaaagaggccgtctcactgatagagaagcaaacacaggcgttgtttggacggccagatattaaagtcttagatgatggctctgtcaatgcaaaggatggtcaaatgataacaataactttcatagaactcacccatcttgttttggaggcagctgcttttggatcctttttgtgggaagctgagagtcatgtagaatccaaataccattttgttaacagttaatcgtgtattcgttaatctggaaatgatttgtgtacactggataggataggatccagctctgatatgctttcagtatgagcgatgagcgaagccgcaacagccatggagcataaatcaaatcatccttgtcc

SEQ ID NO: 17331 - DNA, 1010 bp, Oryza sativa
  ref <308>: DATABASE ACCESSION NUMBER: AK067782
  ref <309>: DATABASE ENTRY DATE: 2001-12-06
acaggatggagagagtagctttcttcaattaattaaacaagtcgatcacacacgcatcactagctagctagctaactagtaaggaggtacacgtaggtagctagataattaagcaggcatggcagcaatggcggcggcggcgacgacgacgacgaagaagctgcaggtggcttcatcatcaccaaacacacacaaatcatattggagcacgaagcagtacatcctcgtcgctgtcgttggaaccctcgcggcgaccgtcattgtgatcggcatctccgcgctgctggagcccggggagatcgacttctccgtcaccgaggcctcgcgcatgatcctgcctctggatggaggtgtggagctgaacctcacagtcgccgccgacagaccccgagtgtcgcgcgccgcgtggagtaccgcgggttcgacgtgaacctgcattacacgccgttcgacggcgagcccacgctgctcaacgaagacgacgcctcgtcggtgcggacgccgttcgtgcagccgccgcggaacacgacggccactcctggtgcgggtgttcgtcagcggcgactactgggtccaaaacatgatgagaggcaacgacatcccgatcaccgcgcaggtgcgcgccaccgtccgattcctcatcgggaaggcctgcaccaggtcctaccacatcgccgtctccagctacctcggcctcgacttgttcaaacgccctaccgtatcattcaatcataataatacagccgattgcgtcgcagctgggccggaaacagtctagcgattgctattacctgctgctctgctgcctgcaattctactagtgtctctttaattatttatctgctgctctctctgtctattaattaattatgcatgtaaaatcctccatcaaaacaaatgtaaggtatattttattttctgatttttctaaatgagatggatatatttgtagtctctctatgtactaaactaaattattgatcagagtaaaatcaaagcgtgttttgatc

SEQ ID NO: 17332 - DNA, 1710 bp, Oryza sativa
  ref <308>: DATABASE ACCESSION NUMBER: AK067783
  ref <309>: DATABASE ENTRY DATE: 2001-12-06
gctcctcgttccctcacctcagcgccgccgccgccgcaagccccgccgccgccgtccgtcctcccctcgacgtcgcctttcgctctccccccgtggtcgccgtgcgccatcccccgccgccgccgtgcgtcatctggcgccggtcccccttcccccttcttcgccctcccctcgcggcggtggcgtaaccggcgccggtttccccctcccctcgtggcggcgtctgagtcggctccggtgctcccctccctcttccatcccctttcgacggcgtcggggatgacggcaacgcggtggtggtggcggtgtcaggtgcgggtagaaaggagctggtgacgggcggggacaaggcgtcccgatctgcactgactcgatctgcgcgagccaaccccgcgccggattgaatagggtatgaggggagaggacggcggcatgggaggatgaagaggacaacgccgatggagaaaggggtgaggttgcccggcgggggatgctggccttcaccgacgcgtggctccccccgccgcggccgtcgtcgaccgtcctccacccgtcgtcgccaccccccccccttctcccctatctcgggcctcttcccgacctcatgcctgcacgagcgccggccgcgtcccgtgctcctctcctggcggcggcgtcggagccggcgcccggtgccgtcctcccttctggatcgatggatttggaggtagtaccggcggtggcggtgttgggaggaatctatatgagtatttcactttcattcctcctcctctcactctcactaccgatcgggagcgcggagtggtgatggtggcgatgtcggagcgggggtgctggtcgcgtccatggctcacctcatcagggcacgcgccatccgcgccggcaccatcatccgcgtcctcgactatctcttcatcgactccgacatcaacacaagttcagggtcattatcgtccagcaacttgaattgctgcaaactgagtgtgcactgatcggtactagcaatactcatgcgagcccagtaaactttatctcacatggaaccatgcatttcctttccattgtgagctgtccccggcatgttgctactgggtacctgttctgaccgacgtggtggagtggtgatgttgcagaacgcgtacaacatgctccacagcgacatggtggcggccgtgcgtattgcgcacgcatgctgtatgttcctcgacgagctcagcaccacatacctctttcctgcccaccacaacgtcaacgtgagcacattcagatctcccaactttataaaagaaattgcatcttaattcaaagatagtttcttgcacctcttcgatgcttcatatctggagatttgggtagcggaaattgactacaacgacctatctctgattttggagtcgatactaaataatcaagagaatgggcttgttttgttttttttttttttctagagtgggatatggaaacacctagcccaccgtctaagatgagatgttgtctaggataatagttgtaattggtagatgggatattgcagggctacgagagggtaaatgatccctctgtgtaataggggaggggagtttatttctagggtgaactaaaccatccaaacaagcaagtgcaattctgaacagaaagtaaggtaattgactgcaacatctatcaccgaatagatggtgaaatgaagatcttaggcttttttgccactcg

SEQ ID NO: 17333 - DNA, 2599 bp, Oryza sativa
  ref <308>: DATABASE ACCESSION NUMBER: AK067784
  ref <309>: DATABASE ENTRY DATE: 2001-12-06
ggcgagtcctcctcctcttctcgtcgccgtgctactctcgctttctctctctctctctctcacttgttccccaaggcgagaagcagccgccgccggcgagcgtcgcgggggaggggagggaagggagggaggagcggtggatccgggcttgattggattgggtcggattcgattttggatcaaccccggagggcgggagatgcgttgagctttggttaatctatccggcgagagataatgggcgagcttgctgatctcgttgtcgtgccgtcgcagccgccgctcgccggcggccggcgggacaggctggcggcgctgctggagctcgcggcggcggatgatgttgatgggctcaggggggcgctcgcggagggaggcgaggaggcggcggagttggctgatggggtcgggctgtggtatggtcggagcaaggcgtacgaggcgcgcacgccgctgatggtggcggcgacgtacggcagcgccggggtggtctcgctgctggtgggcctcggcggttgcgtcgacgtcaaccgtcgccctggagccgacggcgccaccgcgctccactgcgccgcctccggtggctcgcgcaacgccgtcgctgttgtcaagctgcttttggccgctggcgccgatccggccacccccgattccgccggccgcttccccgccgacgtcatcctagctcctccggcttcgccagatgcccttggcgatctcgaggtgctcctcggccgccgccgagcactcgccgtggcgacctcggtggcttcaggttcgtcatcccctccgctctcgtcctcaccagatgagggcaacaggtcgccctcgtcgcgttcgtcgtcgctgtctcccatcactgtggatcgtgggaagaaggagtatccggtggatccaactctgccggacatcaagagcagcgtgtatgcttcggatgagttccgcatgtttgcgttcaaggtccggccctgctcccgtgcctactcacacgactggactgagtgcccgtttgtgcaccccggcgagaacgcccgccgccgtgatccccgcaagcacccatacactgctgtgccttgccccaactttcgccggcctggtggctgccctagcggcgatagctgtgagttctcgcatggcgtgtttgagagctggctacacccatcacagtatcgcacaaggctctgcaaggagggagcagcttgcgcccgtcgcatttgcttctttgcccatgatgaggatgagctccgccatgtgcctcacaacagtggtgccggcctgctgtctccccgcgcttcttcatccattgatatgactgctgcagctgcgctcgggcttcttccaggttctcctaccagacactttgcaccgccgcctgtgtcaccatctgctgggagcaatggaggagctgctgctgcgcattggctccaaggcagtaggctgcgttcttctttcaatgcaagggatgctgctgttgatgaccttggtatgctcctcgaatgggaatcacaataccttggggcactctgcctgccacccagcagccgcccccaaccacgcctttcagctggtctgagtatcaggccaacaattgctccatccaatcttgaagacatgtatgcttcagacatggcaatgtctccgaggttccctaatgaccaaggtcactcagtctactcaccagcccacaaatcagccctcctcaacaagcttcatcaacagaagggcctcttatcacctgttaacaccaacagaatgtactccccaagggctcttgatccgtcatctttggcacattctccatttggtggcatgtctccccggtccccccgtaccatggaacctacatcacccctaagtgctcgtgtaggagcccctgccacacagcggccttctgttggttcaccacggaattccagtgcttggggcaccgtggggtccccgatgggtaaggttgactggggtgtcgatagcgaggagctagtccgcttgagacgccctgcacaaccagggtttggagaagatgagacagatgtatcatgggtgcagtcactggtaagcaatgctgagcttaatggcaagaggggcgaagtacaaggcatgcctggtacttctgcattgatgaacaggcctgacctgaacaatcagggtgacttgttggaccagacggtgatcggtgcttggcttgagcagatgcacctggatcagaagtgatttccaagggaagccatgaagtcccaaagtggatgaagcctttattttgccaaggttatttaccaaagaatagttgttggtcctagtaaataataatttattctttttaattcttgaaatttttggtgggcaaagtcagagatggtggtcaagttcaacaaaacatttggtcacagattggtagctgaaatcagttccagagattggtaaacaacctcattacttggggtcctaactagtattcttttgattagctcagatgagtctttattttagtgggttaaaattcatatgttccccatggttattatgtccatgatctcttcctaacaaaagagagattataattgtccatttttcatttatcaatgaatgattttgttaaagc

SEQ ID NO: 17334 - DNA, 1391 bp, Oryza sativa
  ref <308>: DATABASE ACCESSION NUMBER: AK099017
  ref <309>: DATABASE ENTRY DATE: 2002-08-28
gctaccctcaccctcgcgcactcccattcccatcctccacatcccgcgccatcgacctcctctccccgggaccgcgtcgctcgcgcgttgcctccacctccagtagcaagtatcaatggcggactccggcaagaagcgggacgggtcggccaacggcgccgagaagaaggcgtcgccgacgccgaagccgccgtcctcctccacatccggtttctccaagaatgtccccctcctcgtgtttgtgttattgctggggctgctgtaccggcagcttcagcctccggttccgaaaatctgtggaactccgggaggccctccggtgaccgggccaagattgcagctcaaggatgggaggcacctggcctaccacgagtacggcgtccctaaggatcaggccaagcacaagatcatcttcgtccatggcttcgactcctgcagatacgacgccctccaagtgtcacctgagctcgcagaagagctgggtgtctacatggtctcgttcgatcgtcctgggtatggagagagcgacccacaccccggtagaacggaggacagcattgcgttcgacatcgaagggctcgccgacgggctgcagctcggccccaagttctacctcatcggctactccatgggcggggaaatcatgtggagctgcctcaaaaacatccctcacaggctcgcgggggtgtcaatcctggggccggtggggaactactggtggtcgggttacccgtcgaacgtgtcgacggaggcgtggtacgtgcagctcccgcaggaccagtgggccgtccgcgtggcgcaccacgccccctggctcgcctactggtggaacacccagaagctcttcccggcctccagcgtcatctccttcaaccccgccatcctctcccgggaagacttgaccgtcatccccaagttcgcctaccgcacctacgccgggcaggtgaggcagcagggggagcacgagagcctgcaccgggacatgctggtggggttcgggaagtgggggtggagcccgctggagatggagaacccgttcccggcgggcgaggcggcggtgcacctgtggcacggcgcggaggacctcatcgtgcccgtgcagctgtcgcggcacatcgcgcagcggctgccgtgggtgcggtaccacgagctgcccacggcgggccacctgttccccatcaccgaagggatgccggacctcatcgtcaggtcgatgctgctcaccgacgagtgagatcaccgaccgaccgaccgagacgcgcatctctctgttttttttggtttttggaattttgggtactgtcacgtaccgacgtacggtggtacgcgtagttgcttgctcctattatcctatcctatatagagaaatgacaataatattttgcggagtc

SEQ ID NO: 17335 - DNA, 3115 bp, Oryza sativa
  ref <308>: DATABASE ACCESSION NUMBER: AK099018
  ref <309>: DATABASE ENTRY DATE: 2002-08-28
gatgcttagctagacatgcttatgttgttactaaacatacgtagacaagtccaaactttatacttgagagaatcgagtatctctgtagcaagagttcagatgggccacctcaatatcatgttagctttcctttcatttgtgttattagggttagctgaagtcgagggaactgtagcactgagtcaaatcctctcaaatagccatctgatcaccccgtaccgagaggttacggcaagaaagtttgagagaaggtccttactgcaggatcatagtagtgatgataggagatcatctaatgcaagccttccctctgctgccacacttgctaactgtccaaagcgatgcggcaacttgagcttcgactatcccttcggcataggagatggttgtttccgccatcccgatttcagtctcacatgcaacgccactactcagcctcccaaactcctcttgcatattaacgaaagcgtggaggttatagataatattgaggtcgtcggtaaggatatagctgagtttttctacttcaacttctttatggtcgcatttaaccatctcatccccataaaagctggtgtcgatgtctataaccttacatggaaagccccagggatttcttttactatttcagagatgatgataattactgtcgtcagctgcgacttggatgtattcttgataggccaagacaacactcctaaactgctttgcatggttgcttgtcccaacaaagagattgcagacatggtgtacatgcaagactgtgaaggccctggctgttgtactgtattatctgaaacaccagttcaggctgtacaattgcagtttgttcgccatgagacaagtaatgctggaaaaatctccaatctcagcatgctatgggatagaatcaacataactattggggcgccacttgtttggagtattgttgaccaaacaagatgctcaagaaacatggaagataacttcgcttgtgtcagcaaccacagtgggtgcataacttctgtgtttagagatattggctatgcctgccaatgcaattctggctacaagggaaatccttttatccttgatggttgcaagcatgacagcggttacaaccctagaccagaaaagcataattgcgctcgacaatgtgggacaatcacagtcccgtttccgtttggccttgaagagggttgctccgcaaggaaacgttttcagctcaactgctccgacaagacaaattcggtcctcaagttcaatgactattttcaggtgacgtatataaatgtcagtgaaggacttctgggcatcaaacacaactcatcgctggaggagcaactattcaatataatgatggaaatgatgacttctgataatgagccagacctatttgttgaccctcttgaatcagtctctgtgcaatgggccgttgccaacctgacatgccaagaggcgcaacacaacacttctggatatgcatgtgtaagtaccagcagctcctgcttgaatgtccttagctccatggatggttatgttggctacagatgcagttgcttgcctggttatcgtggaaatccatacatcctagatggctgcgaagatatcgacgagtgccgagagacaccaggaatttgtaaaggagtttgcaagaataccgttggaaactacagctgcaccaagtgccctgatcataccgagtacgatattttaagaatgcagtgtactccaataagaaagaaaagcttctacttaggtattataattggccttagcagtggctttggaatgctacttcttggattaagtggaatagttctcattcgaagatggaaaagacatgcacagaaaagactgcagacgaagtatttccgaaagaaccagggccttctattggaacaattgatatcatcggatgaaaatgctagtgagaagacaaaaattttctccttagaagagcttaaaaaggcgacaaataactttgataccacacgtatccttggccgtggagggcatggaacagtatacaaaggtatcttatctaaccaacatgtggtggctattaaaaaggccaaagttataagggaatgcgagattaatgatttcatcaacgaggtttcgattctttctcagataaatcaccgaaatattgttaaactctttggatgctgtcttgaaactgaggtccccttattagtctatgattttattcccaatggttcattgttcggactacttcatccagattccagtagcacaatctatttatcatggggtgactgcctaaggattgcagcagaagcagctggagctctatattatctccactctgcagcatcaatttccatcttccaccgtgatgtgaagtcatctaatatactcttggatgcaaactatactgctaaagtttcagattttggtgcttcaagatcagttcccatcgatcaaacccatatcatcacaaatgtacagggtacatttggttacttggatccagaatattaccaaactaggcagctaaatgagaagagtgatgtctatagttttggtgtggtactcctagaacttcttctgagaaagcaacccatttttacaataaactctgggatgaaacaaaatttgtgtagttacttcctttcagagattaaaaccaggccaattacagatatggtcgatgctcaagttctcgaagaagcaaatgaggaagatatcaaagaagttgcatcccttgctgagatgtgcttgaagctaaaaggtgaagaaaggcccacgatgaagaaagtagagatgacgttacagcttctgcgaacaaaaacgatgaactcatctcaagtagatccaaccattgaccaagagattcaaactgttctgactgaaggagccagtgacccagagatacaaccattagtaacaaatttggatgttgatagagctaatgcagcatctcaacgcttccaaatatcatgctatagcttggagcaagaattcttgtcatctgctagcttaccacggtagatgtgtttatcctatttctgatgtgtttagttaacttgcatatgtattgtgtacttgcagtcatgtatgttgaaatgagaaattatactatatgccatcaacaaggagctaattctgc

SEQ ID NO: 17336 - DNA, 2121 bp, Oryza sativa
  ref <308>: DATABASE ACCESSION NUMBER: AK067785
  ref <309>: DATABASE ENTRY DATE: 2001-12-06
gcggttaagcccactcgctgtggactcgtcgtcttcctcccgccgccgccgcctagggtttcgcgctgagagccatggacgcggcggcgccgccgccgcgggggcaggaggggcaaggagatcgcagcggcggcgatgagggcgggagatacggggtgctcctctactacaagtacgccgaggtgcccgacgccgcggcgctcgccgccttctacgagtcccactgccgcgctctcgccctcgtcggccgcgtccgcgtcggccccgacggcgtcaacgccacactcggggggaggatggcggcgctggagaagcacgtcgccgagatgagctccaacgccttgttcgacggcaccgacttcaagctggcctcctgcgacgaccccgtcgacgagcgggtcgccagggagtgcggcttcacctcgctctccgttcggctcgtcaaggagctggtaacgctttgtgcaaacccgtcgttggcaaccccgcagattacatgcgccgggaggcatttgtcggctgcggagttccattcggtactccaaagtgttgcaggagctacttcggactctgaagcaaccgtggagaagagtgaagtggttgtcttggatgcgcgaaatgtctacgagacacggattggcaagttccgtgtaccgaacgtggagacgctggatccagaaatcaggcagtacagtgacctgccgttgtggatagatgagcatgctgagaagctccgcggcaaatcaattatgatgtactgcactggaggtatacggtgtgagatggcatcggcatatatccgctcgaaaggtgaaggctttgagaacgtatttcagctatatggtggcattcagagatatctggagcgattcccagatggtggctattttgaagggaagaattttgtatttgaccataggatttcagtgggaagcctaaaagagaacatacttggaacttgtttgctatgtggttcttctttcgatgactactcgccccgttgtcgttgcagccattgtagaatgctggtgctagtgtgctccacatgtcaggattccactaaggattatgtttgcgagttgtgccaaaagaacggaaagcaatgctgccaaacgtcaccaaggcaaggttgcaaaacagagtcagagctaatagattcttctgactttggaataccaatgattattaatcaaagtgcaacttcaaccattcccaggagtaatggtagtgagcagctgaagaagctaaagatcctctgcttgcatggtttccgtcagaatgcatcaaattttaagggaagaacatcagcacttgccaagaagctaaagcacattgccgatcttgtctttatagatgctccacatgagctttcgtttgtgtacaaaccaaatccagatcactgctctggcagatcttcactgccatctggcacaccaaagagaaaatacgcatggctagttgctccaaactcaattttttacgctgagcatgactggaagattgcagatgcaccattcgaccctcttcagtatcagcaacaaactgatggattcgaggaatcatacgcataccttgaacatgctatctctcagatggggaacattgacggcattcttggtttctcccagggcgcagcaatggcagccttgttctgcagacagcagcagaagacttgtggctccctcaaattcaggtttgggatattctgctctggttatccagcaccgatcataagtgattttgacggtgagccaattaagctcccctcgcttcattgctttggcaactctgaagatcatgacaggcagatagcaaacagggcaagcaccgaactcgcgaatcgatttgataagagttgtcgctctgttattgagcatgatatgggccatataattcctactcggccgccctttattgataaaataaaagagtttctgtccaattttatttgaaatgtttggaaataaggcaatatgctttgttgtaagttaacttatgacccctcttttgatgcatatcatctgttgagttgttctatgctcatgctgactgtatggtttgcagccaccttccactactttgaacccctattgatttatgatatatgcaatttatgcatgc

SEQ ID NO: 17337 - DNA, 1613 bp, Oryza sativa
  ref <308>: DATABASE ACCESSION NUMBER: AK067786
  ref <309>: DATABASE ENTRY DATE: 2001-12-06
ggttaattattcgcttccctcgcaagggaggaggagacgcgccgcccctcgaatccaaacccccaaaattcccagagagatgaacgcggcggcgcggaaggccgccgccgcggcgcggctgccggcggcggtgctggtggtggtagcggtgggggcgttcctgatctcctacaacctcctggccatcgtgctccggggtggcggcggcgcggccaccggggcggggagggagagggacccggtggtggcgatgccggggtggatgcgggcggctgggtcggcgggcggggggcggcggcggccgttccacgtggcgctcacggcgaccgacgccgcgtacagccggtggcagtgccgggtgatgtactactggtacaagcggatgcaggcgcggccggagggcgccgacatgggaggcttcacccgcgtgctccactccgggaagcccgacgccctcatgggcgagatccccaccttcgtcgtcgaccccctccccgccggcaaggaccatggctatgtcgtactaaataggccctgggcatttgtacagtggctggagaaagcaaagattgaagaagaatacatattgatggcagaaccagatcatatatttgtgagacctttaccaaatttagcccgcgatgatccagcagcattccctttcttttacattacaccatcagaacatgaaagtgttctcaggaaatattatcctaaagaaagaggccctgtcacaaatatcgaccctattgggaattcccctgtaatcattaagaagatacaacttgagaagattgcccctacatggatgaatgtatcgattcaaatgaaagaagatcaggagacagataaagcttttggatgggtcttggaaatgtatgcatatgctgttgctagtgcactccatggggttcaacatatccttcgaaaagatttcatgattcagccaccttttgataccaaacttgggaatacatttattatccacttcacttacggatgtgactatacactcaagggtgtactaacctatggaaaaattggtgaatggagatttgacaagagagcataccaagacaggccaccgccacgaaatcttacattgccccctccaggagtaccagaaagtgtggttacacttgtaaagatggtaaacgaggctaccgcaaaccttccagggtgggatgatggaagatagactatgacgacaaatgttgctgattagtgattactcattctgatagctgccccattcctctctattcaggggcaatacaccataaatgatagaaatcgatagttttcccagtatacttacagaaagaaaacaagatagcagcccaaaagtttttttgatgaaattatatcgaaatgctactagtataaacacctaaagtatagttatgccagtaaaatggtgattgcacctctgacatctctatagagttactgagcatatgttgatctgttgtccaattgtttgttcgaactataccgctgtgtaaatagtgaactgtagcttattggcatgcaaacaatgtttgcgaatgccaaagttaaatatcgcctatataatgtcaataaaatacaatggtttagtcgttcgttttgcg

SEQ ID NO: 17338 - DNA, 2348 bp, Oryza sativa
  ref <308>: DATABASE ACCESSION NUMBER: AK067787
  ref <309>: DATABASE ENTRY DATE: 2001-12-06
gacactttcctctccctcagccagccgcgccaccgactccccaacgccgctccccgtccatcgccactagccgcatctcccatcgccccgcgccgccgcctcaccatcgtcgccgctcctcccgcatcccatatcatctcccgcgtcgctcccttccctctccaacgccaccgccggactaccctccacgacgcccagccgcacgccacctgttcgccgtcgtgtgccgcactccgacctcccctcctctccccgcttgccggtttcctccgcgcctcccccgatctcctccgccagaactgctcccggactcggcgaggtcctcgtcgcctgccttggctgcctcctccacgctgcccccgatctacaccgcaaccatcggtccgccatggcgccaggtcccagctcggatccccatcgcgcccgtccgctccagccgtcaccaactatatctggcagcggtaaaggagcagtggacgcagcatcttcggtcccctctacctccgttgcccgcgtgccctatcatctcgcggcgaaaaaggagtagtccacgcggtgtcttctgacggtaatcgacgacctcgaggttggttcctgaacaggttcatctcgcacctctcctttttcttgaaattactgattttgcctaaagtactcaagtgtgatgagtataacagaaattttgggtatatgtatgctaggattcatgtggtgcaatagcacacatttgatgcttaataatatggatttaacacactctccattcagttatgttggcctttttctcccgagtgcaacggaggttataaaatactgtcgcacaaacctattgtgtgttcgcgtaaatatccttatctcttgctctatcgtcttaaggatcgaactcctggttctgccttccaaggaggaaagaagcaaattttagacatttcacaattggattgtttacatgtgacgtattatttttattcaaattatgagtttctatgtgaaattactcgtctgaaaattgttgtggattttacatctttctatccctcccgaatgctaatattagctgatttgtgtcctgactcatttcaatggcttgcagatatactaaaaggaaaataaaggtggtgtaactgtaactagcaccttcagggccattaggtcggatacaaaaaattggtggagactggagacgttctgcaactaaatcaaactctactttttttttctgcatatcagctaacaacatttctaatttctgatggagtagatttgttgtctagtcaaattgaaaggggaaaaacttttatatcaaatcactgccggcatatcaaatttactgatatacatctctgccatcttatcagattttgacggctattatttatcttcatgcttgaattattatttatcttcatgcttgaattcttacagtcattttgaaattagattgggcgtggaacttcctgctactactgctgttttaattatctttactggcagtacagttattatcatggaataatctgttttaataatcttattttagatcagtatgcaaatccatgtaactttactcgatttcacccattaacataccaatcatttcccagacctgcagattgacaacttattaattactgttagtagctttgaaaaataacccttagataaaaattaaacatgtagattgaagtatttttatttttatttaacgatgcactgaactttttactgcataataggctgcgttggcgtggagatgcacatgcaagttgatagctgatagcaatgagtaaatcgaatagctgctcagttcctcctctgcattctaacatgctgagcaaccggcgttgaggacctccttggcacccgagaagaggttgttggtctggagcggtactgaaggcaggcaatatttcctaaacacttcaaaatggatagaggaattcagaactgaggggcagtgatttctataattgtgctgattaggaacaaaactgatcgtgttgacaagagattggacggaggcatataacctcttcaaagaaccaaggtatcaaggatcttcctgtcaatgtaaaataaaaaaataaacaatctctgttggtaggtaatactacaatgttgagataatactccatctcagtggccgatgacaatgcagaggaatagtttctagagccaaagggtgaacatcaaggtttaatacttcaaggtttaagttgcaacttacgcactactgcaccaacctacttgtgccgtttagacatcattttttatagtgctgtagatgttagattattgtcacagagccaattaaaatttttaaaatttgtttacctcctttgtgctcc

SEQ ID NO: 17339 - DNA, 1201 bp, Oryza sativa
  ref <308>: DATABASE ACCESSION NUMBER: AK067788
  ref <309>: DATABASE ENTRY DATE: 2001-12-06
gactgcaccagcttaagcttattagctcctgagagtgaagcccctatagctgatcgaagctatgaagaagatgtggcgcgccaacgcgagagtggtggaaaggagaggtggtcgcgaggccgaggagagagggggagtaattagcgtggtgcttgcccatggctatggcgcgagccaggcggtgtgggacaagctcgtgccctccctctccaagggccacaacctcctcctcttcgactgggacttcaccggcgcaggcgccgggaaggacgacgacgagtacacttacggcaggttcgccgacgagctcatcgcggtgatggaggagcggggcgtgggcgcgtcgggcgcggtggtggtggcgcactccatgtccgccatggccgcctgcatcgccgcccaacggagacccgacctcttcgcccacatcttcctcgtctgcgcctccccgaggtacataaacttggaggaggaagggtatgtaggaggctttgaggaggcggcgatccacggcatgctggcagccatggagtcggacttcgacggctgggtcaggagcttcctccccaacgccgccggctacgcgtccgccgtggagcacctcctcaagagcttcctcgccatggacccgaccgtcgcgctcaagctggccaagatgatcttcctcggcgaccagcgggaggtcctcgacggcgtgaagacgccgtgcaccatcgtccaggtgaaggccgacttcgcggcgccgcccagcgtggcggagtacatgcacctcaggatgaagggcgccgccacggccgtcgagatcatcggctccgtcgggcacttcccccagctcgtcgcgccgcagcagctgctggacatactcgccggcgtcctgcgcctccgggaggcggcggcggaggcggagcacgacgacgccggcaccgtggagattgccggtggcatcgatgttgccatataggttgtgcatcatgcatgcatgcttgtaaaaagtctgcacatatatgcgtcagagctagctgcatgtgtgctcccttgtatgtatgtttgtttgttttgttttcagagcatgcattagttgtactattatgttttcctgtgtaaacatatcatagaggttatgttacttgtacacctgcatgcatggtttgggtatgctgatggatgtaagtaccattttcaatgggacatataccttatt

SEQ ID NO: 17340 - DNA, 3294 bp, Oryza sativa
  ref <308>: DATABASE ACCESSION NUMBER: AK067789
  ref <309>: DATABASE ENTRY DATE: 2001-12-06
gactacgcctccacctccacacctcacctcctccacctccccgcgtctccgcctcctccatcctctctctctcctcctcgcggggggttgggctgctcctcgtcggcgtcgcggaacctaatcctgcctcgatctgcggcgagccggagccggcggcgcggaggcgagtgggtgggtggtggtccagtgcggtggtgcggtgggggccagcctggtggtccccgtctcggcggcggtgcggcgcggcggaaggaggaggggtggtggattcgtagggggggtggtgaggtggaggaggatgggtgcggcgggggcgtcgcccgaggggcggtgaatggaagcggcgaggggggctggggctgcgggcggccgtacatggaggacagggcgtcgcccggcggaggcgtgtgcgggagggtgcttcggctcgcgagcgtccagattattttgattctgttcttgactcaaggagcctgctcgagttcccgtgacggcaaaacatcgcctcctcaaggcctggatgctggggagaaggacatttaccttagccattcttgcattcatgatgaaatacttcatcagcggcgacgagcctggcggaaggagtactctgtcatgcctcaagtctaccatgaacgcagagagaacatggaacggctaagaggaagacacttgctgggggtgtcatcttggcatgcttcacagaagaatgtcaaaaagccaatacggatttatctcaactatgacgctgttgggcattcacctgacagggactgtaaaactgttggtgacattgttaagctcggggaacctcctgttccatcaataccaggaacacctgtctgtgatcctcatggagacccaccattggtgggagattgctggtacaattgcaccgttgaggatatagccggggaggacaagaagcaaaggcttcgaaaggcactgggacagacagtagagtggttcagaaaagccttagctgttgaacctgtcaaagggaaccttcggctcagtgggtactctgcttgtggtcaggatggaggtgtacagctcccccatgcatatattgaagatggcgttgccaatgctgatttagtactcctggtaacaactagaccaacaacaggtaacacccttgcatgggctgtggcctgtgaacgtgaccaatggggccgtgcaattgcaggacatgttaatgtggccccccgtcatttgaccgctgaagcagaaacgttactttcagccaccttgatacatgaggtcatgcatgttctaggctttgatcctcatgccttcacacattttcgtgatgaaaggaaacggaggcgtagtcaggtaacttctcaaattttggatgaaaagcttggaagaatggtcacacgtgttgtccttccacgggttgtcatgcactctaggcatcattatggagcgttttcccaaaacttcactgggttggaactggaagatggtggaggcaggggtacatcaggttcacattgggagaaaaggctcttaatgaatgagatcatgactgggtcagtggatacaagatcagtggtgtcaaagatgactttagcattactggaggacagcgggtggtatcaagctaattatagcatggctgagcatttagattggggtcgcaatcagggaacagagttcgttatctctccctgcaatttatggaaaggggcataccgctgcaacacaactcagttatcaggatgcacatataatagggaggcagaaggttactgccctatagtaagctatagtggggacctgcccaaatgggctcaatatttccctcaagctaataaaggtggccagtcttcgttagcagattactgtacatattatgttgcttattcagatggttcgtgcactgatgtaaatagtgcacgagcacctgacagaatgttaggtgaagtgcggggaagcaactcaaggtgtatggcctcaactctagtgcgaactgggtttgttcgcggatctatgacacaaggaaatggctgttatcagcatcgctgcacaaataactccttagaggttgccgttgatgggatctggaagtcatgtccgcaaactggtggacctgttcagttcccagggttcaatggggagttgatttgcccggcatatcacgagttgtgtaacaccgtgccagttccagtaagtggccagtgtcccaagtcttgcagttttaatggtgattgcattgatggaacctgccattgcttccctggatttcatggccacgactgtagcagaagatcttgcccagccaagtgcacaggtcatggtatatgcaaagccaatgggatctgtgaatgtgaaagtggatggactgggattgactgctcaacagcggtttgtgatgagcaatgtagtttgcacggaggagtctgtgataatggtaaatgtgaattccgctgttcagattatgcaggctacacttgtcagaaaggttctgcaatattgcccagcttgtcaatgtgccatgatgtactggttagggatgctgacgggcagcattgtgcaccaagtgaactcagtattctacaacagcttgaagcagtggttcttgtgccaaattacaataggttgatgccaagtgggcggaccttccttaacttctttaacaatgccaactgtgcagcagctgcaaagcggttagcctgctggatctcgattcaaaggtgcgacgaagatggggataaccgacttcgggtatgctactctgcatgtgagttgtacaatacagcatgtggggcgggtcttgattgctcggaccagaccctgtttagcaagagggaagaagaggaaaagggtgttccgtgcacaggatatggcgagaagaagtctttctggctaatgactataacttccccgggcgtttcttccctctgatatctccatctgcggctcggagattgtgtaaagtataattggcgatgtcctatccatattcattttctcttttctttttggccaccactttccaattgtaggatacgggaagtagtggcccatttcacctgggcacctgaagatgggtgcctggtgtataagcagtgttggagcgggctctgtgtgtttaggaagttagtctgactggaaggagggtggagtgagaagctggaggcgggcggtagatttattttttaccttttttttttgtcgcgtcagagttagcggaggaatgtaaagtgtaatgtgtgttgtaatcccatgacccatctaacaaacagagcatctcaatgagagccccctatgttgtcttgtgtgttc

SEQ ID NO: 17341 - DNA, 2193 bp, Oryza sativa
  ref <308>: DATABASE ACCESSION NUMBER: AK067790
  ref <309>: DATABASE ENTRY DATE: 2001-12-06
gtagctttttctgccacacactcactacttacacacatctctgcgctccaatgcatcccctaaccaagtagtgcatccaactaaattgctcccagcaatcttcgccttgggatttccagaagatgggatcactcaagatgactggaaaagctccctgtgcagcactgccagagtcctcatgtgcctacctgcttcaagaactgaagatgatatgggatgaagttgggcaagaagaaaatgaaagagagagaatacttcaagagatagagcaggaatgccaggaagtttataggagaaaagtaaatagtgcaaatatgtctcggattcaactgcatcaagcgttggctgaatccgaggcagaatttaccaacctacttctttctcttggagaaagatcattcccaggccgacctgagaaaatgacaggtacgctaaaggagcagctgaattccatcacaccagccctgcaagaaatgcagatgagaaaagaagccagactgaagcagttcagagaggttcaaactgagatacaaagaattgcctctgaaatagcaggacgccctgagaatgaagccatcacagtgaatcaagaagatctgtcactaaagaaactcgaggagcaccaaagtgaactgcaaaggcttaaaagagaaaagagtgatcgcctgtgcaaagttgaagagtacaaggttctcattcacaactacgcaaagattatggggatggatccctcaaagatcctctctaatgtccacacaagcttgttagatggcgcaaatgatcaacaaacaaaaaacatcagtgatgacattcttaacaagctcaacaccatggtccagcaacttaaagaagagaagaaccagagaatggacaagctccatagccttgggaaagcattgacaaaattatggaatattctggatactaacatggaagagcgcaggccatatggtgaaattaagatatattcaatgacttcaggaagcagtatgctaggcccaggaagcctcacactcgagacaattcagaagatcgaatctgaagttcagcgactagaccatctaaaggcaagcaaaatgaaagagctcttcatgataaagcaaaccgagataaaggaaatttgcaagaagtcacacatggatatgccttaccagacagagatgaacaaaataatggatgtgataatgtcaggggatgtggaccatgatgatctactaaagacaatggatgaatatatatacaaagtaaaagaggaggcaacaagtcgtaaagaaataatggacaaggttgaaaaatggatggcttcatgtgatgaagagagatggctagaagaatacagcagggatgagagaaggtattcgataagcagaggagcacataagcatttgaagcgtgcagagcgtgctagaatcattgtgaacaaaatcccaggcctggtagaactcttaatggcaaagacagagatctgggaacaagagagggaaaaggtctttctactacgacgagcttcccctattggccatgctgaaagactacatgctaacactgaaggaaaaggaagaggaaaaatacaggcaatgggagaataaaaaggtacagactcaacttgcaaggaggcatgagaattcatttatattaagacccaacacaagctgcagtcgtccatcaagcagaggcttcaataccagccctggctcaagtactatttggagcagcagacttcctactatggttcaacaacctagtgcagataattcctcagctgaaaaagatgtgcatataagaaaagttaggaacagaagtatgcagcgcgcgctaggaaataacagaagcatctcaatctcttatgaagataaaacaccaagtctctccgcaataaaacaaggcgtttcaccaatttgatttttttccaagttcttatttggtccattagatgtctacggtaagttatgtctggtgtgtgaagatagcaccattgttcgaagcttaaaaatgaatagcagtagacactagacaatgtgtgcattgataccataaccatgtaattattgccttaatgccttgtcatacagtaatccttttatccttacacttttagctattttttaatggttcccttatctgtttttgtaccagctaattgcaagttcaacaacatcagaaagcacaaaagaataacttacatttcattct

SEQ ID NO: 17342 - DNA, 1348 bp, Oryza sativa
  ref <308>: DATABASE ACCESSION NUMBER: AK067791
  ref <309>: DATABASE ENTRY DATE: 2001-12-06
ggctggccgcggcgctgcggccgctcagggagcgcgtcgcgtccgcaggggccgcctcctcctccggatcgtggggcgatgagcatgcattcttcaagagggatgagaatgagataagtccgtactcatggaatatcacagggacatataaaggaagttggaactttgctggttccacaaatggttcttctaggtttcttgagtttacaaaattgaagggcgatgcggttttggaactattaagtacaccgacaaagataagcggggtgcactatgttcagggatctgttacattccatgatgttctagacaatgctcatgatcgtggagttgctcagataaggttagaaggcgtgtacatatggccttttcggcaacttcggatggttgcaaacagtggtgcagatggcgagccacttcaagaagaggattacttcttatcaaatccatatcatttgctgcggattttctcctctcaagtgttccaagaaacctctgaagagaagaaccggaggaagaattctcttacttacgacatggagaagcattgtagcgtcgaaatagctgctaaggtggtccgtgtgtcctctaacctaaatgagggagagcatgagaaataccgtttggagggattgatggagagtacagcagtggatgatgatggagagtgtttctcaccgatcttattaaatgcaacatcattaaatgttgaagtttattacaacaaagcagtcaattatacactgatggtcacttttatctccttcctccaagttttgttactgattagacaaatggaacatagcaacacccaatctggagctgccaaggtttcaattctaatgatagggcaacaagctatcatggatgcatatctttgtctactgcatctgactgctgggatattggttgagtctctctttaacgcattcgcaacggctgctttcttcaagtttgtcgtattttctatttgagatgcgatatctccttgccatatggaaagccagtagaccattgaacagtggagaaggctgggaagtaatgaggagagaattgtctgttctttacagccgcttttatggcattcttttgggagggatccttctcatgtatgagttgcacaattttctgcgcccacttcttttcctgatgtactccttttgggttcctcaaattgtcacaaatgtcatccgggatacaagaaaacccctgcaccctcagtatattttaggcatgacgatcactcgccttgctattccactgtatatatttggttgccctagcaatttcatgcgcattgagcctgacaagacatggtgcatagctgtgacaatattcatgggtatcc

SEQ ID NO: 17343 - DNA, 1302 bp, Oryza sativa
  ref <308>: DATABASE ACCESSION NUMBER: AK067792
  ref <309>: DATABASE ENTRY DATE: 2001-12-06
gtgtgataaggagtaggagagaaggccatggcgtcgaaggaggaggtggccgtggagacggtggagggcggagcggcggcggcgaaggcgccgtactgggacccgccgccggcgccgctgctggacacgagcgagctgggtaagtggtcgctgtaccgtgccctcatcgcggagttcatggcgacgctcatcttcctctacgtgagcatcgcaaccgtgatcgggtacaagaaccagagggccaccgtcgacgcgtgcaccggcgtcggctacctcggcgtggcgtggtcgttcggtgccaccatattcgtcctcgtctactgcaccggcggcgtctccggcgggcacatcaacccggcggtgacgctgggcctcttcttcgggcggaagctgtcgctcgtccgcaccgtgctgtacgtcgtggcgcagtgcctcggcgccatcgccggcgccggcatcgtcaaggggatcatgaagcgcccctacgacgcgctcggcggcggcgccaacaccgtcagcgacggctactccgccgccggcgccctcggcgccgagatcgtcggcacgttcatcctcgtctacaccgtcttctccgccaccgaccccaagcgcaccgcccgcgactccttcatccccgtactcgtgccgctgccgatcgggttcgcggtgttcgtcgtgcacctggcgacgattccgatcaccggcacgggcatcaacccggcgaggagcctcggcgccgccgtgctgtacaaccagcacgcagcttggaaagaccactggatcttctgggtggggccggtgatcggggcgttcttggcggcggcgtaccacaagctggtgctgcgcggcgaggccgccaaggcgctcagctcgttcaggagcaccagcgtgacggcgtgaggaagacgacgatgttcatttgatacgagagatcgatcagctgcttgattaattgttcttgatttcgttgttcaatttacaatctacgactatggacgatcatgcatatgatatgatcgatgcatgcgtctgttgtcagttttatttgggactttcagtgtgagagtgtgaatggttgtaaaataagtggagtgcctgtatgtatctgtatgcatgcacggcacggtacgcgtgtttatggatgatgctttgttacgtagcaggcttaattatgtcaatatgtgtgcgtatgttgtcgtggtaattattatactgggtatatatatatattgtgcagcttaattatctagccatgtacaaattttcgtatgcggaataatataatgcatgcgatcgccatcc

SEQ ID NO: 17344 - DNA, 2638 bp, Oryza sativa
  ref <308>: DATABASE ACCESSION NUMBER: AK067793
  ref <309>: DATABASE ENTRY DATE: 2001-12-06
ggtttgccccacgaccgccgcgagtagagcaagtaagctcgcaccgcaccgaaaccgcagtgcgttctccttttctagtgttcgcccgccgccatccacacgccgtgccgcagatcctatctcccgtccgcggcggccgaagcaatcggacgaattcgtccccccctgcttcgcctcctcttcgctgtgtagtttgtgagcgatgcgagcggatcgtctgatggcggaggggggcaagcggatcgacctgggggcgccgctccggtcggtgcgccacgccgacgcgctgccctaccacaaggccgacctcaactccggccccgtccgccaccccggcgcggtgcccttcgtctgggagcagcggcccgggcagccaaagagcgtccgcacccgccgcgcgccgccgtcgcccacgaccgcgtcccatcctcagccgctggagcacggcgtggaggatgagatcgacgggagcccataccacgacgccctcggggagcactatgtggggatactccatggcgtggacgcgtcccccgcctgttcccggactggcgctccggcgccggcgccggcgcgtgatgagaagagggcgcaggtggcggaggcggcggtgttacaggcgaagaaggaagtgacggagaagcaggtggtgtccgtggcggcggtactgcggaagggagatgacgacgacgacgatgaggagaggttctcggacgcgctcgacacgctctccaggacagagtccttcaccgtgaactgcagcgtcagcggcctcagcggcatgccagagcccacctcccgtgccgccgccggcgccgaggcaggcgtacgcggcatcatgatggatagattcctcccggctgcgcaggcggtggccataggctccccgcagtacaccttccggaaggccggggcagccagcgccacgagcaattctggccgcgagcttgcgcgtgcagctgggtctaacgcgagtggaagcagtggcgatgatcccgggaggaggacgcccgtccagctcccctaccagcatttgcctcccaattatttgtcttgcagctatcccagacgtgaggagcaggaagatgaagacgacgacgatgactatgatgtgcatagcacccggggttttgcctccaagggatgtggcttgctccctagtctctgtgtgaagggttcattgttacttctgaatccaatgcctgcgatgaagcgtggcaagccgcgggggaatgggagagtccgggagttcgcatccaaaggcaggggacgaggggcgccgagtccgcttgcccggagctcacaaaacaagcatcttgggtgtgcttccaacgggtcctgggaggatgtatacaagcacaaattagagcagaagtatgttcgtccaggagaggatgggaggggcaagctgacaagtgaatcaaaccagctgacgttctggagtgactcgcaggcgggcaatgggtcttcaccattccatcattccgcaggtggtggtatgtctccctattacagggatgttgtcctgtcatcatcgagtaaggcagatgagtcttttggaacaggggtaaaagaagacaaaatgagtagtagtaatggttccagctcacttggaagagaccatgatcgtggttcattgcttggatcagaccgcagtagtttaaaggggtcaagctccattagctcagggctggatagaccagtgcatgtagaatcaatggatcaccgtggagatattgactcagaaactagccactcggttctgttactggattcaaggacatcactggatgctggtgggtgtggctctcagcttggagaacagattgtcgggaaaaaccctattgggaaaggtgaagataatgatccattgacagaaagggtctctgaagttacagaatgcacgttgttagcaccttctgaaaagttaagatcagtgaatttggatgatgggaaaacttctggtcatctggaagatagtagtgtttccaaaagggatatgcctttgcaatctctactcccattaccagtcccaagatcaccttcagaatcttggctttctcgcactttaccatccgtaacaagcaaaccaccagtgccatcttttcttggaattcaattgcagtcgaagaaacaaactccctgggcctcaattcagccaaaggagaataatgttaaacctcctaggccacgacagataagatttgcagatgtggtagaaaggcctaattcattggatgctgagatatgatgtcttccctcaagaccaatatctgttcataatgccttgaaggacagcacggccatgtatctgccagcgcccaaattttccctggatgcccccctcagtttgctgtcgcaatcttggctattagcagcttttttgtataccagtacataggtaattgtcgttgtgcatgccatatttgcgtactctgtgaactcaaggtaagttggcgttggcttaaatctgttgtaaatcacatatctatacagcatagcttctgtttgcttccttacagtccatacatcatgtagtactctttagtccataaaaggttgagttgatcatcaaatgtaattgcatgtatcatagaataaaatggcacaagaagtcaggcttccatgcctttttccc

SEQ ID NO: 17345 - DNA, 4614 bp, Oryza sativa
  ref <308>: DATABASE ACCESSION NUMBER: AK067794
  ref <309>: DATABASE ENTRY DATE: 2001-12-06
gggggccacggccgtgcgccacttctcttcctcgctcactcttccccccctctcgcttccttcccttctgctctgcttcctccgcctctgcttcgtgtcgccgtcgccgccgcagcagccgccgccggcgagcaccgggtgcggatactgggagcgatggcgtccgggaaggtcgtgtccttcgtcggcgccgacgagctgggcgtgtccctcgccgcctccttcgtccggtccggggccatcgtccgctgcttcgtcgctcccgggggtgatggatcggcgacggcgctcgcggagctgggcggcgtccggtgcgcgagccccgcggaagccgcgcgagacgctgagctagtcattgtgctcagtgacacggatggggttgatgagctgttcttcggacctgaggggatagtgaaaggactgtgctcgggtgctgttgtattgattcgatcaacaatgctgcctagtcatctggagaagttgaatcagaagcttgcagatgagaagaagaatgcccttcttgatggatacatttttagtggtttatctgatgaattaaagcaaaagattgttgttgttgcatctgggagacatgatgttacagaaagaaccgggcaattcttctctggtcttgatacagcagtttactttgttgaaggtgaatttggcagtagcagcaaaattaagctggttaatgatttgctggagagcattcattttatagcatctattgaagcaatgtttcttggtgttcgggctgggattcatccatcaattatctatgacataatatcgaatgctgccggaagctcaagaatattcgtggagatcgtaccaaagcttttgagagaggattctttgcttattgattatctagagtcatccaagacaaacgcaggctatgtgatggatatggctaaagcagtaatattccctttgccacttgtagctgtttcttatcaacaattaatacatggttgttcatcagcaaatggagatgcattagtctcaccattgaaggtttgggaacagtcatttggagtaaacatcatagatgctgccagtcaacaaatctacgatgcaagcaaattagctgaccagcttgttatggcatgtaaaacagcaaaaactatcggctttattggtcttggagctatgggctttggaatggcatctcatttgctaaaatcaggtttctccgttattgcttatgatgtatacaagccaacactggccaggtttactgatttaggtggattgactaaagattctcctgaggaagtatcaaaagatgtggaaatacttgttatcatggttgcaaatgaagttcaagctgaaaatgttctatatggaaatgctggtgctgtatcagtaatggccgctggaacatccatcatcctatcttcaacagtttctcctggatttgtgattaaactcaaggaaagattagaagctgaatgccgagacataaagttggttgatgctccggtgtctggtggtgtcaaaagggcagcagaggggacattaacaataatcgcttcaggaacagatgaagctctgcagtgtactggcagtgttctctcagcactaagtgagaagctttatgtcatcaaaggaggatgtggagctgcaagttctgtaaagatggtaaaccaacttcttgctggggttcatatagcctcagcagctgaagcaatggcatttggtgctcgattaaatttgaggacaaggagactttttgaaattattcaacatgcaagaggttattcatggatgtttggaaatcgtgtgccacacatgcttgataatgattatactccttattctgcagtggacatatttgtcaaggatcttggtatagtatctcatgaaagctccaacgcaaggatcccactgcatgtctctagtattgctcatcaactttttctttcaggttctgcttctggatggggtcgatttgatgatgctgctgttgtgaaggtttatgagacattaactggagtaaaagttgaagggaggcctcccatgcttaacaaagaagatgttctgagttctcttcctgctgaatggccagaagatcccatggatgatcttgtttcatctgcatctcataatagcaaaaaaattcttgtggttttggatgatgatccaactggaacccagacagttcatgatatagaagttttaactgaatggcctgttgaagcccttgcagaacagtttcaaaagctaccagcttgcttttttattttgacaaactcccgttcaatgactgcggaaaaggctacactattagtaaaagatatctgcagaaatcttgaagctgcagctaagtctgtccctggtgttagctatacagtggtattgagaggggattccactttacgtggccatttcccagaggaagccgatgcagtcgtttcagtgttaggtgagatggatgcttggataatatgcccatttttccttcaaggtggccgctacactattgatgacattcactatgttgcagattctgacagattaattcctgctggtgaaactgagtttgcaaaggatgcagcttttggctataaatcttccaatctcagacagtgggttgaagagaagacaaaaggacggatttctgagaaccaagtttcaacaatttctgttaatctcctacgtaaagagggaccgaatgcagtctgccagcatctctgtagtttgaagaagggttctgcatgtattgtcaatgctgctagtgagagggacatgtctgtgtttgctgctggaatgatccaggctgaattgaaaggaaagagatttctgtgccgcacagctgcaagttttgtaagtgctagaattgcaataaagccaaagccacctattcgtccaactgacctaggtttaaaaagagctttaactggaggcctcattgttgttggctcttatgtgccaaaaactacaaagcaggttgatgaacttaggtcacagtgtgagcaatctctccgaataatagaggtatctgttgagatgatttcaatgaaatcggctgaggatagagaccatgaaattagccgagttattgaattgggaaatgcttatatacaatccaggaaagacactctagttgtcaccagccgccaactcatcacaggaaaaactcctgaagaaagcttagaaattaattacaaagtgagctcagccctagtggagattgtgagagggattggcagtcgaccccgttatattcttgcaaagggaggaatcacttcatccgatcttgctacgaaggctttggaagctcggcgtgccaaagtaatgggacaagctttagctggtgtccctttatggcagcttggtcctgagagtagacatcctggtgtcccttacattgtttttcctggtaatgttggtgacaacagtgctcttgcaaaagtggtccagaattgggcttgcccttctagaagttctgcaaaagaacttctccttaacgcagagaatggtggttatgccattggtgctttcaatgtatataaccttgagggaattgatgctgtcgtttcagctgccgaagccgaaaaaagtcctgctattctgcaggttcatcccagtgccctgaagcaaggtggagttccattggtctcatgttgcattgctgctgcagaacacgctagtgtacctatcaccgttcattatgaccatggaacttccaagtctgatttgcttcaagctcttgagatgggttttgattcaatcatggtggacggatcacatctacctttagggaagaacatcttatacacaaggagcatatcttccttggctcattcaaaaggcatgcttgtagaagctgaactggggagactctcaggcactgaagatggcttgacagtcgaagaatacgaagcaagatttactgatgttgctcaggccttggaattcattgatgaaactggtatcgattctctagcagtatgtattggaaatgttcatggaaaatatccccccagtggaccaaatctcagatttgacttgctagaggaccttcgtgcattgacaatgaagaaaggtgttagcttggttctccatggagcatccggactgcctcatgaacttgtaaaggaatgcatagctttgggggtgaggaaattcaacgtgaacacggaggtccgaaacagctaccttgaatcccttaaaaggccagaaaaggacctgattcatgtcatggcatctgctaaggaagcaatgaaagctgttgtggctgagaaaatgcgcctgttcggttcatctgggaaagcttgagttcaagttgcatcgccacttatgaacactccatgaacacttaattctggaggcatgattggtccgtgggattaagacatcttgatagactgcagtggagcccagcccataatctgaagaactcattaccgactcttggctgaagtgcttcggagtgattgatgccattctgtcatgtgatcaagttcatgtccatactacatacgtcgtctggtcctttagagcaacatgacttcaggacgttgctatcaacggctattgatgataaactagtaataaaatttgtcgatgaaattacttgccgtgataaatgattccgttgtcgcc

SEQ ID NO: 17346 - DNA, 3716 bp, Oryza sativa
  ref <308>: DATABASE ACCESSION NUMBER: AK067795
  ref <309>: DATABASE ENTRY DATE: 2001-12-06
ggcggcttcgcctcgcctcgcttcgcttcgcttcgcttcggagtccagcctcctcctccgctgacctcctcgcggtcttctcgtctccgcgtggagcaactgcctcccgcggcggcgcgcgcgggtgggtggagactggagagtcctctccgcgagaggctgcccgcttcggtttggttttgatctggtttggttgaatcgatcgagaggtggggaggggaggggagcagagggcggcatcggatcggaggagggcgcgatgaggaggaggggcggcgctgggggatcggatccgcgcgcatgattgcggcgcggcgcgggaggggatttgttcgtggatcgtgcctccgatcggcgggagttggatcgggggcgtggtggcattgggggtgagacgggatggtgagcggcaacctcttccactgccggaggaactcgtggccggccgaggagtacgtcggccgaaccgccctgcagttgttggacttcgacggcgggtcgcctccggagcaggcatggcggcggcgtctgaacagccacgccaacttactcaaggaattcagcgtcaccttcatggaagcaatgaggatgatgagccttggcctgaggctatggtcgtatgtccgagaggaggcttctcatggaaggaaagctccaattgatccgtttaccaaagagaaatgtaagccgtctgcttcgcagggcgtaccgcttggtgggatggggagtggtagcatttcaagaggtttcaggggagagttcaagaattggcatatcattcctggtttatgtgagacttccccggtcatggagaaccagttttcaatatttgtatctcgcgatggggggaacaaaaagtactcatcggtattgtctcccggacaccatgaaggtttaaagaaatgtaatgactctggaatttcttcatgggactggaacttgagcggtcaacattctacctatcatgctttatttcctagggcatggactgtttatgatggtgaaccggatccagaccttaaaatctcatgtcgtcagatatcaccattcattcctcatgattacaaagatagcagcctcccaacttctgtctttgtgtacactctagtgaacactgggaaagaccgtgcgaaagtgagcctgttaatgacatgggcgaattctatcggaggtttttctcatcactctggaggccattttaatgagcccttcattgcggaggatggagtttcaggagttcttctgcatcacaaaacagcaaaggataatcctccggttacttttgctattgctgcctgtgaaactcagaatgtgaatgtgacagtcttgcctgtatttggcctctctggagaaggccatgattcagccaagcaaatgtgggatagaatgaaacagaacggccactttgaccgtgaaaatttcgaagctggtaccagtatgccttcatcttcaggggagacactttgtgcagctgtctcagcatcaacctgggtagagccacatggtagatgtactgttgtatttggtttggcttggtcctctcctaaaataaagtttcagaagggctgcacatacaacaggaggtacactgaattttatggaacttctgaaagatcagctgttaatttggtacacgatgccttgacaaaatataggatttgggaagaggagattgagaagtggcaaaaccccatactcaagaatgaaaaacttccagaatggtacaagttcacactttttaatgagctttactttctggtagctgggggtactgtttggacagatggccaaccaccagttatcgatgaaaaaccaagtcctggttctaatcaacagaaatcttcaaaaaggggcactagagacactaaacaggaatcagttaaagataaccatgtcaaactgacagcagagcaagtcactaatggtggtgacctggctaatggcgaagagcaaagtgtgtcaaagtatgcagcagtacatggaccacaaatggctaaggcaaccaacggacttgggtcacaagagccaattccatacttgctttccaagaatggccctgaaaatgttggcaaatttttgtacctggaaggagtggaatacatcatgtggtgcacctatgatgtgcatttctatgcttcttttgctctgcttgatctgtttcccaaaatagagttgagtatccaacgtgattttgccaatgctgttctctatgaagacagacgaagaatgaaatttttggctgatggtacttctggaattcgcaaggtcaaaggtgccgttccgcatgacctaggaacacatgatccatggcatgaaatgaatgcgtacaacatacatgatacaagcaaatggaaagatctaaatccaaagtttgtgctccaggtatacagagacttcgctgctacaggtgatatgtcatttggtagagatgtttggcctgccgtctgtgcagtgatggactatatgaatcaatttgaccgtgacggtgatggtctcattgagaatgatgggtttcctgatcaaacctatgatgcttggactgtacacggaattagtgcttactgtggcggtctctggcttgctgcacttcaggctgcagctacaatggctcatcggcttggtgatcggccatttgctgaaaaatacaagctcaaattcatacaagcgaaagcagtatatgaggctaagttatggaatgggtcttacttcaattatgacagtggcacaagcagtaatagccgatctattcaggcggatcagctggcagggcagtggtatgctgcttcttcaggcttgcccccgcttttcgatgagaataaaataagaagtgctctgcagaaaatatttgaattcaatgtaatgaaggttaaaggaggacgattgggagctgtaaatggtatgactcctaatgggaaagtggatgagacatgcatgcaatctcgggaaatctggaccggtgttacatacggtgttgctgcaaacatgctgctccatggaatggagcatcaaggattcaccactgccgaaggaatttttattgctggttggtcagaagaaggatatgggtattggttccaaacaccggaaggctggaccatagacgggcactacaggtcgctcatctacatgcggcctctcgccatttgggcaatgcaatgggcacgttctccacccaaggcaatccttgatgcccccaaggtaaacctgatggacaggatacacctatccccacaaatgatccgggcaatgaacgagattaatgttagaaagatagcacccgacaatagatgtttccctagctctgcatttcgttgtgaatgctgaccacaaaaaaaaaagagaagcaaaatgcaacaactgagtagtaacatacatatatatactttccttttcggcttttccttggccccttacaagtttcagtggggttcatggggttttccttgaaatcagagggcatataaatctacggaaccactaagctcagtagctcacactctcacagctcgaaaagagctcttgttgtataattgtacagtaaactacaaaatcatatcgtcagcatcatctttgctctgcgtcaaaaagttttgtttacagactctttaactgatgtctgagcttccctttgcgggtatcaattccgagaaacacagtgtatatagattttacaatggacattccgtaatataatcgttaagcgagggatttattct

SEQ ID NO: 17347 - DNA, 1103 bp, Oryza sativa
  ref <308>: DATABASE ACCESSION NUMBER: AK067796
  ref <309>: DATABASE ENTRY DATE: 2001-12-06
ggaggtccgtggcgttggagtgaggactgaggaggaagaagagggcgggatctagggtaccggatgcgctggctgtgctgagtgagagtagagatgagcgcgtctcggttcatcaagtgcgtcaccgtgggggacggcgccgtgggcaagacctgcatgctcatctcctacacctccaacaccttccccacggactatgttccaactgtttttgataacttcagtgcaaatgttgtggtcgatgggagcactgtgaacttggggttgtgggatacagcagaggactacaataggctacgcccgttgagctatcgtggcgctgatgttttcctgctggccttttctctgatcagcaaagcaagctatgagaatgtttctaaaaagtggatacctgaattaaggcattatgctcctggtgtgccaataattctcgttggaacaaagcttgatctgcgggatgataagcaatttttcgtagatcaccctggtgctgtacctatttccactgctcagggcgaagagctgaggaaactcattggtgcagcggcatacattgaatgcagttcaaaaacacagcaaaacatcaaggcagttttcgatgctgcgattaaggtggttctccagcctccaaagcaaaagaagaagaagaaaaaggcgcagaaaggatgtgccatcttgtaattaaatggtagacagtgcagtgcagatcgatgtatcccttcatttgtagcctctggcttcaatcgtcgcttgtttgtataattacgctagatgccaccggcagaagatataatatagtcctcctgcctttgtggtgttggtctctaaggtcgtccagactccagagtccagacgcatttggtttcttttgttctatctataatcaatctatctatatctgctagtgttgtgcttctgctagttatgcggatgagaaagggaatttaccttccctgtttctgggcttctggcttgcacgggaaaggtcggtttgtttgcaatatactactaccactccagcttgctaggttgattaaaataagctaccagtaagaatcgatatgacgtatcagcattttattaaatcagtgattaattttacc

SEQ ID NO: 17348 - DNA, 2307 bp, Oryza sativa
  ref <308>: DATABASE ACCESSION NUMBER: AK067797
  ref <309>: DATABASE ENTRY DATE: 2001-12-06
gataggcaaaaaaatccccaaatccaacaacctgtagcccgcttcagtccgacgaccatggccactcctttgctcgccgcgctcctcgccgccgcgctgctcgcctcgccggcggcgccggcggcgtcggccagcggcggcaccatcgtcttcaccaccctcggccgcagccgctacgagttcgacatcttctccctccccctcgcgccctccccccataaccccgccgccgccgccgagctccgcctcaccgatggcgtctccgtcaactacaacggcaacttcgcccccgcctccgattccatcctcttcgtctccgagcgcaacggctccctcaacctctacctctccccggttccctcctcccgccgcgaggcgctcgagtcggcgtcgtcgtcgtcgtcttcggcggcggcgacgatctcgccgctcctcccatgggagccaatcgcgctcaaggaccggccgtcgctcacccccgacggctcccgcctcgtctacgtctccaccgccgtccccgccgcggagccgcgcagcagctgggccgccgtgtactccaccgagctgtccaccggccgcacgcgccgcctcacgccgcttggcgttgcggacttcagccccgccgtgtcgccctcgggcgagtggacggccgccgcgtcgcccggcgccgccggttggagcggcgaggtcgaggacctgcgcactgacatctacgtcttccgcaccgccgacgggtcgcgccggtcgctcgccatccgtgacggcggctggccgagctgggccgacgagaccaccgtcttcttccaccgccgggacagcgacggttggtacggcgtctaccgcgccgagatctccgtcaccggcgacggggtcgaagcggcgtccgtggagcgaatcaccccgccggggttccacgccttcacgccggccgcgtcgcccggcgcgccggggctcgtggcggtggcgacacggcgggcgggctccgactaccgccacatcgaggtgatcgacgtgagcagcgacggcaagaacgcctacttcgaggtgaccaggcccgtggcaccgcgcgtgcaccacttcaacccattcatctcgccggacggcgcgcgcgtcgggtaccaccggtgccgggggagagggaacggcgactcgccgctgctgctggagaacatcaagagcccagggtcaccggacacgttctcgctcttcaggatcgacggctcgttcccctccttctcgcacgacggcaagaagatcgcgttcgtcgggctgccggggatgtacgtggtgaactccgacggctccggtggtcgccgcaagatcttctccgggaacgccttctcgacgtcgtgggactggaagaggaaaggcgtggtatacaccagcatcgggccggatttcgccagcgagaccacggaggtggacgtggtggccatctccctcggcgacgacgacgacgagtcaaccatctcgatgaagaagctgaccgtgggaggcgagaacaacgcgttcccgtcgccgtcgccggacgggaagtgggtggtgttccggtcggggagatccgggaacaagaacctgtacatcatcgacgccgaggacggcgaggccggcggcatccggcggctgacggaggggccatggtcggacacgatgtgcaactggtcacccgacggcgagtggatcgccttcgcctccgaccgccatgccccggggagcggcagcttcgccatctacatggtgcaccccaatggcaccgggctgcggcgggtggtgcacagcggcggcagcggccggaccaaccacccatggttcagcccggactccaagagcctcgtcttcacctccgactacgccgccgtctccgccgagccggtctccaaccctcaccattaccagccatacggcgagatcttcaccgtcgacatcgacgggtccaacatccggcggctcacgcacaactcgttcgaggacggcacgccgtcgtggacgccatacttcctggagccccgagacgtcggcgagacgctgcaagcctcgggcaggtgcgcgttccaggattgccactggctcaacatccaagatgctgcccaacctgaagagctcaactatggcaagagctgctgagtgaagccatggcactggctgatcacgctgaattaagccaataaaccatggatattggagtgcatgaatgtagatataatactgttatgtagtagcatgaatctaccaggaataagatcatgtacactgatgccatcttcagggcaaacgatatcagaattgctacatatctagttttttttt

SEQ ID NO: 17349 - DNA, 2491 bp, Oryza sativa
  ref <308>: DATABASE ACCESSION NUMBER: AK067798
  ref <309>: DATABASE ENTRY DATE: 2001-12-06
gatttatttattttcctttttataacttgtggccgtttgctccgccgctacaggctgcgggggctcgtcggctagtcggctcggctcggctcgttcccgatggacggcgacggcgagtgggtgtgggtgcggcggccggcggaggcggaggccgtggcggcggcggcggggtggccgacggcggaggaggaggcgcggccgctggaggtggtgtttgcgtcgccgtcgaggtacttcacggacgcggcgcccatcgggaacggcagcctcggcgccctggtgtggggcggcgtcgcatccgagaagctacagctcaaccatgacactctatggacgggtggacctggtaattatacaaacccaaaagcaccttcagttctttctaaagtaagggaccttgttaacaggggacagtatgctaaagccacggctgttgcttatggcctatctggtgaccaaacacaggtataccagcctcttggtgatattgatctggcctttgatgaacacgtggaggacacaaattataaaagaaacctagatcttcgaacagcaactgttaatgtctcttacaccattggtgaggtggtccactcaagggaacacttctcatcaaatccacatcaagtcatcgtgactaaaatatctgcagataaacctggaaatgtctcctttacagtgtctttgactactccattgaaccaccagattcgtgtaacaaatgcaaacgaaataataatggaaggttattgcccaggagaaaggcccacagaatatggcaatgcctctgatcatcccgttggaattaagttttctgctattctctatctgcagatgagtggttccaatggcactgtggaaatattaaatgataagatgctgaaacttgttggtgccgactcagctgtgttgctccttgcagctgctacttcatttgaagggccatttgtcaatccttcggaatctaaactggatccaactgcatctgctctgacaacactaactgtggcaaggaacatgtcatattcacagctaaaagcttatcacgtggatgattaccagaatcttttccagcgagtttccttgcaactttcacgagactctaatgatgcccttggagggaatggtttagttaatttacctgagaatagcttacaggaaacctctgtatctgattatgctgtacagatggtagagtgctcaagatttcaggggtttaataattcaggcaagcctaccgtagacagaattctaagttttagagacgatgaagatccttctctggtggaactcctgttccaatttggtcgttatctactcatttcttgctcaaggcctggaacccagatttccaatcttcaaggaatatggaatgatgaaacttcaccaccatgggatgcagctccccatccaaatataaatctacaaatgaattattggccggcacttccttgcaaccttagcgaatgccaagaaccactattcgacttcattggatctctttcagttaatggagctaagacagcaaaagtaaattatgaagctagcggttgggtcagtcatcaagtgactgacctgtgggctaaaacatcaccagatgctggtgaccctatgtgggccttatggccaatgggtgggccatggcttgccacacacctgtgggagcattacagttatacgatggacaaacaatttttggagaaaacagcatatccccttttggaagggtctgcatcatttctgttggactggttgattgagggaaatggagattatttggagaccaatccttccacttctccagccgttggtgttggcactccagataaagcccgtattcttgctgagcgtttaccatttccattggactacctctacgcagatcctgagcgcaaggcctatgatctcttgggtttgtattttggtattggtcgcacattcttcaatccagccagtgcaagtgtgttttcacgatttgactccctcaaggaggcagtgaagaactatacaattgaagccaccccagatgatagggctagtgttctacaacagggtggaatgtttgtgttcagagggaaagaattaatatatgcaaggaaagatgagggcactggtgatcatgcacctctggatgatgtcctcaacatctgttgtaaagcccctgcggcatgatattgtgtaatcaatgtcccatgagaattttcatagcctggttctgttcgtgtcccaaagttgtatgcagaaaagcatctcttgattttggaaggctggcttctgcaaggatagtatctctttgtctgtacgtctgatctaccatgctgttgatatgtaatatatcagttgaaaacttgagggatgtaggcagaccaaaggactttctcatgccataagctcagcagttcttttccttttcctcatagaaatgtactaattatagaagagaatcttacactgtacaataagtttgtgttaaagttggcgaaattttcct

SEQ ID NO: 17350 - DNA, 2539 bp, Oryza sativa
  ref <308>: DATABASE ACCESSION NUMBER: AK067799
  ref <309>: DATABASE ENTRY DATE: 2001-12-06
gggcgtccacgctttcctctccttgccaccaccacctctcctcctattgtagccaccaactccgccgcctccgcctccgcctccgcccctccaccgccgcctccggccggccgtcaggttcttcgatcgcccgcctttccatacccattccttctgtatttcattcttgattttggggggaagatgggataaacaattggttatccagtagataacttcgttgatcgattgacgtcgatttttatttttattgctaatggagaagaagctaggtgatattaacttgtttgtttctagcaacatgagggtacaagatctctttcagttttgacacaaccaaatgagcatccaaagtaacactactgtacttagtatcgcgatgttcttcaaaatgctgtgttaatgaaaatgaaatagtgtgctgacagttgattcatgcagaacttgacagtggtagagaactttattcccatccaacgttcgggggaagccgtagccgtgtgtcgcgttcatctttcatggaaaaatcccaaagaaagcgaggaccagatcatctgctgattcttgtccatggtatcattgcaagccccagtgactggacctatggagaagcagtgctaaagaagaggttaggtgacaattttttcatctatgctagttcgtcaaatatctacaccaaaactttcgatgggattgatgttgctggaagaaggttagcaaatgaagtattggatgtgattcagaagatggctggattgagaaagatttccttcctagcacattctttgggtggtttgtttgcgcgatatgctatttctatcctttattcaacagcaatgaaggatgcaagtcaaagtgctgcttgtatagctcctacaactggagggtctgaaaagttggagtgcacttcaggattaggtgcaattgctgggctggaaccaattaattttattaccttagcaaccccacaccttggtgttagagggaaaaatcaggtgggtctctaaatctattaaattatctgatacatttttattcccctcaaaattagttctgctggaagcaaaaactactatattggactttgagttgcctagtaagattttagtataaaactattgttgcatagctaatcggaggccaaagaccagtaaccaagtactacttctgaatatgttgtgacttgtgatcaatgtattaattacatgcattttctgcaataatattaccagcttccatttcttcaagggctatctattctagaaaagattgctgcacctttggctcccttggttgttggccgcactggtgcccaattctttctcacggatggtgaacctagcaagccacctcttctgctagagatggcatctgatcatgaggataaaaaatttatgtaagtcataagaaaggtcttaaggctaacttattatagtagaacatatcttcttcgttcaaacattgtagtagaacatattgtttcttcaatgttcctcagatctgcactagcagctttcaagaaccgcattttgtacgctaatgtttcgtacgaccgtatccttccttactcctagttagtacaacatgatttcctctgcctgatatgcaaacgaatttttttttgctccaaaccattttctattttgctgctcttgttttcttgaacatatgccagatatggtcggatggcgaacatcttcaataagaagagaaaaagaccttacaaaggtgttcagtgatctccactagaatttgattagaaaccaaattgcagcactgtgtgaatacttcagtaatttttttcctcctccatatgcagccctcacatcgttcactggatggctacaagcacattgtgaatatggaatattgttcgcctatatcatctgatggccctcatttccctctgcaagctgccagagccaaagaagctgcacagagtagaccaaacaaagaaaacactgaagaatatcacgaaatgatggaagaggagatgatccatggcttgcagagggtcggttggaagaaagtagatgtcaacttccatacagcactatggccttactttgctcataacaacatacatgttaagaatgagtggcttcacaatgccggtgccggcgtcatcgcccatgtggcggacagcataaaacagcaggagtcacggaaatatttccgtgccaacttataagatcttcagtcccctgtgctgcatggtcagaagtataataactatggtttcctaaataaccaaagcaaaggttttgcctctctagtaggagtgtaggacttgtctcagtagtaagcagtgtcccaaaaaaaaaaactcaacctaaggataatccagattcgttgttctaggaggggtcacatccccttctatgttgagttttttttttttgggacggatggagtatgttcgatgtgtttagtgtggatatagaaaactagctagttactgtatttttgtccacaaaagcttttttttttctttcgcacagacgtacagttgaaaataaattagtgaaacattattatt

SEQ ID NO: 17351 - DNA, 991 bp, Oryza sativa
  ref <308>: DATABASE ACCESSION NUMBER: AK067800
  ref <309>: DATABASE ENTRY DATE: 2001-12-06
ggattcagaaatatatgatctcataatgaggaagaagcaaagaccaagactaactcaagaactagaagcgttctggacgttagacaagccaattacgaggctggagttgggtatcacatctgatgctcatgcagaaaaactaagactgttgatagatctcttctaccagtgcactaaaggaattgcatctgagcgcccaaaagctgaggcggtttacaatttactgtgctctctacccacatgctatgacatgaggtgaaagtgtggatcttaaatcagtatgacataaggtgaaaatgtggatcttgaatcaggaacctgttgatgagacagccagccagatcggcctgcgccaggatggcaagttatgctgggtggttttagcaggtcaacagatctggcctcgcttggtttgaacttctgaccagcatgccgcttattctttgagtgctggcgatgcggaacacgagaaatccaaccaaaaccaaagccggtggcagcattgttctgagttctctggagttcatcctgtgtcagttttgtagcagccagccccgtttcccgcctcttgtgttgctgcggtgttggcctgaccatgtgttgcttgtcgtgtcatttgtttttgtttttcattattgcgttaatttattgatttaggccattcacaaccccaaggcgtctgtctgctgcacatgacccattctgtatttgtatctgtatctgtatgtacaagtgtcggtccatccgtgatccatgtaaccctctactgttgagtcatgtaacaataacagatactgttttgaggttatttatcatgagggattgtttttccatttaaagtttcaacaatagtactcatggcagtttatcatttgtgttagtatcacatagcatgcactgtgtatgagtgtatccctccctccagaggaacaatgtactattctcattaaaacagtttccctgcatcagttaataatattcgttgtgcgcg

SEQ ID NO: 17352 - DNA, 938 bp, Oryza sativa
  ref <308>: DATABASE ACCESSION NUMBER: AK099019
  ref <309>: DATABASE ENTRY DATE: 2002-08-28
gaggctggtcccgtttctcacttcgcaacactaggctttttgcccgaagcgactcgactctacacccctcaccctaccctaccctagcaacgaggcggccatggcggacgaggagcacgaggtgtacggacaggagatccccctcgacggggaggacgtcgacatgggcgcccccggcgacgaggccgccaagatgcaggagctcgacgagatgaagcggaggctcaaggagatggaggaggaggccaacgcgctccgcgagatgcagaccaaggtcgccaaggagatgcaaggtctggatcctaatgcgtcctcatctgaatcaaaagaggaaatggacgctcggtcggtatatgttggaaacgttgactatgcatgcaccccagaggaagtccagcagcattttaattcctgtggaacggtcaacagggtgacaatcctgacagacaagtttgggcaaccaaaaggtttcgcttatgttgaattccttgaagtagaagctgttcaggaagctgttaagttgaacgaatcagaactgcatggtcgccaaatcaaggtggcgccaaagaggactaacgtccctgggatgaagcagccccgcggaggcagaggattcggtggtcatccttatatgaggccatatggagcaccattttacaatccctatggttatggataccccagattccgccgtccacgcaggccatacttttgaagctgtcttcgtggagtcttcagcacatgacattagtccaatagcccaaagaatccgtcgttgttgctgtatttcgatacttcatagttagcaactataaagttcgatcactttcttcacagggtgttttttgttgtttaaagatatgtgcaaattcaggcagcagcattatgtactattaacttcgtttatgtggaagtgcgcactattttgggttttggct

SEQ ID NO: 17353 - DNA, 2551 bp, Oryza sativa
  ref <308>: DATABASE ACCESSION NUMBER: AK067801
  ref <309>: DATABASE ENTRY DATE: 2001-12-06
gtcagcttccatatccccggctcttccgcacacacaactcctccacctccatcgggagcaaaccgctcgagcaaccaccactcgttacagctacacatcgatctcccctctgcttcgccgttccgatggagtgcgagaacgggcacgtcgccgccgccgccaacggcagcagcctgtgcgtggctaagccgcgtgccgacccgctcaactgggggaaggcggcggaggagctgtccgggagccatctggacgcggtgaagcgcatggtggaggagtaccgcaggcccgtggtgacgatcgagggcgccagcctgaccatcgcgcaggtcgcggcggtggcctccgccggcgccgccagggtggagctcgacgagtccgcccgcggccgcgtcaaggccagcagcgactgggtcatgaacagcatgatgaacggcaccgacagctacggcgtcaccaccggcttcggcgccacctcccaccggaggaccaaggagggcggcgcgctccagcgagagcttatccggtttcttaatgccggggcgttcggcaacggcgacgacggccacgtgctgccggccgcggcgacgcgggcagccatgctcgtccgcatcaacactctgctccaggggtactctggcatccggttcgagatcctcgagacgatcgccacgctgcttaacgccaacgtgacgccgtgcttgccgctccggggcacgatcaccgcgtccggcgacctcgtcccgctctcctacatcgcgggactcgtcaccggccgaccaaactctgtggcggtgacgcccgatggcaggaaggtggatgccgcggaggcgttcaagatcgccggcatccagcacggcttcttcgagctccagcccaaggaaggcctcgccatggtgaacggcacggccgtcggctccgggctcgcctcgatggtgctctttgaggcgaacgtccttggcgtgctcgcggaggtcctctccgcggtgttctgcgaggtcatgaacggcaagccggagtacaccgaccacctgacgcacaagcttaagcaccacccgggacagattgaggcagccgccattatggagcacatcttggaggggagctcctacatgatgctggcgaagaagctcggcgagctcgacccgctgatgaagcccaagcaagacaggtacgcgctccgcacgtcgccgcaatggctcggcccccagattgaggtcatccgtgccgccaccaagtcgatcgagcgcgagatcaactccgtcaacgacaacccgctcattgacgtctcccgtggcaaggcgctccacggcggcaacttccagggcacacccatcggcgtgtccatggacaacaccaggctcgccattgccgcgatcggtaagctcatgttcgcgcagttctctgagctcgtgaacgatttctacaacaacggcctgccgtccaacctgtccggtgggcgcaacccgagcttggactacggcttcaagggtgccgagatcgccatggcatcgtactgctctgagctccagttcttggccaaccctgtgaccaaccatgtccagagcgcggagcagcacaaccaagacgtcaactctctcggcctcatctcgtccaggaagacggccgaggccatcgacgtgctcaagctcatgtcctcgacgttcttgatcgcgctatgccaggccatcgacctgcgccacctcgaagagaacgtcaggagcgccgtcaagggctgcgtgacgacggtggcgaggaagaccctgagcaccagcgccaccggcgacctccacaaggcccggttctgcgagaaggacctgctccaggcgatcgaccgcgaggccgtgttcgcgtacgcggacgacccctgcagcgccaactacccgctgatgcagaagatgcgcgccgtcctcatcgagcacgcgctggccaacggcgaggcggagcgcaacgtcgacacctcggtgttcgccaaggtcgcgacgttcgaggaggagctccgcgtggcgctgcccagggaggtggaggctgcccgtgcggccgtggagaacggcaccgccgcaaaggcgaacaggatcaccgagtgcaggtcgtacccgctctaccggttcgtccgcgaggagctcgggacagagtacttgaccggggagaagacgcggtcgcccggcgaggaggtgaacaaggtgttcgtcgccatgaaccagggcaagcacatcgacgcactgctcgagtgcctcaaggagtggaacggcgagcctctgcccatctgctgattgctgaacagaggaccgacgagaagatagcaaaatattagcgtgtttcagaaattcagaagttcacagatgtgcttagctgatgctgtaataagtatgccttttctttcatttttttttaagttcttgtttgcaacgttctttggaagttacgatgccatagccaaatttagcaatttgcatagaggcaggcagctactaaaactgctgttgatgtaagttaaagggtgtaatttgtgatacttttccatggtcaattcgtgagagaactccaaacagtc

SEQ ID NO: 17354 - DNA, 841 bp, Oryza sativa
  ref <308>: DATABASE ACCESSION NUMBER: AK067802
  ref <309>: DATABASE ENTRY DATE: 2001-12-06
gatcgccaccgtcgttcacaccacaccacctgctgcacacagctcgatcgagttagcccactagctaccaaccaagctgccggcgagaggtatggcggcgtggcgcggtctggcgttggcagcggtggtggcgtggtgcgtggcggcggcggcggcggcgccagacgcggcgctgcagagcaaatgccagcaggacttcacgaagctgacggactgcatggactacgcgacggggcacgaggaggcgccgtcgtcgacgtgctgcggcgacatgtcggcgacgcagcaggcgcggcccgagtgcctgtgctacatcatccagcaggtgcacggcggccggaacgaggtccagtcgctcggcctccgcttcgaccgcctcctcgccatgcccaccgcctgcaagctccccaacgccaacgtctccctctgcatcaacctgctgcacctgaccccaagctcaccggactacgctgtcttcgccaacgcctccaaggcagcggctacgacgccgtcaagcaccaccccgggggcggcggcggccaccgccggcggcttcaaggttcaggcggggctcagctacggcgtcgtcgcggcggcgatggtttctgccgtcttctcatccatcttctgatccgtgaaacaagctagtcacccacccatttttctttgggaaaaaatcttttctgtctcttgatctctacgtcgttcagcttttactctgcaagaaacgaatgcacactggatggatggatggatggttggtttgtgatgtgctacacgaagattcgttctgatgttgtactcttttgtaccctgataaatagatttgagacttgatttt

SEQ ID NO: 17355 - DNA, 3628 bp, Oryza sativa
  ref <308>: DATABASE ACCESSION NUMBER: AK067803
  ref <309>: DATABASE ENTRY DATE: 2001-12-06
gaccccagaattcccaaatccgcaacgcacgcacgacagccagagagagagagagagtcagaccgccgacacccgacgacatggccgtcgcctccgcgtgggccaaacccggctcgtgggccctcgccgccgaggagcaggacgacctgcccccgccgccgccgcccgttcccgccgccgacttcccctccctcgccaccgccgccaccaccaaggtccccaagaagaagaagccgcagcccgtcccgctcggcgagttcaacagcaccaagttcgtcgcccccgcctaccgcgggcccacccaagacgacctcctcagcctccccacaggcccccgcgagcgcaccgccgaggagctcgccaacgccacgcgcggcttcggggctcgctggggcggcgccggcgccggtggcccccgcggcgacgacgagccccgccgcggcggatctggcccccaggacttcggcccgtcgcgcgccgacgaggccgatgactggggcgccggcaagaagccgctcgagaggagggagcgcatgggagggtttggcgtggactcttcgatgtcgcgtgccgacgacgtcgatgactgggtctccaccaagagggcggcagcccccgcgcccatggagcggagggagcgtagcgtggcgttcggggccgactcgcattcccgcgctgatgattccgcgagctggatctccaacaagggctattctgcggcgccgccaccgccctccgacagccggaggggcggtccagtctggggtttcaacagggatggaggcccagacgccgactcttgggagaggaggagggaggaggtgagcggtggtggttcaagcggtggtgcccggccacgcctgaaccttcaaaagcggaccttgccactggctaatggcactgatggagaagggaaggaggacaaggaggaggagaagggagagatgcagcctaaaagcaggtcatcaaacccgtttggtgcagcccgccctcgcgaagtggttcttgctaccaagggagatgacgggaggaaggaggaggagaaggagaaagaggaggagaagctggagattcaaccaaggaccaggacttcaaacccgtttggggctgcccgcccacgtgaggaagtgcttgctgcgaagggtgaggactggaggaagattgatgagaagcttgaggccatgaagatgcgcgaggcaccaccacctgagaggaggtcctttgggaggagaggttcccctgttagaggagaggacaatgggagccgtccactgccagagagtcatgtcgagggagcttggaagaagcctgatgcagttcaggctgttggagaatccgaagatgggtctgataagcttaacacggctgaggctgcgagaaaatttgaagaagggtttgataactgaacttttatccttcttttattcaattggctaattcatcatcgattgctccctgttattgaattaatagttaattgatctctgttaggtactagtagtttttattgatctcagttattttttgtctgaggtatgctttctattgctagggtggaaaacaaatattgagcctgttactgtgtgctatctgcttttcagtatgtgtccctctagattcattgtcaagtgcatgtcctagcagattaccaattagtatgcagcgaagctttatttttactggcttcattaataaaataagttcctctcttactagtcaatttagcaacagttttattaagacaaattgcattcatataaacatagtggttggtatggtaatgtttgatttgattattgtttgtcttttgctgggaatgttttgtttgccagattttaagattatcattgcagtgaattgaagaacattgtttgcttgcttgatgtgatatttagacatgagccaaatacccgtgcattgtaacaatctagcataaatatatgatttcaaattgaatagttcacacttaattctaatacaaacgacgtgcaaatgatacagttatgcagagaagattgttcagataaaagaaaaatgaacacagttatgcatagtatggtggtggtgcaaactcatttccatcactgctagcttcttttacaatatactagtaaatatcaccctgtagttttggttcgttacatgttcttatggtctcaatatgacaaatgcttagccaatagccacttaggtagttggtgttgttctccatttgttccacaatctaaattacaaaaagtttcttgtctggtgtttatgctccttttcttttggcttcaaacttatgtacttgagtgctcaaattcgtgttgtgttgggttgcaatctaattctggagaatatgcgtctggtgtggcattgtactgaacaggaagggtcctgttcccatctgagttaacatcctgtgttcgcatacatctcttccttctaatgcatggaattataagcatacatcctgttttcaattctttgaaccatatagtttggtgatggtggatatcttgaatatggtatagtttggcataaaaaaaaacacagtaaggtacctacatatgtttttccaagcgattgacaatattgtggctgcgagtggcagatgtagatccaactatcagaatgaacaatgcaaccacaaccttataatagggaaatactgaaacagacatcatgacatgtttcttatgccttgcatgaatttttttttggttagtttatatgtgatgtagtagatcagccaccaggaagaaatttatcatagtaatttactataatttcattattgtgaatttatatgtttgtcatggtttgctttgtagaatgtgaattcggttaatatgattgttgtaattttagtaagtcacgtatgagttaatattcattgttattagctggtatggtttgtgcaccattagtgtgttcttgcttgtttctgattcatggacctcacatggaggaagtcttcgcaagcctgcaactgtacccctattgccttggccccttctagttcagtttaatttttgcatgtcatctcttattgaaagaaggaaaaattgtaaatatactttgcatttgtccacttaggttgaagaatcttgtttggcttatgtctcttattgaaagaaggaaaatgtaccatttttctaggttgataaagctgcgttgttagcattctctactatagggttattgttgttttcacaaagttcatgttgttcttccattgtcatatcacttgaatcatatttcagtgtttgtcttctttcatgttccctctatctgctgaacattatttcattgcaggtctgatgctaccaaagagactgctgcagcaaactaatctatgccggtacttgcgaacccaaggattgcagatctcttctgctaaatagcctttctattatttttttgctacttgtgtgctacagttgtaacactgagtcaattttgcgtccatgtttcttatcttttcttagcacctggtaatcgtgatttatggtattgagaattttgatctggaacttaggtcttaatcatagtgggtagtagctattcattctattgtgactgttagttgtcatgctatgttgacatggtgataatgtctcgaagaaagaaatagtgctttttt

SEQ ID NO: 17356 - DNA, 1627 bp, Oryza sativa
  ref <308>: DATABASE ACCESSION NUMBER: AK067804
  ref <309>: DATABASE ENTRY DATE: 2001-12-06
tccctctatctgagtcagctgcatctcatctgcattccttcctcgtggcgatgacgatggtacgcatcatcggcccaagtccagctcaatcctcctcaccaacaccaagacgaccacgacctcctcgccctcgccgccgcccaccgaccatggcctccgccgccgcttcttcctccaaacctcccgtcgtgcttggctgcggcgccgtctccgcggactacctcgccaccgtcgcctccttccccaaccccgacgacaagatccgaagcctaacgctcaaggtccagggaggcggcaacactggcaatgccttgaccgccgctgctcgtttgggccttcgcccaaggatcatatccaaggtatccaatgacccacaaggaagaaatattctcaaggagctgcaagatgatggggtcgacacctctcatatcctggttgcagaggaggggaattcacctttcacctatataattgttgacaaccagacgaaaactcgtacttgtattcacactcctggttatcctcctatggtccctgaagagctcacacaagaaaacttgtttgccgctttagacggtgctgacattgtatattttgatgtcagattgcatgaaactgctttactagttgctgaagaggcaagccaaagaaaacttcctattttgattgatgccgaacggaagagggatggattggacgagcttctcaatttcgcatcttatgttgtatgctctgcaaaatttcctcaggcttggacaggagcctcatcaacaccggttgctttggtgtccatgcttttaagattgcctaatatcaagtttattattgtaacccttggagaaaagggatgcttgatgcttgaaagaagcacaacagatgcttctgaggcagaggaaatagatgtagagagtcttctggaatcactagagaagaaagaagttttgagttcaagcatgccaaaatgcatcgcctccaagtcaaatttgagaataagtgcagatggaataggatccatcagtggcagattacttttaggcactgccgaaattataccctctgaagagctcatagatacaactggtgcgggtgatgcatttatcggagcagttctctacggtttatgctctggcatgccgcctgagaagatgctgccttttgcagctcaagtggctgcttgcgggtgcaggggtttaggggctcggactgctcttccccatcgcacagatccccgcctggttgcctattgactcgaggaactgtagtgtatcaatctgtgttggatttgattgggatggattcattggattgtgggcgcctttgaaaaagaagagattaagcatttgaaatatggagtaataagaaagccgcctgcagttgaaatcggttcctaagttgtatgtaaacattgattgttgttgcatactgtcaatataccttggcttgtgttaataagagagatttgtgtgctgttgttgcaaggcccaaggtacgagtgattggtgggttcttgtgatgttaaagagcaacattacccaatcatatacggtctcgttgattttgtaccagtgcaaagtgaaattacctacattttacctaattcaaagagtaattgatctatatttatttc

SEQ ID NO: 17357 - DNA, 1301 bp, Oryza sativa
  ref <308>: DATABASE ACCESSION NUMBER: AK067805
  ref <309>: DATABASE ENTRY DATE: 2001-12-06
aactttctcatccactcctgtcgttgttcagcttagcttggaagggaggagaagaatctttttgttcctcctgtcctgtccatagctcatgcaacacaagccattaatctaatcttgcattcatctacatctaatcatctactcctacaaatcttgtagtattaaagaagcttaaatgattaagattttttaaaaaaatcaataagttcaagaagattcccttgctctcctgacttctccaccccgttccaagaacaaagcagacagagagcgaagaagcaacaaggcaaaatgtgttccataaggagctttgcttttgtgctggtattagcattttcagttgcagtcgcggagagcagagattcatttaatgtattggctcataaaagctttccccttgaaaacaagaagacagggttaacttcagccaatggaaagctgtgtcaactatgcgagcagtactcaacggaagctctgttctacctccaacaaaatgaaacccaaactgagattcttagcatcctccaccatgcatgcgcaaacgttggacctctaaaacagcagtgcatcactctggttgactactacattccccttttcttcttggaggtttcgatggtaacacctgaaaagttctgtgaatcagtgcatctctgcagaaagggaacgatgcttcgcctaccatctcgaggagatacatgcggcatatgccatcatgttcttgttgaagttcttatcatgctaaaggatcctgacatgcagctggagatagtcgagatatttctcaaagcatgcagcaaggcagataattatgtacagcagtgcaagaagatggtccttgaatatacccctttgattctggtgaaatctcagaagtttcttgagacgacagacgtctgctctacaattcatgcatgcaaaacggggacacaagcatctgcagaaaccatgcttctgtctgccgcatcgtgaaaacaatgcaaatcaagaaattgctacttatttcccaagagattgaaccggtaatgaattgaagatcagatgcctgtgggaattctttactctattgctgaaacagtattgagtgaggcaaaaaaaaatgttgtatgtagagatttgtgttgtatattttgaacctacactgctctcaagtttgaagcatggagcagctgtaccaccgttcatcgatgatcgagcatacaaagttacaaactgtctgatgtcattgaatttggaagttacatgtgcaattatcgcattgtatcattatcatttgacaaacattcatactattattattc

SEQ ID NO: 17358 - DNA, 1091 bp, Oryza sativa
  ref <308>: DATABASE ACCESSION NUMBER: AK067806
  ref <309>: DATABASE ENTRY DATE: 2001-12-06
gcctcactacgtctctctcctctctctctccgccgccgccgccgccgccgactcttgcctttcccacgccctcgatcttggcggctggagagccatggcgatgcagtccggcaggcgagcctcgtagccaagaggggccctcggccacccttccagggaggaggtcgacgaggtgggtatggtgatgactctgagaggatgtctcggaggccatatgagcgccatagcggcactggccgtgggtatgagatgaagcgtgagggttcggggcgtgggaactggggaactaccactgatgaaattctcgcccaggaaactggggaagccctgaaattggatgagaaggcccctgttactgagaagcaaggcgcaccggagggtgctccacaggcagatgagaacaaggataacaaagatgtcactccaaatgaggaagaaaaggaagaggataaggaaatgactcttgaggagtttgagaaattaagggaggagaagaggaaagcacttctttctttgaagactgaagagaggaaggttgaaattgacaaagatttgaagtctatgcaaccactttccaataagaaagaaaatgatgaagttttcatcaaactgggatctgacaaggatgctttgaagaagaaagaaaatgctgaacgtgatgagcgtgctaagaagtctgtgagcatcaacgagttcctaaaaccagctgaaggagagaggtactatggcggccgtggtcgtggcaggggccgcggggatcgtggcggtttcaggggtggatatggtgagggccatcgctctgcagctccaccagctccagaaatcaaagaccaatcccaattccccactcttggtcggaagtgaaatgcatgtactgcctgcagtatcaagttatgtttgcggtcaactttgaattttgtctatccgtaaatcactgtgcaagtgctgatctgatcaaacaaataatggtgtcgcatttggtcaagagtccccgatatgtcagtcgaatttgtatatcggagttgcttgttacgtttcagaattttgtaggctgttattgaactcccttctgttaccagcaaagcgtttcc

SEQ ID NO: 17359 - DNA, 3099 bp, Oryza sativa
  ref <308>: DATABASE ACCESSION NUMBER: AK067807
  ref <309>: DATABASE ENTRY DATE: 2001-12-06
ggagcgttcgtcactcgcatctcctccgcctccggtatccaacctcccgcaccaaatcccaatccggatcccccacgctaaaccctagctttaaacccccgaatccaaccaatccccgcgccgattcccgccatttcgcgcacctcgtgccaggatctgctcctgggcggcgctcttttagaaaaaaacctggcagatttcgacttctgcaatggagcccgtcgatttcggtgggggcaaaggttatggaaggaatctctgtctgagcaacgatctgatccttctggagtaaggttttgtgctgggtggatttgggattcgatgtggctggagttgagctcatctcggggagaagggattcggacggtgtttgatctttctgtcgtgattgctttgcttcgggtttgctcagcgctagaagatttgctcgcagaatcccgcgcggagttttgaagaaagcttggtatttcctggttcgttgtggtttgtaagcgatgcagttcgaggacgggggagatgttcatgttggtgccggtgagggtgaagatggtggcagggtcacagtggatgagcttaccagatgtctacgttgtggcatcagtgcaaatgcgacgcctcatatgcgccgtggaccagagggacggagaactttatgcaatgcttgtggtatagcatgggcaaagggaaaagtgcgaaaagttattgattctgatacccccatggataatgccatgtttgcacaaatggttccagaacttagcatggaattcgatgacgaagataaagcatatgagttctacaacaggtacgctggacatgtgggattcagtgttcgtaaaagttcatcggacaaatcagctgaaaacatcacaaggtcaagaacctttgtatgctcgagagaaggttttcgtaaggacaagaaaggagctaaggaagttaaaagaccacggccagaaacaagaatagggtgtcctgcacgaatgtcaattaagattacatctgatggtaaatatcgtatatctgaattcgtaccagatcataaccatcagccagcacccccatcaaccatgcatatgctgaggtctcagagagtactcactgagctgcaaacaactgaagcagactcctcagaagaatcagcgacaccatcaaggttttctagttgctctttggtgaagcaagcagaagtaattagacataccaattttctccctgcagaatacaggtgctctctttgttcaaagcgcaagaaaaatatgcaacctggtgatgcaggagtaactgtaaagtacctgcaaagcatgcagctaagcaacccttctttcttttatgctgtccagcttgatgaggatgacaaactgacaaacattttctgggccgattccaaatctagaaccgacttcagctactacagtgacgtggtttgtttggacacaacctacaagataaatgaacatagcagaccattaacactattccttggagtgaaccaccacaagcaaatctccatatttggtgctgccttgctttatgatgaatcagaagagtctttcaagtggctatttgatacattcaagattgctgcaaatggaaagcaaccaaaaacaatcttgacagattggtctatggcagcaactacggcttctgcgataacagcagcatggcctggaacagttcatcgcctttgtccatggcaagtgtaccaaaactctgtcaagcaccttaatcacatctttcaaggctccaaaacatttgcaaaggatttcggaaaatgcgtttatgactacgatgatgaagagaacttcttgcttggatggaatactatgctagagaagtatgatctacgaaacaatgagtggattaaaaaaatatttgatgatcgtgataaatggtctccagtatacaatcgccatgtattcactgcagatataaaaagttctttgcagtcggaaagtgttagaaatgccttgaagaagtccttgagtccacaatttgacctgttatctttctttaagcactatgaaagaatgcttgatgagtttcgttatgcagagttacaagctgattttcatgcaagccaaagcttccctagaattcctccatccaaaatgctgagacaggctgctaacatgtacacaccagtggtctttgaaatttttcgcagggagtttgagatgtttgtcgattccgtgatttatagctgtggagaggatggaaatgcattcgaatatagagtagcagtaacagataggcctggggaacactatgttaggtttgactctggcgacttatctgttgtatgcagttgtaaaaaatttgaagcaatgggtatccagtgttgccatgtgttgaaagttctagatttcagaaatataaaggagttaccacaaaaatatttcatgaaaagatggaagaaggatgtcaagtctgcaagtacaggcaatcaagaacttctgaatggaggagtttcacaaattcccagctcttatttgaatgttcccgtgccatttatagatccacaacatgtgcaatcaaataacgagcttaaccatgacacttctgtttctaactcccaccagcaggcccttcatggaggtgcacagggaagtcagggttatgctcccttagcagggattcagcagcagcagtttattggaaattttcgcctgaaccatgaaacaggtttcttatgaaaaacagaactggcgcttttgccctgttcttgtcttccaaaaacttttttgctctgttattccaaagacaatgacacaagacatcgaaacagtctctagtctctacctttacatctcccttgtaaattctaattcatatttcgtagcatcacaaatatacaagctcaatagttttcaggaaactacgttcagagtttaaacgctgttggaccttggaggaagtacccgctaagacataagtctgattattggcctaaaataaggttgtattattagcatatgtgatgtagtatatacagacatacagttcgtagttctggtgattttgcagaagctttcaattgcttcgctgccaaatggccacttcaaccatgcactcttttaatctaatgctctcactgtttcc

SEQ ID NO: 17360 - DNA, 2271 bp, Oryza sativa
  ref <308>: DATABASE ACCESSION NUMBER: AK067808
  ref <309>: DATABASE ENTRY DATE: 2001-12-06
gatcaacgccgctcgctcactactcgcgccgccgcttccgccgccgctccgctccagtcgcgtcggcttcccgcctcctcgccggcgagccgtgcctcgacgctctccctctgttgctccgccggccagcagcatgccgcgcttctgctcccactagctcccgccaccgccgcccctactgagcccggtgagaccgtgaggcggtggtgtgcaccagtccggcagttcgcccccctcctcctcccaatccggccgccgcttcatcaccgccggcgaggctccgcgtctcctcctaggtcgcgctgcttcgtatcacagagagaggccagctcggtctccggataagcaagaaccatggcgtctgctgctgccgcttacggcgtcggggctccactcaagctcgctgcaaggcggcatggggcactcgcgctggccggtagccatcgctgcagtggatggaagtcttcagtgtcttgccctgttcctcaggcttggatgggcagttgctcttctgtcgcaatgcgccgtgtcgcctccggttctcgattgattgttcaggcttcaaacagcgggggctcaagcttgaaggcatcattggctgatgctagcctgcttactgaagagaggataactgttttggtgattggaggtggaggaagggagcacgctctctgttacgccttgaatcgctctccgtcttgtgatgcggtcctatgtgcccctgggaacgcaggtattgctcagtctggagatgcgacctgtatatcggacttagacgtctccgatagcgatgccgttatcgcgttctgctgcaagaggggagtgggaatggttgtagtaggtcctgaagctcctcttgttgccggtcttgtgaatgaccttgtgaaagctgagataccagcatttggtccttcctcagaagctgcggctttagaaggatcgaaggactttatgaagaaattatgcgataagtacaatattcctacagctaagtatcgcacattcacagatcctgcagaagctaaacaatatgtcaaagatcaaggcgcccctattgttgtcaaagctgatggattggcagctggaaaaggcgtggttgttgctatgactttggatgaggcatttgaagccatagactctatgctggttcaagggtcatttggttctgctggttcacgggttatcattgaagaatatctggagggtgaagaagcctctttctttgcattagtggatggtgaaaatgcattgccacttgaatcggcacaagatcacaaaagggttggtgatggtgatgtaggcccaaatactggtggtatgggtgcatattcccctgcaccaatagtgacagaagagcttaagcacacaattatggatagtataataatcccaacagttcaaggtatggcagctgaaggatgcaagtttgttggtgtattatatgctggacttatgattgagaagaaatctggtctgcctaagcttatcgagtacaacgtacgattcggtgacccagaatgccaggttcttatgatgcgattagaatccgatctagcacaggttctgatgtctgcgtgcagaggggaactgggcgatgtttcactaacctggtcacctgaaatggcaatggtggttgtgatggcaagcgaaggataccccggatcttataagaaggggactgtaataagaaatctcgagaaggccgagcaggtctcgcccgcggtaaaaatattccatgctggaacagcactggatggggatggaaatcttgtcgctgtcggaggccgggtgctcgggatcacggctaagggcaaagacattgaggaagcacgggcaagagcatatgatgcagtagatgttgttgactggcctgaaggattcttcaggcgcgatattggttggagagcactgaagcacaagcaagtggccaattactgatgcggattttcctgagcacaccacaactatggtgagcatgtaatgttaagagcaataaagagaaaatttgtcacttctgtggttgaggaaaggcaaaaccatagctcaaatttgagttttttttttgtaccaactgttaaatttgagttgggcttgcattttgaggaacagccagatgaacaatgaccgagttttgacttccacaagtagagagagagcattgttcggtgcttaatatctacttccgttggttagtggtattaagggattccatatgtaagtcgttttagacttgtgcacaagaattaagataacaatctcaatgattttgtt

SEQ ID NO: 17361 - DNA, 1190 bp, Oryza sativa
  ref <308>: DATABASE ACCESSION NUMBER: AK067809
  ref <309>: DATABASE ENTRY DATE: 2001-12-06
gaaaaacgtacccttgtgactacacccgcttcgcttcctcccctctctaagccggggaagctaagccatggcgtccgtcaccgcccgcaccccggtcgcagccctccgctcgtcggcgtcgctcaagtctaccttcctagggcaatcctccacccgcctcgcccgcgcaccgactacgaggcgtaatgttcgggcggaggccaagggagagtggctccccggcctcccttctcccacctacctcaacggcagcttgccaggcgataacgggttcgacccgttgggtctggcggaggacccggagaacctgcggtggttcgtgcaggcggggctggtgaacgggcggtgggcgatgctgggggtggccgggatgctgctgcctgaggtgctgacgaagatcgggttgatcgacgcgccgcagtggtacgacgccggcaaggccacctacttcgcgtcgtcgtcgacgctgttcgtcatcgagttcatcctgttccactacgtggagatccggcggtggcaggacatcaagaaccctggctgcgtcaaccaggaccccatcttcaagagctacagcctcccgccgcacgagtgcggctaccccggcagcgtcttcaaccccctcaacttcgagcccaccctcgaggccaaggagaaggagctcgccaacgggaggctggcgatgctggcgttcttggggttcctggtgcagcacaacgtgacgcagaaggggcccttcgacaacctgctgcagcacctgtctgacccgtggcacaacaccatcatccagacgctgtcaggctgagcgtgtgatcgatttcatcagggccagggcatctcaaggagcttgatgagttcaggctggtgaaaccgatgattgggcgatggaagatgttctcttcttgtttcttctttttttttttgtggagtatgcatgtataaggtgttaatgaattggggggaggagagagagagagatggatgtgatgagattcagacttactgtgtgtgttgtggtaattgtttcctgcatgcatggatctggatgcatgggtgagggggtgagttgagtggtgaatttctgatgtacagtactacagggggataaactatctcatggtagcagcagtgttctagctatctcatggtctcgatcttaattatggtggataaactacgcttaattgcttgcc

SEQ ID NO: 17362 - DNA, 1755 bp, Oryza sativa
  ref <308>: DATABASE ACCESSION NUMBER: AK067810
  ref <309>: DATABASE ENTRY DATE: 2001-12-06
gcagcagcaagcagcgcacaagccccagcaccagcaagctgctactcatcatcagcgagagctagctagctgtgtgtgccacttacactgctgctgctgctggttctagctaagctcaccgatcgtcgtcttcgtcatcgccggtgacctggtgaattagtcgagagagatggcggcggcggtgacggtggaggaggtgaggagggcgcagagggcggaggggccggcgacggtgctggcgatcgggacggcgacgccggcgaactgcgtgtaccaggccgactacccggactactacttcaggatcaccaagagcgagcacatggtcgagctcaaggagaagttcaagaggatgtgtgacaagtcgcagatcaggaagaggtacatgcacctgacggaggagatcctgcaggagaaccccaacatgtgcgcgtacatggcgccgtcgctggacgcgcggcaggacatcgtcgtcgtcgaggtccccaagctggggaaggcggcggcgcagaaggcgatcaaggagtgggggcagccgcgctcccgcatcacccacctcgtcttctgcaccacctccggcgtcgacatgcccggcgccgactaccagctcgccaagatgctcggcctgaggcccaacgtgaaccgcctcatgatgtaccagtaggggtgcttcgccggcggcacggtgctccgcgtcgccaaggacctcgccgagaacaaccgcggcgcgcgcgtcctcgccgtgtgctccgagatcacggcggtgacgttccgggggccctccgagtcccacctcgactccatggtcgggcaggcgctgttcggcgacggcgcggcggcggtgatcgtcggctccgaccccgacgaggccgtcgagcggccgctgttccagatggtgtcggcgagccagaccatcctcccggacagcgagggcgccatcgacggccacctgagggaggtcgggctgacgttccacctgctcaaggacgtgccggggctcatctcgaagaacatcgagcgcgcgctgggcgacgcgttcacaccgctggggatctcggactggaactccatcttctgggtggcgcaccccggaggtccggcgatcctggaccaggtggaggcgaaggttgggctggacaaggagaggatgagggcgacgcgccacgtgctgtccgagtacggcaacatgtcgagcgcctgcgtgctcttcatcctcgacgagatgcgcaagcgctccgccgaggacggccacgccaccaccggcgagggcatggactggggcgtcctcttcggcttcggccccggcctcaccgttgagaccgtcgtcctccacagcgtccccatcaccgccggcgccgccgcctgagcgctccgccctggtcgccgccggccggcctacgtacgccacacgtcatcttttatcatcgatcataaaaaaaaattatatatatatcgatatcgatatatatatatttcctaataataactactactacaataacaacgttatcgaattaaaaagttattcccttttgccgtgtgttggtagggataaaaagtgaaaaaaaaaattattactttgttttgcatgtgtcatgtatgggtggtttggttggtagtagcatatatatgtatactgaaaagagaaagggaggtcaattaagtgtcatggatggtgaggtttattgtaaacctgtgtaagagatgcttggctgttactattcaatttgaaaacttaattaattttgtgtacct

SEQ ID NO: 17363 - DNA, 2594 bp, Oryza sativa
  ref <308>: DATABASE ACCESSION NUMBER: AK067811
  ref <309>: DATABASE ENTRY DATE: 2001-12-06
gaccatctccaccaccatcgctccgcttctcctctcccatctctcgcttcgctccgcttgcctagggtttcgcctcccgccggcagccgcgcccccgccgccctcgcctcagatcccgccgccggcgacccccccacgatcctcctcccccgccgcccgccgatcccgtcgagctccggttcggtgtttgctcccctactccgccgccgcgacgcctcgggcttgcagagtctgggcgggcgccgcggggggagtgcagatctagggtttgggggctctggctggtgcatgagaagggcactggagtacggacggcatggaggtggaggcggcgaggagggacgcggccacgctggacccggagctgctgcagctgccggagctctcgcctggcgcgctccgggagaaccccgcccttgctgaggcgctctactcgcagtggctcgcgctccccgagacatccaagctggtgaactctttgattgaagatgcaaaagctggtgctacattgaatgttactgggagctctgctagcacaaatgctgcttcaagtggttctttgccatcaatgtttccggctggtagtgctcctcccctttctcctagaagcacttctggctccccccgtgttatgaggcgaggatctggagctggaccatcatccttgggatctccactaaaagtagttagtgaaccagtgagggaggttataccccagttttacttcaaatatgggcgccctgctccaaaagatttgaaggagcaatgcttatctagaatagatcacctcttttttgcaggggagggactccagattcaagaatttagatcagtcacaaaagatatatgcaaacttccatcgttcttctccagtgttcttttcaagaagatcgatgctgcaggctctggaactgtcacaagggatgcgtttgttgattactggatcaatgataacaagattacaatggacacagctagccaaatctttgaaatattaagaaagccggattacaattatctcactcaggaggactttaagcctgtcttaaaagaacttctggcaactcaccctggattagagttcttgcaaggcacccctgagtttcaggagagatatgctgagactgtaatatacagaatcttttattccataaatagagctggaaatggccatcttaccctcagagagctaaaacgtgggaatttaattgctgcgatgcagcagctggatgaggaagaggatatcaataaagtgttgagatacttctcatacgagcacttttatgtgatatactgcaaattttgggagttggacacagatcatgattttttgattgataaagagaaccttatcagatatggaaatcattcattaacctaccgaatcgttgatagaatcttctcacaggtcccaagaaaattcacaagcatgacagaaggaaagatgggttatgaagattttgtttactttattttgtctgaggaagacaaatcatccgagcctagccttgaatactggtttaagtgtattgaccttgatggaaatggcattttaaccaccactgaaatgcaatttttctatgaggagcaattgcaccggatggagtgcatggcacaagaacctgtgctttttgaggacatattatgccagatgattgatatgattggaccagagaacgagtgctactttacactacgggacttaaaacggtgtaaactctcagggaatatattcaacatcctattcaatctcaacaaatttatggcatttgaaactcgtgatccattcctcattcgccaggaacgtgaaaatccaactttaaccgagtgggatcggttcgcacatagagagtatattagattgtccatggaagaagatggtgaagatgcttcaaatggaagtggtgatgtgtgggatgaatcgcttgaagctccattttgaaatatctcttgctggctgaatcttgtgggacatggatggaattggtttggaggtcaaagaaatgtaaagttgttcgctagcctgtggagaccattgcaggcttgaggaagtttcagtaacaccaaagacttcttacaggatttactgtgcaggtctgattcgatagtatcggttgtccagttgtgcaaaacatttttgcttggcaggagaaacgaggaagttgatgtgggcgtcctgccttgtcaaggcaacaacctcaacagtctcaagtgatgctatagtgggggacctttcatggtcaacatgtttctgtgttcttattggtgctttagggggggatgtcggtttattcaattgctgtgctcaaattttggagctgaactgttattgtttggctgccattttctttgttattttgtggaagtgcgagcaagcaattccatcattaactttgatcatggtatgtagctttctggttctgctttctgttcagtatggtgttttgtagctgttgccgtcactgggtacattttgggaggtaaggtaaaaagacctcaggatatggatatctgttgtcattacccatttgtaacattaacaagaaacggtggatgggtgcataagaaatttaaatgaggatgtaggttccatc

SEQ ID NO: 17364 - DNA, 1497 bp, Oryza sativa
  ref <308>: DATABASE ACCESSION NUMBER: AK067812
  ref <309>: DATABASE ENTRY DATE: 2001-12-06
gaaagaaaaaaagaaaaggaataaaaataaaaataaaaacgcgcggagagatagcgtcgtagcgtgcggtgcgcaggtggggtctcgtctcgtcgccggtgaagccgccgccatggagctcaccggcgccgccatccgggggtcgctggcgacggccgcgtccccggtggtgctgagggggagggggaggaggtgcgcggccagggtttcctgcgtcgggcgcggaggcgggggatttggcgatgaggggcacctcaggtactacgaggcgccgccgcggaaggcggtggaggcggtggcgagggacctggccaagctccgccccatggggatcgccgccggggacgcggccaaggagaaggtcctctcggaagccacagagctactgctggaggagttgaatcgaatgagggatgaggagggcgaactgaagaagaagatgaaggaggacaaggatgcaatgaaagcactcaagaagcagcagaaggaagcaatgaaggctgccacgacgatgaaatgcaatgatgatgactcctctgaatcaagtgaatcaagtgagagtgagtgtgaggagcagatgatgacaatgagctgcgttgccactgttaccatgccgcaaattggggaaggcgttgcgatctcaacgacagttccccaagttgctgcatccgatgtcgcaacagcaccagcaatggagtatgacaaggctgcaatgaaggccatgaagaagagagaaaaggaagagaagaaagccgcaaagatggctatgaagatgaagaagaaggaaaagaagatggccacattgactctctgcaaggatgaagacagcacctcatgctcctcagaatctagcgacagcgagtgcgaggaggttgtcagaatgagctgctgtgctacgataaccacaccacaaacacaaccctcgagcaccgttttccctataatactgccccagattccagaatcagtgacactggagccatgccaagatgctcagatctcatcagaacctgcaaatacaatgttgtccaccactgctaccattgcagtagttgagaagccgatgacgaacagaattgaggtctgcatgggaggcaaatgcaagaaatcgggctccctcgcggtgctgcaggagttcgagaagaaggtgggcactgatggtgcggtcgttggctgcaaatgcctggggaaatgcggtctaggcccgaatgtgcggctccggagcgaaggcgctgcacagaagaagaatccccttttcatcggagtagtgttagaggatgttggcaccatagcttcaggcttgtttggaggcggtgatgacctgggcatggtgaacaactagcccaacctttgccttacctatgatgatgtgtactgagcaatagtagtattacagcaaaaaagtatggtataatcacgcccctgctaaagttgatgtaacatatgaaccctatgtatgttgatccagaagagatgaatgtttcatgttggaaatcc

SEQ ID NO: 17365 - DNA, 2307 bp, Oryza sativa
  ref <308>: DATABASE ACCESSION NUMBER: AK067813
  ref <309>: DATABASE ENTRY DATE: 2001-12-06
ggccgtgccgcctgcctctgcgcatctggctggctatcttacctcccttttctgcgccgcgtcctcctctctctcctttcccctagggctctagctccaccgcctctcggccaccgccgctccccgccgccgccgccgacgacgcgcgagggagtgtggtgaggactgatgaacttctaaacattgggtatggatggatgtgactgcatcgagccactatggccaactgatgagctcctcatcaagtatcagtacatctcggacttcttcatagccctcgcatatttctcgatcccgttggaactaatttatttcgtgaagaagtcatccttcttcccatacagatgggttttgatccagtttggtgcatttatagtcctatgtggagcgactcatctcataaacctgtggactttcaccacacacacaaagactgttgctatggtcatgacagtcgcaaaggtttcaacggctgttgtgtcctgtgcgacagctttgatgcttgtacatattatccctgacttgctgagcgtgaaaacaagggaattgtttctgaagaataaagctgaacagcttgatagggagatgggcttgattaggacacaggaagagactgggaggcatgttaggatgcttacccatgaaatcagaagcactcttgatagacatacgattttgaagactacacttgttgagctaggagggaccttgggcctggaagaatgtgccctatggatgccatcaagaagcggttcaagtcttcagctttctcatactctccgccaccagattactgttgggtcaactgtatcaattaatcttcctgttgtcaatcaagtgttcagtagcaacagagcaattataataccccacacatctcctttggcacggatccgacctcttgcagggagatatgttccaccagaagtggctgcagtgcgagttcctcttctacatctttcaaactttcaaataaatgattggccagagctttcagcaaagagctatgcaatcatggttctgatgcttccatctgatagcgcaagaaaatggcatgtgcatgagttggagcttgttgaggtcgtggctgatcaggttgcagttgcactttctcatgcagctattcttgaagagtccatgcgtgcgcgtgatctgctaatggagcaaaatgttgctctggatttagctcgacgtgaggctgaaatggctatccgtgctcgtaatgatttcctggctgttatgaatcatgaaatgagaacaccaatgaatgcaataatagccctttcgtccttacttttggaaaccgaacttactcctgagcagcgcttgatggtggaaacagtcttgaaaagcagcaatcttttagcaacactcatcaatgatgtgttagatctttccaaacttgaggatggtagccttgaattggagattaaagcattcaatcttcatgctgttttcaaggaggtaatgagtttcatcaagccaatcgcagccatcaagagactgtctgtgtcagttatgttggcaccagacttgccattatgtgccatcggtgatgaaaagaggctaatgcaaactattttgaatatctctggcaatgctgttaagtttacaaaggagggccacatcacacttgtagcttctgttgtgaaggctgactctttaagagaattcagaaccccagattttcacccaactgcaagcgatgacaatttttatttgaaagttcagattaaagatacgggctgtggcattagccctcaggatctacctcaagtatttacaaagtttgctcaatctcagcctggaggaaacagaggatacagtggtagtggtcttggccttgccatttgcaagaggtttgttactttgatgggagggcacatctggttggatagcgaaggaacaggaagaggctgcacagtaacgtttgtcatccagcttggcatatgcgataatacgaatgcatatcagcagaagctgattcctctagtctggccaagcagtggggatgctgattttgttggtccggtgccaaatgctcctaatgaagagaaaggtcaggcttctctgaaatctcggtatcagagaagtatatgagctactgtaaattgatcgacggcattgtatcaagtagggcctggttagtttgtctctaattttgtgcctagccttgtgatagctggaatatatttgtacaaataatgtacagcagatgggactgcataatgcagctatgcacctgggtacaactctaacttgcgtagtgtcctgtcagcgaaatgtgtattctgggctgttcgtgtg

SEQ ID NO: 17366 - DNA, 4485 bp, Oryza sativa
  ref <308>: DATABASE ACCESSION NUMBER: AK067814
  ref <309>: DATABASE ENTRY DATE: 2001-12-06
ggcactactactactacttctgcttcactctctctctctccccgatcccaatctcggagagagagacgtcctcatccatccatcccatccactcgagttgatcgatcgcccggacgccgccgcaggggccatggggtcgctcaccagggcggaggaggaggagacggcggcggccgaggagtggtcgggcgaggcggtcgtctacgtcaacggcgtccgccgcgtgctccccgacggcctcgctcacctcaccctgctccaatacctcagagacattggtcttcctggaacaaagcttggatgtggtgaaggtggctgtggagcctgcactgtgatggtctcatgctatgatcaaactacaaagaagacacagcattttgcaatcaacgcatgcttggctccgctttattctgtggaaggaatgcacataatcacagtagagggaattgggaatcgtcagcgaggtttgcacccaatccaggaacgtttagccatggcccacggttcacaatgtggattttgcacccctggttttgtgatgtcgatgtatgcattgctgagatcaagtgaacagcctcctactgaagagcagattgaagatagccttgcaggaaatttatgtcgctgtactggctacagaccaataatagacgccttccgtgttttctcgaaaagagatgatcttttgtacaacaattcatctctgaaaaatgcagatggccgacctatctgcccttcaacaggaaaaccatgttcctgcggagatcagaaagacatcaatggtagtgaatcttcattattgacacctacgaaaagctactcaccttgttcatacaatgagattgatggaaatgcgtacagtgagaaagaactcattttccccccagaacttcagttgagaaaagttacgtcacttaaattgaatgggtttaatgggattcggtggtatagacctcttaaactaaagcaagtattgcatttgaaagcatgctacccaaatgcaaaactaatcattggtaactctgaagtaggagttgaaacaaagttcaagaatgcccagtataaggtcttgatctcagttactcatgttccagagcttcatacccttaaagtgaaagaggatggtatacatattggttcttctgtaagacttgcacagctccaaaatttcctcagaaaggttattttagagcgtgattcacatgaaatttcatcctgtgaggcaatactgcggcaattaaaatggtttgctgggacacaaatcaggaatgttgcttctgttggaggtaacatttgtactgctagtccaatatcagatctaaatccactttggatggctacaggtgcaacgtttgagataattgatgtgaacaataatattaggaccattcctgcaaaagatttttttctgggttatcgtaaagttgacttaaaacctgatgagatattgctctctgttatactgccatggacaaggccatttgaatttgtcaaagaattcaagcaggcacatagaagggaggatgacattgcgttggtgaatgctggaatgcgtgtctatataagaaaagttgaaggtgattggataatttcggatgtttcaattatctatggaggggtagctgcagtttcacaccgtgcttcaaaaactgaaacctttctcactggaaaaaaatgggactatggattgttggataagacttttgatctgttgaaagaagacgtagttctggctgaaaatgcacctggtggaatggttgaatttcgcagttcacttactttgagtttctttttcaaatttttccttcatgttactcatgaaatgaatataaaaggattttggaaggatggattacatgcaaccaatctttcagccatacagtctttcactagacctgtcggtgttggaactcaatgttatgaattggttagacaaggaactgcagttggccaacctgtggttcacacatcagctatgcttcaggttactggtgaagcggaatatactgatgacacaccgacaccccccaataccttgcatgctgctctggtgctgagtacgaaagctcacgcacgcatattatctattgatgcttcacttgccaaatcttcccctgggtttgcgggtctcttcctttcaaaagacgtgcctggcgctaaccatactgggcctgttatccatgacgaggaggtttttgcatctgatgttgttacatgtgttggccagattgttggacttgttgtggcagatacccgtgataatgcaaaagctgctgcaaataaagtcaatattgagtattctgaacttccagcaattttatccatagaggaagctgtgaaagctggtagctttcatccaaatagcaagagatgcctagtaaaaggtaatgttgaacaatgttttctgtcgggtgcatgcgatagaattatagaaggaaaagtacaagttggaggtcaagagcacttctacatggagcctcagagcactcttgtatggccagttgattctggaaatgaaattcatatgatttcatctacccaggctccccagaagcaccaaaagtatgttgctaatgttcttggtcttccacaatcaagagttgtttgcaagactaagcgtattggtggtggatttggtggaaaagaaaccagatcagcaatatttgctgcagcagcatctgtagctgcttattgtttaaggcagcctgtaaagcttgttttggacagggatattgacatgatgacaactggacagaggcacagtttcctagggaagtacaaggtgggatttaccgatgatgggaagatattggccttagaccttgatgtttataacaatggtggtcattcacatgatttgtcccttccagtcctggagcgtgctatgtttcattcagacaatgtctatgatataccaaatgtcagagtcaatgggcaagtatgtttcacaaatttcccaagcaatactgctttcagaggttttggtggtccacaagctatgctgattgcagagaattggattcagcacatggctacagaactcaagcgaagtcctgaggagataaaagaacttaattttcaaagtgagggatctgtgcttcattatggccagttgcttcaaaattgtacaatacattcagtatgggatgaactaaaggtttcttgtaattttatggaagctcgcaaagctgtaattgattttaacaataataaccgttggagaaagcgtggcattgctatggttcccaccaagtttgggatatccttcactacaaaattcatgaatcaggctggtgctttagtgcaagtttacactgatggaactgtccttgtaacgcatggtggggttgaaatggggcagggtttacacacaaaggtagcccaagttgcggcttcatcattcaatatccctcttagctctatatttatctcagaaacaagcactgataaggtaccaaatgcaacaccaacagcagcctctgctagttcagatttatatggtgctgcagttttggatgcttgtcagcaaattatggctcggatggaacctgttgcttcaagaggaaaccacaagtcctttgctgagttggttctagcatgctacctggaaaggatagatctctctgctcatggattttatatcactcctgatgttgggtttgactgggtgtctggcaagggaactccattctactatttcacatacggagcagcatttgcagaagttgaaattgataccctaactggggatttccacacaaggacagtagatattgttatggatcttggctgttcaattaatccggctattgatattggccagattgaaggaggttttatccaaggattaggttgggcggccctggaagaactaaaatggggggatgataaccacaagtggattcgacctggacatcttttcacttgtgggcctggctcttacaaaataccctctgtaaatgatatacctctaaacttcaaggtctcacttttgaaggacgttttgaatccaaaggtcattcactcatccaaggctgtaggagagccaccgtttttcctcggttcagccgtcttgtttgccataaaggatgcgatatctgccgcaagagctgaggagggtcacttcgactggttcccactcgacagcccagcaacaccggaaagaataagaatggcatgcgtggattccatcacaaagaaatttgctagcgtatattaccgtcccaagcttagtgtatagtggctactgccaaagtacaagggtcattaaaggtttatgcttgtcgtacgtatatttgtacagtcccaagctactgtgtaaacataaatataggcgacagtttaggggataaaaagttaccttttcctcttcttttttaccccccaggaagaaaacactagaaataaaagcaatgttcacatcgacttgctgtctagctgtgtactggaatagaagtgcagggctcagcccaatggcgtgttctc

SEQ ID NO: 17367 - DNA, 3020 bp, Oryza sativa
  ref <308>: DATABASE ACCESSION NUMBER: AK067815
  ref <309>: DATABASE ENTRY DATE: 2001-12-06
ttgggagagagagagagagcttcgcaggcgacgatggcgagcggcggcgtggtgaagaaggagatcggcgggaaccacgacgtcgtccgcttcggcgtcaacgacagcgtcaagggggacctcgcgccgccgcacccgctccaggccagcgtccacaaggaggccaagttctgggcggacaagaagaggttcggcgcggaagccatctacggatccgccttcaacatccgcaaggatcttgatgcccaaatcctctccaagttccaaaggccccctggtgcattgccgtcatctatgctaggatatgaggcactgactggttccttagatgattttgggtttgaagattatcttaactaagaagaaaaataaggattcaagcaccaagaagcagccggcgagggaggccgctgctgcgaacagcgagtcgagggcgatggtggcggagagggagaaggaatacgaccggctgtctaagttcctcgtggtctacctcaatgctatttgagacgctgcggcctccgaggatggctgggtcctgggacgtggagctctggaattgctgctcggcggcaccgcctacacacaagcgacaagtgcgccacaaatctctctctcgatgcagcaagtgcagcggagggagctgcaactggtcgccgtttctgccatgctgatagattgcaagtacgaggagatttgggccccagaggtgaacgacttcatcttcatatcagatagtgcatacactagggaacagattcttgcaatggagaaggggattctgaataagcttcagtggaatctcaccattcctacaccatatgtcttcattatgatgctatctgcgtctgcagataacaaaagtgacaaggaggtaaagagccatggcttttgtttgtttctgtttaccaccagattatatttcattgctaagcgacaagtttaagcgtgtactcaagatttcttttggtgaatgctgatggagcacatggccttcttcttcgctgaattggcactgatgcagtacgggctggtggcatatgcctctgctgtctatgcagccaggcccaatcctcgtcatttctatatatgaagaaattgctggatccatcctctcggctaactaggacgttgttccactagatctccattattcctagtgcaggtttatttggattacataatcccctatcggtttagttccctttattgttgaacaattggagataatatctttcacgataattcgtaccactgagcaaaattcaatgatgcaattattttatatgcaactcatttggtgaacaagatgtatcttgtggcaaacaacgagatgaaaagttacttgatccttcaggcatacctgtgattttccaatctattctttgcgcgttcttggaaagattggttgtccctgatagctgtccgtagtgattcatggatactgtgtggcattttactttggggctcattttggatttgataaagaagtcaggtttcaaaggagcatgggggtttcatgagatttatccaggtttcttgcctaggagcatcggcctcttcttctagaatgctgagggccaaggctgctggggaagaatctgtgttgaaggaatttcctgaggctacaattatgaggcctgcaactatgattggcacagaagatcggattttgaaaagatgggtacagtttgctaaaaattgattcccggtctacaaagattcagcctgtttatgttgtggatgttgctgctgctattgtcaactccctcaaggatgatggcaccagcatgggaaagagctacggacttggtggaccagagatttatactgttcatgatctggctgagctgatgtatgagacaatatgtgaatggccacggtacatcgatgttcctcttcctattgcaagggtatgaacttaaataatatcttgtgttggtcaaggcgaatggccacggtacatcgatgttcctcttcctgttgcaagggctatcgcatctcctgaaagctgatagattgggatttttttttttcaatactctaagcctctaatgaaaggtttgggtccaaagtatgctttcgcaaccaagtgatgaaaaaaaaaaacaatctggttggggatgtcaattggttggttcatacaactgacagtgtcatcacgttgtgggatcctggtaataatatcacatttgttggtatgattaaagaggcactatttagtggagctattcaaggcaaaagaataaataagatcctatcgtcttcaacgtggtgctatcatccttggtcatcagggaaaactcagaagaccatgaaccactccggccactcatagacagtggtggtgaacagcgtggcattcatgacaatagagataggcaatggctgaggcagaaagttaatgctacacgggagctagctagctactactactccagaagatactgattcctagcgggcatgtggagttgtactactagttaattaatggggcatgttcaattaatgttggtcgctgtgtgaagtggatcggagtagtagtatttatatgggcacccagcaggcaggggagggatcaaaatcgagcgcacacgtactgtacttactgccagccactaacaagagtcagacaatggactcaaagaaggtcgcgtatgctgtttttatcgtcattctcctaatgacggaggtagcggccgccgctgccgctggaggcagcgcccgtgggactggtggtacaggtcacattaaagagtgcgtcaaccacgtcgaaaaccagtgtggctgggctccggcgcctggatgcctgaaagaggcattagccacatgcgccaaataaggcgcccgctgcttcgcttcctctggcggtctggcccctctccgcataaataattgtaataaggggtcctagtgaatatatatatatatatatatgtggtactcactgcagtgagtatgtattatgtactacttattatatagtaataaaatttgaataaagtaatatttgagcctgc

SEQ ID NO: 17368 - DNA, 2314 bp, Oryza sativa
  ref <308>: DATABASE ACCESSION NUMBER: AK067816
  ref <309>: DATABASE ENTRY DATE: 2001-12-06
ggttgccgcgccgcagttgcagttgcagttgggaggcaaatctctctcccaacccttatcaaaccctaaaccgaaaaaatttaccccccaaaaaaatccgcaaaaacaaaaaaaacccaaatcggagatggcggcggcggcggcgcaggcgcaagcgcagcaggcggcgagctccgcgtccgagggcgggtccccggcctcctccgccgcggccgctgcggcggcggccgcctccttcccggcgacctcgctctacgtcggggatctcgacgtcagcgtgcaggacgcgcagctcttcgacgtcttcgcgcaggtcggcggcgtcgtctccgtgcgcgtctgcagggacgtcaacacgcggaggtcgctcggctacgcctacgtcaactacagcagccccgccgatgctgcacgagcgttggaaatgctcaacttcactcctatcaatggaaaacctatcaggatcatgtattctaaccgtgaccccagcttgcgcaagagtggcacagcaaatatttttatcaagaaccttgataagtcgatagacaacaaagctttgtatgatactttctgtgtgtttggaaacattctttcatgtaaagttgcaacagatgcttctggagaatcgaagggctatggctttgttcagtatgagcgggatgaggcagctcaagctgctattgataaactcaatggcatgcttatgaatgacaaaaaggtgtatgttgggcctttcattcgtaagcaggagagggataattctccaggccaggtcaagttcaataatgtctatgtaaagaacctgtctgagaatactactgaagatgacttgaaggaaatctttggaaaatttggaaccatcactagcgctgttgtaatgcgtgagggagatggaagatccaagtgttttggatttgttaactttgaaagtccagatgatgctgctcaggctgtccaagagctgaatggcaagaagtttgatgataaggaatggtatgttggaagggcacaaaagaaatcggaaagagagatggaattgaaagagaaatttgagaagaaccttcaagaagcagcagataagtatcaaaacactaacctgtacctgaagaacttggatgatagtgttgatgatgataagttgagggagctttttgctgagtatggcactattacttcctgcaaggtgatgcgggattcaaatggtgtcagcagaggttctggatttgttgcgtttaaatctgctgaagatgcttcccgagctcttgccgaaatgaacagcaagatggttggcagcaaaccgctctacgttgcgcttgcacagcgcaaggaagacaggaaagcaaggctgcaggcacaattttcacaactgaggcctgtcccacttgctccttcagttggtcctcgcatgcccatgtttccacctggtgttcctggagttggacagcaactgttctatggtcagccccctccagcgtttatcaacacacagcctggtttcggcttccagcagcctcttatgcctgggatgaggccaggtgcaggtccaatgccgaactttatcatgcctatggttcagcaaggacaacagccgcagcgtccggctggtaggcgtgctggtgctggtggaatgcagcaacccatgccaatgggtcagcaacagatgatggctaggggcggccgtggctatcggtatcctacaggacgtggcatgcctgatcctgcaatgcatggtgttgggggtggtgtgatgccatctccatatgagatgggaggcatgcccatgagagatgctgctgcgtcacagcctgtacctattggagcattggctactgcactggccaacgcagcccctgatcagcaaagaatgatgcttggtgagaacttgtatcctcttgttgatcagctggagcatgagcaggctgcgaaggtgactggcatgctgctggagatggaccagactgaggtgctgcacctgctcgagtctccagaggctctcaaggccaaggttgctgaagccatggaggtccttcgcacggcccagcagatccagacgaacgcgacgcctgaacagcagcttgcttctctgtcgctgaatgacggcgtcgtttcctcctaagcataacgacgacagcaatttttgatccatatctcagttatcttatctatctagaattgaaaacgacttggttacttggtttattggagttttagttttattggtagttgaactaggcatttaggcaatgcgcgtggattgggtattttgtttgctcggatcttttattttgctttataagttatcatatggattgct

SEQ ID NO: 17369 - DNA, 778 bp, Oryza sativa
  ref <308>: DATABASE ACCESSION NUMBER: AK067817
  ref <309>: DATABASE ENTRY DATE: 2001-12-06
gagcttgctgctgctgcattcttcttgatctgatcgtcggacatggcgtcgcccatgctctccgccgccaccgtgccactccagggaggcggcttgtcggagttctccggcctgaggagctcgtcgtcgctgccgctgcggcggaatgccacctccgacgacttcatgaacgcggtctccttcaggacccacgcggttggcacgagcggcggggcgcggcgggcgccgacggaggcgttccgcgacagcgccgccaacgagctcaagggcatcctcgaggtctgcgacgtgccgctcgtgtccgtcgacttcaggtgctccgacgtgtcgtgcaccatcgacgcgtcgctcagcatggtcatgggcgacgacatggtgaaggtcatcgcctggtacgacaacgagtggggatactcgcagagggtcgtcgacctcgccgacatcgtcgccaaccagtggaagtgagaacgtagaagctgctgctgctgctgcctttgtaactccacctcgctccaaaaattttccccagacttcttccttcttcctctcgatcctttgtaatgagaatttcgaagtttcgagcgcccaacacagtttcttgtttctttctttgcttttcttccccacctcatctgacttttcactgtccggcacggattattatcgacttccggcaattggaaatcgcaatgctgtgtaatgttcatgtgtaataccgtatatactaccggacaccggttgccaggttctggtatagaatttcagcatgttgcttggg

SEQ ID NO: 17370 - DNA, 3823 bp, Oryza sativa
  ref <308>: DATABASE ACCESSION NUMBER: AK067818
  ref <309>: DATABASE ENTRY DATE: 2001-12-06
acttgtagttttctttcttgtttaaggtttgctggctagcaaggataaggttgagcggaacagaatatggtgttctactatgccctctacgtgtttgagaaaatgacagtatgatgaatgcaagtgtgaacaatccaaataacccactgatcccttgaaaaccaggaccatgaaaggagtaaattaagccaacgggtggatagtccattgataaaccgcctgcccaaggtaagtctgtcagacatggtgtcttcactgacattgtcacacaggccagctaggaggaagagttccagctcccttccagttccaggacgttgttccagcactgttgaattacacctgagtgtaaagaagatcgacaaagatggcagttgtagcaggggcgatgactgccctcattgccaagttgactaccctgctgatggaccaatacaagctgcagaacagtgcgaggggcgacatcatatttattaaagccgagcttgagagcattcaggctgcccttgagaagttgtttgaggtgcaggtaactgatcgccaggttaagatttgggagagggatgtgagagagcagtcgtacgacatggaggatatcatcgacaatttcatggttcatgtcgaaacccatttgctagccaagccacatgaactcaaaggattcatgaagggaagtttgagcttgttgagaagagcaatggttcgctatcgtgttgctaccgacatcaaacgtatcaggaggcttgtcaatgagacgagtgcacgccgtgataggtataaggttggtactattgttgctgctgccaagactgagaccgcaattgatccccgtttaattggtatctatggagaggctactaaacttattggcataagtggacctaaggaagaattgaccaagccgctgatggattccaagggcaactcaaagaataaactgaaagtgatctccatcgttggagttggtggtttaggcaagacaactcttgctaatgtcatttatcaacagcttagaggacaattcgagtgtcatgcttttgtttcagtatccttaaagcctgatctaaagaaggtcctgagcagcatactccgtcaattcagtgaacaaggttatgcttggacagaaacatggtgtgctcaggaaatcatcaacaaaatcagagatgaaattaaggaaaagaggtacttgattgtaattgatgatatatgggagaaatcagcatgggaatgcatcgagtgtgctttaatagaaaatgaccgtggaagcagaataatcacaacaagcagagtgcttgatgctgccacgccatgctcttctgaggttgatcataccgtttacaagctgcagccactttctagtgataactcaaagaaattgttctacaaaaggatattctactgtgaagatggttgtccattggaactgaaggatatatctgaaaaaactttaagaaagtgtgagggagtcccgttagccataatcaccataggcagtttattggccatgagaccacaaaatttataccaatgggatagggtacacaatttaattggttctggacttgagaaaagccatcatgtggagaatatgcggcacatattgtctattagttattatgatttgccagcccatttaagagcttgcttcctatatctaagtatatatccagaggattacaatatacagaaagatcaactgatacgcagatggatttctgaagggtttatacttggagaagatatggatactttgcatgaaggaggtaaatacttcaatgagctaataaatagaagcatgattcaaccagcatacatcgacagtcatggaagggtgcatgcttgtcgtgttcatgatatggtgcttgatcttatcacatcattgtcaaatgaaacaaattttgtgacatcattaggtggtcagcagcccacatatcatccaaacagggctcgccggttatgccttcaaaacagcatatatgaccatacgatacgacaggagaaaatgaagtggccccgcgtgaggtcactaatcgtattccctcatgctaccaacttgttgccatccctttcgagattccgtattttgcgcgtactggatttagaaggttgtcaagacttgaagaatcaccaaattgagggtatcagtgatttgtttcatttgaggtctctagtactgaaggatacaaatattggtagtctccccaaaaagattggcaacctaagttgtttacatacactggacataaggcacactatcataactgaacttccatcaacagtcgttcatctaagaagactggtgcgcctactaattgatgcatcggtgaagttacctgatggaattgggaaaatggaatgcttacaggaaatatcactggttggtattagcaagtctccaaactttttgaaggagctagggagtttgacagaactaagaatactcaagatttcagagagtactggtgcgtggcatgatagttatgagaatactttgattgattctttgtgcaacctgcacaaaatctgtgacctgtacatccatggctgtaaactgtccacagagttcatatcaaatataagatgctctccgcgatatctccgatatctttcatgtggccaattatccatattgccaaggtggatcaattcatccttattgtccctctccaccatagatttgatacttaatgtactccgacaggatgatcttcgtagtcttggtgccttacaatctctatgttgtctccgtcttaatgtgttcaaaattgaaccagaaaggttggttgttggcactgagcatgcaaagttccactggctagctgagttttcgtttaccactaatgccatggggcttatatttagccaatattctatgccaaggcttgaaaaccttgagctagcttttaatgttcgagagacaaagtattttgatattggcttggagcacctgtcctctcttaaggatgtcactgcaagaattgattgcagggattccagtatttttgaggtgcaaaatgcagatgctgccattcggaggattgcatatatgaactccaaccaacctaaggttcatgtgatcaggcattatgaacacatgttaatggatgaggtgaagatccagaaggaaacggaggaggaaaaggagatattggaaaataggattggtccatggggtggaaatggtggggtcacttgtgacatcaaggttgcacccaaacgcttggaaagcattactatttgtagcggcataatcatcgatgcacttgcattttcttacttggacaaagatggagagcgacacacgactagtttatggggtggtcttggtggtagtgttcaactgattgatcttgatgaaagagagtttcttatggaggttattggaactgtgggtccattcaatgtgttatctgaggctataacatcacttacacttgtgaccaatgtacgtagctatgggccttttggacaaccacagggtactcctttccgtactccacggaagaaaaacagttgtatcgtgggattctttgggcgttcaggaacatatcttgatgcagttggggtctattttcaccctatgtagatctcagcaaagcgcgaaatcctttaaccaaacttgtagtttatattcacattgtgtcgaatattttcttttgtttctttacatttcctgatattatggtcggactactcgtatttcaattcttgtgatctgttttcctttcacctgtttttttttctcagttgttcaaataacatcaaaagttgttttagcttcatatgtagtgcgctgcagtaaaatgatcacgtcattatggac

SEQ ID NO: 17371 - DNA, 2257 bp, Oryza sativa
  ref <308>: DATABASE ACCESSION NUMBER: AK067819
  ref <309>: DATABASE ENTRY DATE: 2001-12-06
gagttcgggtccatattttccttgctaccaacatcaaccggctgttcttccatgcatgagctagtttgagttagctatcttgatctacaactcaagcacaaatggcagaagcaattattcttgctctatcaaagattaatagtacttttggattggatcccacaaatattgccaaatctgcagtatccaagctatatcagaaaggaaagagtttggcggagttaccggggaaggttgaagaaataagaatggaactaacaacaatggaaaatgtcatagaacaactagatacagcacatctcactgacaaagttatcaagggttggattgcggaggtacgaaagctggcctaccatgttgaggatgtaatggacaaatactcatatcatgctcttcaaatggaggaagaagggttcctgaaaaagtacgttgtcaaaggatcacattatgccattgttttcgatggaattgttgctgagatagtccagattgagcaggaaatccaaagagttataaagctgaaagataaatggctgcaaccatcccagcttatccgtaataaacattctgattttgaaagaaagcggtcacaaggctgcttgccagagctcgtgaaggatgaagatcttgtggggatcgaaggcaacaggatgttattgactggatggttgtactcaaatgaactagatagcacagtgataatagtatctggcatgggtggattaggaaaaactaccattgttgccaatgtgtatgagcgtgggaagatcaggttccatgctcatgcttggattgtcgtgtcacagacctatgacgtagaagaattgctgaggaaggtactcaggaagattggatatgcagatcaagcacacttggatggtatggatgttcatgacttaaaagagaagttcaaagaaaacataagtgatagaaggtgtttgatagtgttggatgatgtctgggatagagaagcatacaaccaaatacatgatgccttccaaaatctccaggcaagccgcatcatcatcactacacggagtaagcatgtggcagcactagctctaccaacacgtcaccttaaactccaacctttggacaaggtcgatgcattcagtctcttctgcagaagggctttttatagcaggaaggactacgattgcccctcagaacttctagagttggctaattcaatcgtcgataggtgtcaaggcctacctctagctatcgtatctattgggagcctgttgtcctcaaagcagccgatacagcatgcttggaagcaaacatacaatcagctacagagcgagctagcaaagagtgatcatgtacaagcaattctgaacctaagctactatgacttaccaggagacctcagtaactgctttttgtattgcagcatgttccctgaggattgccccatgccacgagacaaccttgtacgactttgggttgctgaaggatttgctgcaagaaaagaaaacaacacgccagaagacgtggctgaaggaaatctcaatgaactgatcaaccggaatatgctggaagtggtagagacagatgaacttggtagggttagtacctgtaagatgcatgacattatgcgtgatctagctctttttgtggctaaagatgagagatttggttcagcaaatgattctggcacaatgatgctgatggataatgaagtccgccgcttgtcaatgtgtcgttgggaggacaaaggtgtctataaagctaaatttcctcgccttcgaacattaatatcagttcaaacaatttcatcctcctctaacatgttgtcctcaattttctctgaatccacctacctcactgtccttgagctgcaagattctgaaatcactgaagtgccaacaagtatagggaatctgtttaacctaagatatatcggcttaaggcgcaccaaagtcaagtcatttccagagacaattgagaaactctataatctccacactctagacatcaagcagacaaaaatagagaagctaccacgagggattgtcaaggtcaggaagctacgacaccttttagctgacaaatgtgctgatgagaagcattcagatttccggtacttcactggagttcaacctccgaaagagctatccaacttagaagagttgcagacactcgaaactgtggaagccagcaaagatttggccgagcagctgaagaaacttacgcaactgtgaagcgtgtggattgacaacataactgatgttgattgtgcagttcttttttc

SEQ ID NO: 17372 - DNA, 793 bp, Oryza sativa
  ref <308>: DATABASE ACCESSION NUMBER: AK067820
  ref <309>: DATABASE ENTRY DATE: 2001-12-06
gaattggtctctcgttgggctaacgacgcggcgatcgagtagcttagctagctgaagctgccacatgaagatcgggtgcgacgcgtgcgagcaggcggaggcggcggtgctgtgctgcgccgacgaggccgcgctctgccgccgctgcgacgccgccgtccactccgccaacaggctcgccggcaagcacacccgcgtcgcgctcctcctcccctcctcctcctccgccgccgccggcgacgacgaccaccaccccacctgcgacatctgccaggagaagacgggctacttcttctgcctcgaggaccgcgccctgctctgccggagctgcgacgtcgccgtccacaccgccactgcgcacgccgccgcccaccgccgcttcctcatcaccggcgtccgcatcggcggcagcgtcgacgccgccgccgcggccgacgtcatcgtcagcccaacaagcagcagcatcgcgccggccggctcggccagcagcaaccacgccggcgccgccggcaacaacaatggccggtcgccggcgccggtgaggttctcagggggagacggcggcgttgagccggagcagcagtggccgtggagtgacgtcttcgccgccgacgacgacgatgacgtcagcgccgccatggagcagtgctactatcatggcatctctgaacctcactcctccagcctcactggatgatggcagcttagcttcagtcaaattaattaatgagctgctataattgatttccatgaactgatcccacagaggtcatcaacatcgagaatattagtt

SEQ ID NO: 17373 - DNA, 2177 bp, Oryza sativa
  ref <308>: DATABASE ACCESSION NUMBER: AK067821
  ref <309>: DATABASE ENTRY DATE: 2001-12-06
aagtgatgaagtaacccactcctcgaaggcttgtgttccgccgcgtcgccgtcgcaaccgaatcgcatcgcatcgcatcggtccaaactcccaaccggcgacggcgaggccgacgaaacccaaacccagctaagcttccctcttcgattccccccatggccgacgacggcgacgccgtcctctccgacgtcgacgaggaggaccctctcccgcccccgccccctccctccacctcctcctcccaaaaatccccatctccttcacaaccccaaccccaaccccatgcgcaggcgcagcgcctgcacgacctggccgccgagctggaggaggagcgccgcctccgccgcaaggccgaggaatccctcgccgaggccgagaagcgctccgaacgcgtcaaggccttagcgcagaacgtcctccgcaagcacgacgacctcaagaccgaggcctccaccgcctcctccatgctcacttccggcttcgagaggatctccgccaaggcctccccctccgccgccgcctcgcccgcgccgctccccacttcccaaaagtactcctccggcctccccgccatcgcctacggcgtcctcaagcgcgccaacgacatcgtcgatgacctcctctcccagatcgacgccgccaaccgcgaccgcgacagggcgcgcgagcagatggagcaccgcaactaccagatcgccatcgaggtctccgagctcgaggcgtccctcgcgtccaggtccgcccactgcgactccctctccaagtccctctccgacaaggacgccgagatctcggacctccggaacaacctcgccttcctggagaccaagctggacgcgcagaggcccgtgctcgccgaccagatcgcctgcgcctccaaggtgtacgacgagatacgtgaggtggtcaagctagtggacgcggatgccgcgagcgcgctctctgactcggtgttcgtctggaaggagaccgacgtggaggagagcctcaaggtgtccctggaagggaccaagatggcgtacgatctcgctaccactgccctgcacaaggttggggcatgggttgataaaaaggaaagcaaagtgagggatttggaagcgagggtggatgagctattgcgggagaaagagcacattggggtgttgctccgcagcgcgctgcaatcaaacaccagcgaggtgctcaaggttgctgaggatggactaagggaggccggaattgaggttgggctcaaagagcgcagggagcacaggccagggagcatggagaaagatgaagtctataccctagcaggggaattggagaatagcatgaaggagtcccaagttaagattgttgagctgcaacatcttgttgaagcactaagggcggagtctggtctacttcggacaagactggaagggcaagaaaaagagattgcccagctacggaagcaaataaagcatcttgaagagaaggaaagggtggcaaatgaaagtgttgagggtctgatgatggatgtaacagctgctgaagaggagatcaaaagatggaagatggcagcagaggaagaagctgaagctggtaaagcaattgagcaagagtttgaaactcagctatcttccctaaacaaggaattagacgaagctaaacaggcaatgctggagctagagaacaaactgaagttcaaggaagagacagcggctgcagcaatggcggcacgtgatgccgcagagaaatcattgaaactagcggatatgagatcaaccaggctgcgagagagactggaagagatcaataggcagctcgaagaatcagacaacagaagggactcgagcaatcgcaacgggcataggtatatgtgctggccatggcaatggttggggctgaactatgtgcgattgccaccgacagaggcagatcaaacctccaacgagatggagctatctgaacctctgatatagttgtgccatatctatacagattgaagaaatacacgacattttgaaaggaaaaaaaaaacgtgagaaggagatttcattttttttaatttgtgtagatgttcgggaaaattgttaatgcttgtgcaaaaactcacgagggtgttagatgcggcggtgcaattgtaaaatcatgcagttgggattatagttaagctgtcaataagttcatctttaaacaaaagtggagtaatttct

SEQ ID NO: 17374 - DNA, 1538 bp, Oryza sativa
  ref <308>: DATABASE ACCESSION NUMBER: AK067822
  ref <309>: DATABASE ENTRY DATE: 2001-12-06
gcccccaaaattccacaacaaaaaaacacccccaaaaaagatcaaaaaaccctaacctccgatcgaatcatcgccaccctccgccgccgccgccgcccgccgtctccggccatgtccccgtcaatcgccgcctcccaggatcgcgtctcccggtgattactcccccgcgccctcgtctccattttcttgtgctggtatgagggccgccgccgcccccgatccgtccccggcgccggcgaggtcgatgctgaagcggctgttcgatcgccagctgctgcgcgtctcccccgccgagcggattgtggcggtgggcgggggggagaaggatgaggtggagccgagctccgtgtgcctggatggcatggtgcgcagcttcttggaggacgggagcggcgtgggcgcggctgtcgagcgggctggcggccatggcgcgcggcgctgcaactgcttccatggcggcgggagctccgacgacgacgacgacgaggacgacgccgccgcgtcctccgacgtcgccgagacgatcaaggggctcgtgcactgcgccacgctccgggagcgcaacctcctcgccgacgtctgcggccacgtggagcggcaccgggcgggcggggcaaggaggcgggagctcctcggcctggtggcggcgtcgctccgcgcggcggggcacgacgccgccgtgtgcgtctcccgctgggacaagtcccccacccaccccgccggcgagcacgcctacgtcgacgtgctcctcccgccggcctccgaccgcggcgcgcgcgagcgcgtcctggtcgacgtcgacttccgctccgccttcgaggtcgcccgccccaccaaggcctaccgcgcgctgctgcagcgcctccccgcggtgttcgtcggcaaggacgaccgcctccgcctcctcgtcgccgcctccgccgacgccgcgcgcgccagcctcaggaagcgcggcctccacctcccgccatggcgcaagcccgagtacatgcgcgccaagtggctgtccccctacgaccgcgagccagcgccgcccgacgaggcctccgcctccgccgccgcggccgaggtcgctggagaggaagcccccgccgccgcgtaaacaagaggtgccgcttggaattttcaaccttcaggagggcctaaatgcaaagttaaatttcttcgattttaacacttttttttggggaatctcgagtattttggggagtgagaagagtatgtattacgcgaaatggagacagcaatatgtagtgtagttttagtattaggaggaaacaagaagtacaaaaaaaaagaagaaatcttttggttaggatcagatcaggttagcatccacttttggtcccaaattaagcctataatatttcataagtagtagtactagctagaagcttgatcatgatagtatggtgagattatggccattaggctcctgtttgttttcatttttgtaagcaaaatgttgcccagcagacaagttgaggcgagagatgagtacatcatacacggagcttttgattttgatttggattttg

SEQ ID NO: 17375 - DNA, 855 bp, Oryza sativa
  ref <308>: DATABASE ACCESSION NUMBER: AK067823
  ref <309>: DATABASE ENTRY DATE: 2001-12-06
gaccgattcctgcgtgatgtcgctgcgccgcctggccgcgtccgccctgcgccgcggcggcgccaacgacggcggcgtgctggccgccgtccgcgccgagatcgctcatgagctctcctcctccccctcctcctctcctccgtcgctccaatcccaggacattcctgatttctccaccgtgtcggacgcgccgcgcgggcaggaggtgctcctgcgccgccgggatgcttccgaggaggtcctcgtgtcggcggtgctcgcgccgctgcggttcgaaggggaggagcccctgcccagggacgcgctcatgaaggtgttcgtcagtaagcctgatgtgaagccggtgatgcggttcgattgccgcgcgtttgcagctgaaggtgatggcggctctgctgactatgatgttactgctgtttgttaccacccgtttgctggcgagtgcgacgctggggaagacaagtatgaagggccggagttcagaaatttggatccgcagttacaggttgcattgaaagggtatatggtggcaagaggcgttaactccaaactggcaagcttacttcaccaccatttggttgagaaggagcggtggcaatatatgaactggctgaaaactttggaagaaatgttcagcaaagatcattgacaaaatatttccagtaccgaagaccattaaattgttccagtcaaatgcgcacacttttgttgtgacaaactggcaatgcatagatgctagcttcggaatgcaattgcggtgcttaatttagtttcgtggaatgaaccacgaaatcaccatactttgctcgaatctaaatttttttatttcgagcttgcaatggagggaatttgctg

SEQ ID NO: 17376 - DNA, 2151 bp, Oryza sativa
  ref <308>: DATABASE ACCESSION NUMBER: AK067824
  ref <309>: DATABASE ENTRY DATE: 2001-12-06
tctctctctaccataccaaggagagccatagcctctctctctctctctctctctagatatctctctctttttctctctagatctctcttttttcttgtatctctataggttgttagagcggcgacggcgagaagaggaaggagcaacaaggagtagatcatcagtatagagagcagcagcaatttgggaaggttcattattacagctctgttgtttcatttctttgaggagacgaagttagcaagcagggattgctgtttctgaatttcaaggagaagataacaatagcaaatgatgatgtcatctgggttccagctcggtgtgatcgggtctcttgcgctgtcggttgcatcatcagttgccattgtcatctgcaacaaagctctcatcagtacccttggtttccctttcgctacaacattgacaagctggcatctcatgatgaccttctgcaccctccatgtggcacaacgcttgcatttctttgaaccaaaggcaattgatgggcaaacagtgatcctctttgggttgctgaatggcacctcaattggccttctcaaccttagtttaggattcaactccattggattctaccagatgacaaaattggcgatcatacctttcactgtgctgttggagacaatcttcctgaagaaaagattcagcgagagtatcaagctttctctactggtcttacttcttggagtgggcattgcttcagttactgatctcaagctaaatctacttggatccgtcctttctggactcgccatcgcgaccacttgtgttgggcaaattctcacaaatacaatacagaagagattgaaggtatcctcaacgcagttactctaccaatctgcaccttaccaggcagcaattttgtttgcgactggcccttttgtagatcaactccttacgaaccgcagtgtcttcgcccacaagtacaccactccagttttggtatcttcttaacaaactccatccatttacaattatatgaaaatgctttatagttgccaggatgcaagctaaattactttgtggaatataacaattcatcatttcttagatcttcaagattactagaggcgctaaggtgacaaatatatttgctgcttccataataactagccaagaagtctaaacataagattagaatataatttcatgatccacccattgtattatatttcccatcttgaaattgatatgtcctaaaagtatgtttaaaacattattatatgcttttcaagggaagaataaccagtggtatgaagaagaaaaggacgcaatataaaattgatcagtgggcaactaaatgccaaacacataaaagttccttgtatgcaatgtttttccagtactgagaaaatatacaatgatatgtatggaagtagacaaaaagtccaatatgattgtagcttgcaatgttgttgatataatgcatcatcatttcttagacactgtcaatcagttatcatgctcaagagtgactcaggagtttgcacatctatttagcattggcaaatgctcccagatatgcagatataccataaatttggataggaaaatggcatgcaaaatgatgttttgaattatgaattatatgcagggtttcatcatgctatcttgtttgattgcggtgtctgtgaacttcagcacatttcttgtgattggaacaacatctccagttacataccaggtgctaggccaccttaagacatgtctcgttctctcatttggatacattctgttacacgatcctttcaacgcaaggaacatattaggaattttgatcgccatatttgggatgggattgtactcctacttctcagtgaaggagggcaagaagaaggcaacaaatgatccactgccagtttcacagatgccagaaaaggagactgaaccacttttggcaaccaaagacaacagtgataccaaaaaagcaaatggtgtatctcatgactgctaagacttctcttgcttagtgtagatctagtatatgcacactgcatgcctgctcgttgaatttgaaggacctggaaagccatttctttccattcttgattgttttgtagaaaagataaatgagttttatacttgtagagagtgtatattttgacattaaaattatcatttgatcctactttc

SEQ ID NO: 17377 - DNA, 1230 bp, Oryza sativa
  ref <308>: DATABASE ACCESSION NUMBER: AK067825
  ref <309>: DATABASE ENTRY DATE: 2001-12-06
gtggtttgactagtcctctctctccgggagaaattttgctccggccgcctcggcgtcgcgctccgcggctcgtaatctttcgcggtggccggcggcgggggagaggaggaggaggaggaggagggagatgaaggcgtgcgcgagggcagcgggggagaggctccccctggtcggtgctcccgccaggcaacccctggctcggagttttgttaaggtcaacagattatcatctcaacatgagacgaagtctgtggtatcctgctcggtaagggtgtcagatgacaagacacaccgaatagaagccacggcagaacacatccttccagcaacaaatgatcatgtcatgaaagcaattgactcaattaacagggggcaagtgattgcggtgcccaccgatacgatttatggctttgcttgtgatgcatgctctgcagaagcagttaatcgtatatatgagatcaaaggacgcgtacagacacggcctcttgcaatctgtgttgctgatgtcccagacatatcacggtttgctgttgtggatcacctacctcatggcctgcttgatagtctacttcctgggcctgtcacagttgttttaaaacgaggtaacaacagtatattggagagatctcttaatcctggtttggaaagcattggagttcgtgtgccagattttgatttcattcgagccatttcccgtggtgctggaagtgcgcttgcacttacaagcgccaacttaagcgggcatcctagtagtgtcaacgtcaaagattttgaggatctgtggccacattgttcatatgtctttgatggtggaatcctcccttctgggcgtgctggttcaacaattgtggacctaataacaccaggagtctacaagatattgagagatggaagttcaaggcaggaaacgacagcggtgctcggcaagtttggctttgttgaagcttggtgacaacttgttgacctcataaaattggtaccatcaaatactagtccctttgttatctatctggcttcttgcttagttaggtgctgtaccagaatataggttgttgtttgtgcttttctttttcatattctgaatcagaaggtgtcagcttcctgtttcaatgtcaatgcccttacagtatcacgtgaacttcgattgctacactacagttcattctatggtagattacactagcatgcctatgcaagctaaaagaaatattgattgtaatggattttaat

SEQ ID NO: 17378 - DNA, 895 bp, Oryza sativa
  ref <308>: DATABASE ACCESSION NUMBER: AK067826
  ref <309>: DATABASE ENTRY DATE: 2001-12-06
taccgccgccaccaccacctcgcctggccggcctccacgccaccacctagccatgcctgcctccatgccagcggccgccacccaacaccgcgctggaggagggggggcccggggagagagggtgtcggtgagatccagcaaccgcgccgcaacctcgccgtgtcggtcgccacaccacgtcgtgctagaggaggagaaaggtggccgctgtcactgccacctcgccacgcctgcctcggcgccggcctccacctcacccgcgctgccacgaggagaggaaggcgagaggggcgaggctcctctaaccatcagccgccgtgccggccagcctttgccaccaccgttgtcgccgctacctcgccgcgccatcctcggcgccggcctccacctcacccacgccgccacgaggagaggaaggcgagaggggcgaggctcctccagtcgtcagcaaccgcgctggccagcctactccaccaccgccgttgtcgccgccaccttgccgcaccagcctcggcgccggactccacctcacctgcgccgccgcgaggagaggaaggcgagaggggcgactagcgaggctacaccgccgcaccgtagagcctccctggaggagaggaggggcgagagagagagagagatggcgttgtgtggcagtgtgggatggatggataagataaaggatgtcgtgtggatggcgctgtgggtggtcaaaaaagccggcttggtttttttcaaaggtgtcagttccgttgaaaaaccgacacctatactataagtgtcaatttttttaatagaaccgatacctatatttgtattacaggtgtcagttctgttggcaactttttgtaacaagttgacaagcacgatcgcagcaccttaagctttgcggtgatcc

SEQ ID NO: 17379 - DNA, 2434 bp, Oryza sativa
  ref <308>: DATABASE ACCESSION NUMBER: AK067827
  ref <309>: DATABASE ENTRY DATE: 2001-12-06
gagtcctaagctagcagcaggtaggtgtcagaaaggtggtggctagctttcatggcgagcaatggcgaggcgacgacggagagcgagacggcggcgccggcgccggtgccggagccgaccccgccgccgtgccaggggaggctcatcaccgtgctgagcatcgacggcggcagcatccgcggcctcgtcccggccaccatcctcgcctgcctcgaggccaagctccaggagctgggcgggccggaggcgaggatcgcggactacttcgatgtgatcgccgggacgagcaccggggcgctgatcacgtcgatgctggcggcgccggacgacaaccggcaaccgctcttcgccgccgacgacctcaccaagttctacctcgagaacgggcccaagatcttcccgcaacagagggttgggttcttgacgccggtggcgaacctgattggcacggtgagagggcccaagtatgacggctcgttcttgcacgacaagatcaagagccttacccacgatgtgaccattgccgacacagtcaccaacatcgtcgtgccagcatttgatgtcaagtatctgcaacccatcatcttctccacctacgaggccaagaacgagcccctcaagaacgcccacctctccgacatctgcatcagcacgtcagcggcgcccacttacttcctcgcgcacttcttcaagaccaccagcccctccggcgagtctcgagagttccaccttattgatcgcggtgtcgctgcaaacaacccgataccgagcatatatcatttagtatgagaaatttaattcttttaagaggtatcaaaatttacatcagaaggtatgatacctcctaatatcttcttaatcaccataaaatcactcgtttagtatatataccttcaatctcaaaaggcaacatatcaattgtgcacattgttggtaccatcttgaacacaactttgaccatttgttgagtgctcgtgcgtgcagacaatggtagccatgtctatgatcagcaaggaggtgttgcgcgagaaccaggacttcaaattgggtaagccagcagattacaggcactacttggtgatctcgatcgggacgggaacggcgacgatggcggagaagtacaccgcaccggcatgcgcgaaatggggtgtactccggtggctctacgacagcggcttcaccccactcatcgacatcttcagccatgcaagtgcaggcatggtcgacatccatgcctccgttctcttccagtctctctcctgcgagaagagctacctccgcatttaggtgactaccatggtttgaaattttggtttgaaatttcggcccccactggcaagcacaaatttccatgaaatttttggattatttttcaaatatttgtgcatttggtaaaaaattttcgaaattcaatcaaaatatgttcaaaattcaaataattttggtaaaaaaaacccggaaatcatgagattttcaaattttcggcaaccacggtggcaaccaaaattgcaaaccctagtgactactccctccctatgtttcatgttataagttgctttgattttttttctaatcaaatttctttagatttgatcaagtttatagaaaaatataataatattttcaatacaaaatagatatattatcataatatattcagcgtaatatttaataaaactaattttgtgttgtaaatgttgctaattgttcctataaatttggttaaatctatagaagtttgactacgaaaaaaatcaaaaacaacttataaaatataacacggaggaagtattagctattaagttgcatatgcacccaactattatcggtctacttgtatcattacattaatatacttctaacaccagtaaaaattaacctagctactaaccgaccaactagttcacccaaaagcttctatgttttcaccttctcgtagtcgtgacactaaaattgagtgttcgtgtatataggacgattcgctggtggggcacacgtcgtcggtggatatcgcgacggaggagaacatggaggcactgatcgggatcggcaaggaccttctgaagaagccagtggcgagggtgaacatagacactggagtacacgagcccgtcgatggcgagggcaccaacgaggaggcactcgctcgcttcgctaagaagctctcagaggagagaaggctacgcagaaacagcctcagttcctcttgagctgagctaaagctaagttagctagctagctcagttctagctaagctaagctaagctaagatgtaaaattaagtaattgctgtgatgtcgtaagtgtttgtgggtgaggtatcatatgcatattgtaataatattggtttggttttcattgcattaattgcatgttaatatatatgtacttaagcaacactgaaatctataattaatcagcatgtttttatttt

SEQ ID NO: 17380 - DNA, 1249 bp, Oryza sativa
  ref <308>: DATABASE ACCESSION NUMBER: AK099020
  ref <309>: DATABASE ENTRY DATE: 2002-08-28
gactccactccatcacctcctgcttgagcaagcaagcaagcaatcgctgcagccaactgttcgaccagagcgagttagccatggcgtacagagttcttgaggtgaccctccactcggcgagggacctgaagaacgtcaacttcatctcgcgcatggaggtgtacgcggtggcgaccatctccggcgacccgctgacgcggcagtgcacgccgccggacccctacggcggccgccacccggcctggaacgccacgctccgcttcaccgtcccgcctaccgccgcctccgccgccggctgcctccacgtcctcctccgcgccgagcgctccctcggcgaccgcgacatcggcgaggtcatcatcccgctcgccgacgtcctctccggcccctacgacctcggcgcccgcccgccgcagttcgcctcctaccaggtccgcaagctccatcgctccgagacccgcggcgtgctccacctctcctaccgcctcggccccgtcgtcgcgccgcagtccgtcttcgcctacccggcgccgccgccgccgccgccgcagctgttcgagaccgctcctccctcgccgccttacgttcccccaccaccggacgcctaccttcgtaaaccgtcgccgccgtctccaccacccgccaagctgtcgccgccgccaccgccacagacacagacacagccgctggcaaagccgccggcgccggcgacgccgtcgcgagctggcgggcacgtggcggcgctggcgccacctgcggtggcgaaggccgacaggcacgtgtcgacgccgtcaccggcgaaggccgactggcagatggtgggcacgccgacggcgacgaaaggggcgagcaagcatggcagcctggagttcgaacgggggctcaacgccgggctggtcggcggcgccatcggcgggatgctggtcggcaccgagatggtgtccgacgcggcgttctaccacgccggctacagggccgggctcgccgaccgcgacggatgggccgtctactaaaccgtcgtcgccatggctgcaggtgcagcgccatgcatggtcggtcggcgaagatgcttagctgaataaaagtctctggttttctttttttggccttttgagattagctcaataaaagtcgatgaaatttactttggctgagagtttgtaactcttcctcttcggctagtgaattaatcgacttgttgtatatattttgttactggttatgatgtaatatatggccacgaaaatcc

SEQ ID NO: 17381 - DNA, 790 bp, Oryza sativa
  ref <308>: DATABASE ACCESSION NUMBER: AK067828
  ref <309>: DATABASE ENTRY DATE: 2001-12-06
ggagcgaaaccaccacggaaagatctccccagtccacacgtcgaaatcgatcgaaatcgagggggccggagatggctgcggcgagagcagcggtccccatcgccgtcttcctcctcctcgtcctcgccgaggccgaccccgcggcggcgacgcgctcgccttcggccttcgtgcagaacgccatctactccaatcgcatcaccatcttctctaaaacctactgcccgtactctatgcgtgctaagcgtatatttagagatctcaaggagaatccttatattgttgaactagatctcagagaggatggtagagaaattcaaagtgttcttctagacttagttggccgtcatactgtgccacaggtgttcgtgaatggccagcacgttggtggctcagatgatacagcaaatgctcattctaatggacagcttcagaaacttcttggaaatagccaatcacagcgatgatctgtagttaagactatcaaatactcgtgtatggctaacatgtgtgagaagaagggggccgtcttttctctttacacaggatccttaacagaatgttgcagcttcagcagttttttttgcatggaagtgttgtgacaacgatttctatgtttgtgattcatctgtcaagcgcatattctattaactgctgtgccggctctgtactgtttgtgactttgtgtttataagttattaattccccttgtatttacaatgactatcaataataggtagtgcggctatggtttgtgtaagtacttgaatttagttgacttttggtgatg

SEQ ID NO: 17382 - DNA, 2644 bp, Oryza sativa
  ref <308>: DATABASE ACCESSION NUMBER: AK067829
  ref <309>: DATABASE ENTRY DATE: 2001-12-06
gatttgaaagaaggaaatatttgggggaagggggggggggggggcgagacgatttctcggtttctcgtgcgacttgtcttactgttcttgccagttagggtttgcgtttcgtttgaggtgaaacttagggttgctgggttttgttttggctatcaatgttcatattttgcggtaagcttagaaaagcaaaaagaaacaagcaacaaatgtgccagttcgcggtggatttactgttctgagttgacacgctctgcttttctttgttgatggctcggtgcctattcatgtgtatgtagggagtaaaagtgtttccatttttccatgacaaacttagatttactccaatcatttggtggaggattaagatttgcctcagcctctttgtcaaattcaacaattttgaagctggtagtttgtgtagcttgggaaacacgacatagatgtgatggtggagtatccaattagattgctgtatatcatgtgtttattcacataatgattaaccaagtgtgatactgcagctccacatggccataggatgaaccagttgcctgtcctttctcttaatatttttgttacttgtttagtggttgatccattggagttgttggatttatttgcctggcagacagtgtttcaacaattggtatgtatgtttttgacagatttcatacaaatgggctcagcaggaacttctcagtatcatccaatgattcaaagaggttgcttcaggagttcgtcaacaaacatggggctgatcttaaagtgatttacagtgtgtctggatggttaaagaagaaccccacaaattattgtgtaaaactcacttcaggccataaacttgaagaagcaaggcaagaatttaaagattcttgttcagttcaagtgtacagtatccaggcttgtattccaaaagatactgctgtactttggaatcctgaatttgtacaggcagaggagctttttaaccggccatttgatgaagaaaattgtttgagagataataggttttgtggtgttttgaattcttttgtcaagcgaactgctaatgggaagcttgtgagttcatttccgccaaagcctataaatagtgttgctgcagctgcaccgttgaaaactagtagtgctccaaaagaacaatctgctaagggtcaacagcaaggtctacctggatcatccagtccaaagaaaggaacaagtaataaggctgagaaggatatttcctcggtcttggataaagccaccaatgctcctgttgtcaaagaaccatcaattgctctgcagggaaacaaaaacaaggctcagaatgggaaggcgctgcccagtaatggtggatcacttgctacgatgtggggacgtgcatcagctaaacccaagactccagctaccactaatcctacagttttaccaagtgttgctgttacagctgatgcacaaatatgtgcaaaggaagaagcaaatgctgatagtagtgatgatgaacaagctgtacactacaagcgtggctctagtgcaaataacagaaagagaagagcagtctttgatctttcagatgatgatgaagatgacaatgttgtagccattgcatctcctgagccaccggaacagtgcattacaaatcctattgatgaggttgctcaagaaagtaaccccaaacaagaaaacttggaaaataaacaagaggttgagaaggatgtgaaatgttgcatgggaaggacagagtctcctgagtgtaaaaccaaaagtagcaacactgtcagccattctgggatcaccttaaaagaaaagaacaatggtccaccacctaatgacaataagcaggatcatgctgctgagactgcttccaacctcacctaaaagaaggaaagttttgaagacacgaatagatgagcggggaagagaagtaaccgaggttgtctgggagggtgaagcttctgcaggtgataaggctgagaagaatgtgagcgatactggtgctgcaaacagggcaactctctcaagcaagccgcagccagtagcaaagaccgaaaaaagcaatgcttcgagtaaaacagccggcaacaagaaacctgccaaggctggaaccaagcaaggcaacattatgtcattcttcaagaaggtataagccttctcgcttatctgacagagttattcaggaaggagtatctgttgttgccctggctaaagctaccgtgccaagctcccaggcaactgtagtattaattgattcaagtaaacagaccagcatgtttcagaattcagaagctcacttgctgtacatatcctgtgtgattttgtactggtactactacccatttttcagaattctgtatgaattctgaagatgctgctggatgagtatggcaacgacatggcttgtgaagtttgtactgtaggctgtatgcatccaggcacccgtgcggccgtgcctttgtcacttcgccgtgtggtcagattcaggtatgggcattgtagcctagtacgtgtacacgtgtactagttcatgggatgctttgcttgttttccctgacacatgcactgtacatcacctgtcagctgcatggtccatcatccatgacataccaggtcaacctcatgtagaaagttaaaaacaaacagtcatctgttaataacttttgcatcc

SEQ ID NO: 17383 - DNA, 4651 bp, Oryza sativa
  ref <308>: DATABASE ACCESSION NUMBER: AK067830
  ref <309>: DATABASE ENTRY DATE: 2001-12-06
acgagctccttcggtttcatcacaggtttatttggattacataatcccctatcggtttagttccctttattgttgaacaattggagataatatctttcacgataattcgtaccactgagcaaaattcaatgatgcaattattttatatgcaactcatttggtgaacaagatgtatcttgtggcaaacaacgagatgaaaagttacttgatccttcaggcatacctgtgattttccaatctattctttgcacgttcttggaaagattggttgtccctgatagctgtccgtagtgattcatggatactgtgtggcattttactttggggctcattttggatttgataaagaagtcaggtttgctcctaattcaattttttccctgttgatttgcaccaccttttctcaagcctgtcattttaattatatatgctctaccactctactaattaattctcactctgtgtgcaaggatgtgtggtagtgcagtcacatacttacatgttgtgagtctagattattttagtgacacatatcatgatttacaatctgacaacgaatcattctaaaatgatttgctccattaactgtcttaattatcacgaacccagatttggtttgtcacaatattaactcttgataaatcctttcacgtaaatcaacagactacactttgttaagtccgcctcccaaagaaattttgctaccttctgtccacacctctaaacaaaaccacctatgatagctaaaaaaataccaatccgaattaagataataagtttagccgtcaccatcttctcaaattgctttttgcccacataattagtcagagtgatcagctgaatgcttttcccactcagcagtgctctaaaatgttactgacaaattcattttgccaaacaaatttagttcatttacattccagaaatgtatatgtcctatcagttgaacatacttgcagggattattccttgagtccttgtctccttgaagttagttgttattgtgccaatgttgaaatattcagtatatttgctgaattttcatgctttattgctctgcaaaccatggttcctgatttctactctgtgtactattttggttcagactggttaaatgtgttggagtacttcaatttttactgtttcatgagttcaaaatataaattaatcattccagtgaagcatcgtactgtgctattctgagttgtatgctgcaaaggttaaattgtgcctccatccactttcaaactgaaattatcacggaagaatgtacagcaaatattctcttcacctatcttttgtgaagtaggaatgtgtcctaatccagtttcactttttaccctgctgctctgaataatcaacagaaagagatgttctactgctttgtacttcatctctggctgctactagcactctgaagaatcaccctgagcttatcacccgtcatttcctctctctcctttctctctgtcttggttgaaattacattttgattggttctttgacaactgtggagcagattgccaagagaaggtcagctcatctgctgaagtatcctactgtgacgattataagccctgggatcagtaacactagagtccattcaagactccataagtaatgccatggcagatgtgcatatttgctcttaatataataaacaccagttgtgtaccttcggataatttatattgcagtttgtcaagaacatagctaaattctaattgagaaaggaagttctgcattgaacggatcacagttcttatgatttagtgtaaatgattcagtcaggccgtgcattttccatagttcattttcaaaaaaaccttgttctttaatgggtctatctgtaaatgcagagagcacataccttattcaaataatcaagatagatcagattattttccttttgataaaatttatcgagttaaattcaagccagatagacccacgggaagtttatatatgatgtgtgtagtatgcatgaaacttaggatgtaggttttcttagtaaagttacatcctacaaaataatgttcggatacactacactttccacattcgcatacaattactaattaaaaaaagatgttatcaccacaacagcccactgtattgtttgcaaacaaacacttcatagccacaattactacaggtggaaaaaaaaaactacctcatctttattaacccccaccttcttgcacatactctgcatccactacttatcaaaactacaacttttagatttgttaactatgtctataaaatactatatccgtctaggaatgcgccttggattctatgtattatcaatgcaatatttaaaacttataattacatttttacaactattcatatacgagttctatacactcagtgctaggtcctaacagaatgctgaggccctcaagttcaaaagattatcacagagccggcaacaactcattgattggtcagtaaaaataaaggtaaataaagaagcgtattcagtattggaaaacgtgcaaacaaatacttattatacatattttcaaaaaaaaaagctatgaaaaattaccatctttcaagtaaagcaacaattcttaacttaaagaaaaacttaaatatttatcgataacagtacaaacctaatgtaaaaaaaagttataaatcaatttattcaaatttgtgacaactctcacggcacgccgcgcaaccacatctagtagtttatatgggcacttgacctccctagtacaaggaaataatcattatttctccctaattaagactttccttgttgaaaaactttccaaatctctaatccttgattgtgttgttgctgcttgctgcgcatgtgcctggcttccatctttgctgcttgctgcacatgtcgccccacatgacaccttcactcttcttagagcagatacagtagcagactataagccagctataaacatatttgaggaagataaaagaggagagataagagcagataaaagaggagagattagagcagcgggctattaacacttcttttgtgttaattcccatcaagacttcttttgtggctggctattaactgtgttatggactatgcacaggtttcaaaggagcatgggggtttcatgagatttatccaggtttcttgcctaggagcatcggcctcttcttctagaatgctgagggccaaggctgctggggaagaatctgtgttgaaggaatttcctgaggctacaattatgaggcctgcaactatgattggcacagaagatcggattttgaacagatgggattcagcctgtttatgttgtggatgttgctgctgctattgtcaactccctcaaggatgatggcaccagcatgggaaagagctacggacttggtggaccagagatttatactgttcatgatctggctgagctgatgtatgagacaatatgtgaatggccacggtacatcgatgttcctcttcctattgcaagggtatgaacttaaataatatcttgtgttggtcaaggcgaatggccacggtacatcgatgttcctcttcctgttgcaagggctatcgcatctcctgaaagctgatagattgggattttttttttcaatactctaagcctctaatgaaaggtgcatatggacttttattttagatgttctaactttgttttgtctctacctctcaaattgttactatatatgtactcttcaacctgccgcataggttggcacatgtttataaggtcaaatggaatatatttcttgtgtttttactatcatttggtttagttctttcacacagcaatgttgctatttctattgttgcttcccgccctggaaaaaacacggctcaagccgtgaggtcttcatttgcttctcttgtgaccaattaatctgtaggtttgggtccaaagtatgctttcgcaaccaagtgatgaaaaaaaaaaacaatctggttggggatgtcaattggttggttcatacaagtgagttgatttgattatttaatttcctctaaacaatacctctaatatttaatggtcaaggatgccataccatatatactgttggcacttgtataccacgtgcttaggctgccataaaatgatttgccatttctggcaaatgatgtaaatgatgacatagaaaagtaaaaaattgcaggaataaacctatgacattcgcaactttttcaagtgagggatctgttttttggttgcagctgacagtgtcatcacgttgtgggatcctggtaataatatcacatttgttggtatgattaaagaggcactatttagtggtatgctactatctttgaaatgttgtggatgaagcactgtgagttgcttgtgaggaagatcaagcacatggttgctgtaattctgcttctacctacaatatctttttagatttttttatcaatgaaggattctcctattttagtagttagtaccacatattttgtagcagtttggttgaggtcttgatgaaaaacgaaactcgaaagttctctacatattcccatctttgttatattagaaatcataacattctttgcttaatagtcatttactctgaatatttctattttttgctatagtccaagcattaaatgaccatgctctgatttatagtgttttcaagaatgccgagctattggaatttc

SEQ ID NO: 17384 - DNA, 1719 bp, Oryza sativa
  ref <308>: DATABASE ACCESSION NUMBER: AK067831
  ref <309>: DATABASE ENTRY DATE: 2001-12-06
gcttacggcgactcatctgcttcttcttccgctacgcttgtgggcacgatgagaagggcgaccattcttgtactgctcattgcactctcatctgttattgctccccttccattggaagctctcaatgtaagaggccatctactgaaatccaagacatttctgtctccggcattcttcctgcaccctggatcagtttcaaacaagttctactatgatgtccccttccctagaggccaccttgctctcaagagctttaatgctgaagtcgtagacgagaatggcgtccctgttccgctccatgatacttacctgcatcactgggttgtggaaccatactatgctttaaagaacagtgatagcgcagacgcgcaaaagctacccaaggggatcattgcaaggaactctggtgtgtgcaagaaaacattaggccagtactacggccttggttctgagactcgccatactgccacatgggtacctgatccttacggcatagagattggtaatccggagaagccccctgaaggatatgaggagaaatggttgatcaatgtgcatgccattgacacaaggggtgcgatcgacaagctaggatgcactgagtgcaagtgtgatctttacaacatgacgatcgacgagtatgggcgcaaactcccaaaggactacattggtggtttatattgctgctatgatgagacgcagtgcaaggttaaggaaggtttcaacggtgagctacggaagctgttcttgcggtacactgtgacgtggcttgactggagtgatgcggttgtgccagtcaagatttacatatttgatgttactgacacttctccgcctgatgaaaaatccggaactgcctgcaaggttgagtaccaagttgaggaatgcagtccagaaaaccgggccaagaatgagtgcattgatgttaaagtaaccaaagaagtaataccctgtggaggcgatatcgtgtttggtgtcgcgcatcagcattcaggtggaattggtgcctctttacacggccaggatggacgtctgctttgtgcatcgattccgagctatggcaagggggaagaggctggcaatgaagataactacatcgtcggcatgtcaacatgctacccgaagccgggatcagtcaaggtcagtgatggcgaggtgctgaccgtcgtctccaactacagcagtgaccgccagcacaccggcgtcatgggcctgctctacatccttgttgcagagcaagaacagccagctcccaagcctgctctgtgcttcagcttcccggttccatggtgcttaccgacatggctgacgagcaatctctgaatgttcaagttggacctgaagaagatgatgcatagatgtaagcaaataagttgcctgggtttttttgttgaactatggcagaccataggagtagtttgctgtgtcattttgatgaaccatcagtagtttctgatgatctgtggcactacggcactaatatatcaaactgggtcatatacaagggcattggcagacatctttctccaaataatagtattactctgaagaagctagtgaaaactgggaaccagatgtacaatctcttgtactgttgtactgttatatactggtgtatacagtatttatgtatatggtttttaggtaatggaatgaatagttatatactggcttatgtatgcatgtaacatgatctatatacttgagctcttgcagacc

SEQ ID NO: 17385 - DNA, 1499 bp, Oryza sativa
  ref <308>: DATABASE ACCESSION NUMBER: AK067832
  ref <309>: DATABASE ENTRY DATE: 2001-12-06
gtggggagcgcaagcgcagaggacaagagcgcctcctcgtctggtctgcttcggccccccgctcgctcctcctgccgaagcactcactcttcggctgctcatcctcctcctcctcctcagaaccagacttgccacgaaggatttgataatctaggggttcgggacgagatgatattttcagtcagcttatttggtagttcccaccagtccattcacaaactttacaggaaatgctggtcaagtaactcacattctacactgaatgtgctttcacttgcaaaaactgtgggtcaaagtatgagaatgaagaggatacgtgtcaagcctcatgccactgacctgaagaatcgcccccaggcccatgaggataatgtgttctacaaattggtttataggctccctgaaaacctcagctggctgttggcgtcaccagaaatggctagaagaccaccctcaaagaagaaactaaagaaggaagaaatggtaagtagtaatcaatttggtgtgatcttggagtgggaaggagttgttgtggaagatgatgatccagatttggagcctcgagtttggtacgtgttatcacttgaagaggcaaagtcttttcctccagatgcagtgctgaaggaaattgaggggatgaggactgatcaggctattttagaagtcttacattggtcagaagatccacaagaagtacaaaggctggcagcacgcaaggaggtaatatataaaacattacgtggtagattctaccaactgcgaccaggtgttcttgatttcctgaacacccttgtggattttgacattccaatagcaatcacaactcctcgcccacggttgagcctagaagaagggataaaagctgttggtcttcaaggctactttgatgctatagtggcagcagaggatttctgccgagggaaacccgagggggagatgtttgaggtcacagcagggcaacttggtcttgagcctgatgtttgtcttgtgctgggtaactcaaattcgacaatagaatctgcgcatactgctgggatgaggtgtgttgcggttgcaagccgataccctgcctatgagctccaagcagcaaaccatgttgtaagatggcttgatcagctatctgtcgctgacctgcaaaggattgccaatggcgagattcttgggctcaggggcagaagatctgacatggacatggacatggagattgtgatcgaggagtgatttttctatatgtatggtgtgctaatattgccctatgtatatagctccaattgcaacctaggtaatgcattacattttgttaacagatcaagctgattaacattggccgttagcttgttaactgcttggtttcttgtaatgcagaaatggaacttttgtagcctagatgctttcgatctctagaagaattggaagctaagaaaaactcccaatctgtatctcttttaccaatgtaatatataatttatatagattattatgccttgtattttgttccg

SEQ ID NO: 17386 - DNA, 2358 bp, Oryza sativa
  ref <308>: DATABASE ACCESSION NUMBER: AK067833
  ref <309>: DATABASE ENTRY DATE: 2001-12-06
gccggtagcctctcgagcgagccgacacgagcttcgaaatcgcaaacccagccacgcctccgccgccggcatggccatgcttctccgccgccgcctcccgctggcccgcctcctccggccgctgcaggccgaggcggcggcttccactacctcctcaccgccgcctctccagaaccgtcccgccgccgcgtcgccttcccacgcgctgggatcacgtttagggtttttgaatggggtaccaggtgccccgggggcgcgtgaggcttcggcgttcactacggccggcttcctcgccgccggcgcggccgccgctctcgcgtctctgccggtggcctacgccgatgccaatgagggcgttgtagactcggctgtaagctctgatgcggctgtgaaacctgtgaaccctgatgcggctgtgagctctgatgtggcggtgggggaggatctggcccataaggagaggaagaggataatagagctcattcagagccgagggatgccacacgggtcatacccgcaatttgatgtggcagtgaagggccaaaaggtggtcgttaaatttaatgtaccatcaacttgtagcttatcagaccttattgttgatctcgtaacacatatcggacttgaggcagaacaaggtggtggcggctctgagatgctactgcgtgcttggaacagtgtagctgcacgtcagataacgttgaaccctcacaagaagacaacgagcaatggagatgacaatgaagatgatctttgtgtcttgatatttgaaccacttgtgggatctcaatattctgtcagttcctatgaagttgaattcatcaagcgtggtggatttagtttgagagagcttgaagctttgacaagtgttttgaaattagtgggccagaaagatgttaagcaatcatcagggaagggcaataagtcatacacaacaagaaaaggaaatggtcagagatccaagcatgtaccatctatggaaaaaactatatctgatttagagggtatgggagttcgggtctatggatttgatgagacctcaagtattccaatggatggtagtggtactgttatgtgggagaacattgctggatatgaacctcagaaaagggagatagaggacactatcctcttggctttacagagccctgaagtgtacgatgaaattgcccgtgctacacgatgcaaatttgagacaaaccgacctcgagctgttttgtttgaaggcccaccaggcactggtaagacttcttctgctcgagttattgccaagcaagctggagttccgctgttatatgtgccactggaaatcataatgtcaaaatattatggtgaaagcgagcgccttttgggatctgttttttcacttgccaatgaccttcctgatggaggtataatttttctagatgaggtagactcttttgctagcgctcgagatagtgaaatgcatgaagctacacgaaggatattatcagtaattttgcggcagattgatgggtttgagcaggatagacgtgttgtggttattgctgcaacaaatagaaaggaagaccttgatcctgccctcatcagccgttttgattcaatcatttgttttgacttaccggatcagcaaacccgcgcagaaatatctgcccagtatgcaaaacatttgactaaatctgaattgtttcaattttcattggccactgaagagatgtcaggaagagatatcagggatatttgccagcaagcagaaagacattgggcatcaaagttgataaggggacaagtaccaaaaaatgataagggggagccgagtcttcctccagtcgaagagtatgttgcatgttctgaacaacgcagaagatctttgccgaatagaacaagtaaggaatcaagactccctgctttgaagttagcttgaggaatgtacttatctttacagttccacaccatatgttaaatgatgtgtatatagattttaggcatctcttctcgtgacgcatgccggcgcatgaaaattgcgtttacccaaattttgattgtcctatcacagcacgacaaaacgtataattctagagatgaagtaacagtgggtaatgcattttgcaatgtttgctggccgccttgggtcgcggtcctcgaggataggtgatccggaccaacaactctggaactgtcgagatatctgctaggaaatactcctattttcctgagaaagcgtagaagttgtgtacgtcaatgcattaagagacaataaaacaacacaatgttcttacaaagaaatgtacattgccttggaacttgtgtacctatatgcaagcatgcagtattgccaaatacaatggtcataacagagaatggaatttgaaatcg

SEQ ID NO: 17387 - DNA, 1193 bp, Oryza sativa
  misc_feature (521)..(521): "n"=any one base of a, t, c, or g
  ref <308>: DATABASE ACCESSION NUMBER: AK067834
  ref <309>: DATABASE ENTRY DATE: 2001-12-06
gaaagttcacgttttggtccccctcctgttcggcgacgggcgacgtacggcgccactataagaaacgtgccctattgctgtcacgccgtacttcctcccgcccaccgggcagctagcttagctgccgccatggacgacgacggcgacggctcatcgtcaccgaccgacgacagcgccgccgccgggcttttgccgctcttcagccgatcgccggccgaggatcttgaggagaagctgaggcgggcgatggaggagaacgcgcggctgacgcgagcgctcgacgccattctggccggtcaccacgcccaccagcgcgcgctcttggcgccgtcgctgtcgccgccgccgccttccgccacagcaagggcgccgagcgtgtccaccagctgcgcggcgagggaggacgccgcaccggcggtcgccgccgccgccgcgtcgacggcatgtccgtcgagacagcagccgccgaccgcggagccacggcccaaggtcaggacggtccgcgtgcgcgccgacgccgncgacgccaccgacgccaacagcatggcggagaccgtgaacgatgggtaccaatggaggaagtacgggcagaaggtgacgcgtgacaaccccctaccctagagcttactttcgttgcgcattcgcgccgtcttgccccgtcaagaagaagctccaaagatgtgcggaggataggtcaatgctagtggcgacctacgagggagaacacaaccatgccctgtccacgcagacaaccgaattcgtcgccagcggctgcactacgagccagcacgccggggggtcgtcgtcgtcgccgctgccgtgctccatctccatcaactcgtcgggccgcacgatcacactcgacctgacgaaccaagcagggtccggatcgatcgcgagctgcggcgtcgaggcggccgccgtctccggcgagctcgtcacggtgctctcgccggagttgaggaggcacctcgtggaggaggtggtgcaagtgctcaagaacgacgccgagttcgtggaggccgtgaccaacgccgtggccgctagagttgtggatcaaatcccacacattcctgttcatttgtagttgtttttttttttctctttgagaacgttgatttgtagtttgtaggcagtatatatatcccaaaatgcttgcaagtatatgtacacatgtattcgcaaatgtgagt

SEQ ID NO: 17388 - DNA, 1448 bp, Oryza sativa
  ref <308>: DATABASE ACCESSION NUMBER: AK067835
  ref <309>: DATABASE ENTRY DATE: 2001-12-06
gggtcagcaacgacaggacacggctgctattccgcttctttccgctcggaccagcccactaccggcccactactgaagtgaaaccaccctccgccgccgccgccgctcgccgtagtcacctccgccgccaccctctcttcccagtgctacctccccgccccgccgctttgccgcctccggctgaggcgaatttccagtatccaagccagtcggacataagtaagggcggggaggaagccgtgcctgcgagtttcgaccatggaaggaggcggcgagcgcgcggcggaggcggaggagtaccactgccacgacttcgagtgggaggacctccgggcggaggtggaagccaaccctgccttctcctaccacctctccccatttcccacgaccgtcggcaccccggagacgccgccgccgccgccgccctcggaggcctggacgagcttccaccgtcgccacacatgcggcaagtttttcaaggaaagaaggtatttgctaaaggaatttccagaacttcttaacagcaaggatagtgcaaaggttttagaggtgggttgtgggaatggaagcactgttgttcccattttacgctctagtccaagcacaactgtatatgcttgtgattgtagcaaagaaactctggagaaggcaaatgagattgtttgcagcacaaaaggagttgaagtcaaggataggttccatccttttttactggatgcttcgaaggaaacttttccagattggttgttctgcaaatcctgtcgaagtccatgctcaagtaattgtaatatgatagaagaataccctgcctttctcagagacaatccatgttgtgttgatggtgtggattttatcactatgatattcacattatcagccataccttttgacaatatgctagctacactagagcgttgtgtatctgttctaaaaccaggtggccttgttttgtttagggactacggactctatgacatgacaatgcttcggtttttacctcaccaaagagtgggattccgggaatacatgcgctcagatggcaccctttcatacttcttcacattagatacagtgagagaactctttcatgcctctggactactagagttggaactggggtattgttgtgtcatatcagtgaatagaaaaaaggggaagaagatgcaacgggtttgggtgcatggcaaatttcaaaaaccctaaagttgttaagttgatatgataactaccgccagtacatgtagtaatgctaaggcaacttagattgtagggttttagatcttgccgtttgtttcctgtgggccctgagaggagaaatcgtggcctggtaaacttattgaaattgagacactgtaactacaaagcttgctgcaggtaaacttactgttttgaacgttaaaatttttaatggtcaaggccaccttccgaaggtgagccttttgtttgtg

SEQ ID NO: 17389 - DNA, 1969 bp, Oryza sativa
  ref <308>: DATABASE ACCESSION NUMBER: AK067836
  ref <309>: DATABASE ENTRY DATE: 2001-12-06
tgggagaagacgagaacgcaaaaccaatcagtcgtcgtcgaacgcggcgggcggaagaggcgaatcgcgtaacgatttttgttaaatttgtaaccggccatggatccgaggcgcagccactgggagagctcgtcggaggacgtgacgaggccgctgctcccgctgcacgacgacgacggcgcggcgggccggcgctcctgcgccgcgctgaggtcgctgctcgccaacaagtacctggcggtcgcgtcgggccccgtggcgtgcgcgctgatctgcggcctcgtcgacctcggcggccaccgcgccgcgcgcaacatgctcggggtgctcgcctgggtgttcctgtggtggattaccgacgccgtgccgctcgccgtcgcgtccatggcgccgctgttcctcttccccgtgttcggcatctcctcctccgacgccgtcgccaaggcctacatggacgacgtcatctccctcgtcctcggcagcttcatcctcgcgctcgccatcgagcactacaacatccaccgccgcctcgctctcaacatcacgtcgctgttctgcggcgacccggtgaagccgccgctgctgctgctgggaatctgcggcaccaccatgttcatcagcatgtggatccacaacacaccgtgcaccgtgatgatgatgccggtggcgacggggatcctgcagcggttcccgcgcgtcgacggggcgtcgtcctcggcgagcagcgccgcggacgcgcgggaggtgcagcggttctccaaggcggtggtgctcggcgtcgtgtacgcgtcggcgatcggcgggatggcgacgctgacgggcaccggcgtgaacatcatcctggtggggatgtggtccacctacttcccggagcagccgcccatcaccttcagctcgtggatgtcgttcgggctcccattggcgctcgtcctcttcgtcgcgctctgggccacgctctgcgtcctgtactgctccaagaacaccgggagggcgctctcagcttacctggacaggagccatctcaggagggagctcagcttgcttggtcctatggcttttgcagagaagatggttctagccgtttttgggggtttgattgtcctatggatgacgaggagcctgacagatgatattcctgggtggggatcactcttccacggcgaagttggggatggaactgtcactatcatgatggcgacgctgctgttcataatcccgagcggcaagaacgacggcgagaagctcatggactggggcaagtgccggaggctgcagtggaacatcatcctcctcctcggcgccggcttcgccatcgccgacggcttcagggcgagcggcctgaccgacatcctctccgaggggctcggcttcctccgcggcgcgccggcgctggccatcgcgcccgtggcgtgcgtcttcagcggcgccatcaccgagttcacctccgacgacgcgaccgccacgctggtgctcccgctgctcgccgagctgggcaagtccatcggcgtgcacccgctcctcctcatggtccccggcgccgtcggcgcgcagctgtcctacctgctgcccaccggctcgccgggcaacgtcgtcggcttcagcacgggctacatcagcatcaaggacatggtgatcgccggaacgcccctgaaaattgtcggggttgcagctctcaccatcctactgccaacgttaggatccgtcgtttttggcatggatcagaagctatagaaactttagtcaaagttcaattggatgttttttgaatatttcaatttgtaggctgtaggttattacgtggataatatagtagtaagttgcataggttgtattgttgtacagcgtgtagtcaatcccattgtcttgcctcatgaaaaacatggggtcatattctttgagtcaatataggttgtatttgtattgagttgttccatgttaatatatctttcgacatcgtagccccatgttg

SEQ ID NO: 17390 - DNA, 1740 bp, Oryza sativa
  ref <308>: DATABASE ACCESSION NUMBER: AK067837
  ref <309>: DATABASE ENTRY DATE: 2001-12-06
taccgctctttttttgagagagaagagaagagaaactcagccatcgtcgtcttcttcctccgcgaaggcgagagctcaggcgagctcgcgcgatggccatggcgagccccaccaacggcggaggcggaggcgggaacaaggtgatcagcctgcgcctgcagtactactgcgtgctcgcggcggtggtggtggcggtcatggtgctctcgctcgcgttcgtctcgccgtccgccatgggcgccgccgtcaggcagaacctcggctccgtcgtcgccgccaccgccgccgccggagagggagcggacgcctccgccgccgccgccggagccggagtggcggctacaacggccgcggaggaggagcgtgagcaggcggcggcggccggggtggtgctgttcaacttcggcgactccaactccgacaccggcggcgtggcggctgcgggggggatccggatcatgccgccggagggccgcacctacttccaccaccccaccggccgcctctccgacggccgcgtcatcatcgacttcatctgtgagagcttgaatacacgtgaactgaacccatacctgaagtcaattggttcagactacagcaatggtgtcaacttcgctatggctggctcaacagtatcacacggcgtctctccctattccttgaatgtccaagtcgaccagtttgtgtacttcaagcacagatccctggagctcttcgaacgagggcagaaagggccagtgagcaaggagggcttcgagaacgctctatacatgatggacatcggccacaacgatgtggctggtgtgatgcacactccatctgataactgggacaaaaaattcagcaagatcgtcagtgagatcaaagacgcgattcggattctgtacgacaacggcgcgaggaagttctggatacatggcaccggcgcccttggctgcctacctgcactggtggtgcaggagaagggtgagcacgacgcccatggctgcctggcgaattacaacaaggctgcacggcagttcaacaaggagctgagccacctctgcgacgaaatgcggttgcagctgaagaacgccaccgtcgtgtacaccgacatgtttgccatcaagtacgacttcgtcgccaaccacaccaaatatgggatcaagtggccgttgatggtgtgctgcggcaacggtgggcctccatacaacttcaagccagggaaatttggctgcgatgatctctgcgagccaggatcaaaggtgctaagctgggatggtgtgcacttcactgattttggcagtggcctcgcggctaagctcgcgatgagtggtgagtactccaagcccaaagtgaagctggcaagcttggtcaatgctggctccaataaatcatccgattcttgatgccaagaaacgaataaatatcatctggatgaatcatggatccatggatggatgatgatgaatcgattcacattatgatggtgagtaatgtggattgatgggtatgtcccaacagaattggttcttacattgattagctcctttgttgataaaaaaaggcaaagtaacaatggagaggctccttcagctacaaagtagagaagttcatggtttttttttttctgaacttttgtgttgagtacaaagattttgtactgttgatgtacgtgtatagacaattttatggaagctgcaagcttccagacctcaagaaaattgatgtaagatagttttacttttatctcttcagagg

SEQ ID NO: 17391 - DNA, 2140 bp, Oryza sativa
  ref <308>: DATABASE ACCESSION NUMBER: AK067838
  ref <309>: DATABASE ENTRY DATE: 2001-12-06
ggtgctgcagcggggcgcttgtgtcgcgcgtaggtagcgtactccctgtcctgggctgtcggtgcgccgtgcgcccgcggccgcgagtacgacgcgcgctgcgtgtgcgccgtgcgcggctcacgggaaaccaagccgtttttaatacgcggcgccggtcaagccacaccgccggcatgtgacagtgcgcggagcggcatacgtacgcagcaacgtcactcgcggctcggctcggggagcgcgtgagcccgcgcaaggcgaggcagctcaagcagaagcaccggaggagctacttctacctcctctcctccgacccgtcgcccaagtaccggatggggcagtcctgccgcaagaacaagcgcaaggagctcagcaatggcaagtcgacggcgccggaagagcagcgcggcgacgtcgaggagatcgcctggagtcagaaggggcagcaagatggatcggattgcaccgacgacggccaggcggacatggacggcgaggttgctggtggtcagtatgtgatcaggtacgagaaggacggcgagatggaaagggtgctcgagaggcaggccgagctgatcggccagtatgaggcggaggaagaagctcagaggcagtgggagaagcagttcaacgagaatcggagctcagccaaggttcatgttgaggcagagaataaggcgtgccagatagaaaatggttgggagcagagcaaggagcattctaggctcgcggatcaagcggttcattgcaacgaagaggcaaaaccaggcgttaaaaatcaccccagcgccagcaacaaccgctctgctggacttctgttgaatggttcccttcctgaatcaccccaagacacatcaggacaagaagcagcagccgaccaacgtgactcgcacgaggagcttcacggccactgtcatgcacagtctcaaggaaactctaatgtcgccggcacaatgacagggaagaatcaagaacaaggaaacgagaatccggatggatgttcaagctactgtgacatcaaagcgccatcagatgggagcccgtcaatgagtgatgccaccctgaacagcaaggtctctgattggagctcatcacgcttccatgaccatggcgacaaccaggtcgatgcagggccagatcaacagccaacgagcaacatggacatagagtgtgttcttcaggcacttcagcttgccaggatttccctgagtcagaagctgagcaagccagttccacccagccaggtgacgctggcgcttcctgcaccaggggaccatgaacattcagaagacgacggctactcccccgtcgacgacgagttcaattctgcaagagatgagctctgcagctcaagccaatctcctgatcaggagatactggctctccctgcaccagaggattaccatgacagggagaatttgcctgccaatgacgacgctaccatttcactgacagaggaacagaccagttcaagcccacaccggcaggagatcctggctctcccggctccggtagatgattaccacagagagatagtggatgacatcaagatacctatctgcattgccggcttgtttcggttgccaacagactcatttccaaaggacgagatggtctcaacttgcaacaaatatggaggttcagagctcaatctgagaccaactgcagctgctcctcagaacgccttcgtgagcaacactgctgatcgtgtcacggtagctccgtcagagataagagatgatcatggcttttcaacgaggccatgttacgatccacacagttctgggctgctgtctgtgcctacttctggtaggtgtagcactccaagttcagattttacaataaggggagcttctttcctctccggaattcccggacttgctgaagatttcaggaagggaaggccccttgcagatgcagacctgttcatgcagcgtggctgcgattacactatttctaataagtggatgctgtagcttgtaacatgcatgaatttgttctctttgctttttttactagcggaaggcagcactgataattgacaagtagtatttctcatggctgcatatccttgtgaagaaggcgttcgattactaggggagataatttgaccaagacatgggaagtgcgccactttttg

SEQ ID NO: 17392 - DNA, 2791 bp, Oryza sativa
  ref <308>: DATABASE ACCESSION NUMBER: AK067839
  ref <309>: DATABASE ENTRY DATE: 2001-12-06
gagttaatcccactcccacttccatatcggcgtaacgctcctgtaaactaatccacttctacttccgcttccgctcgcggttccagatctctccctgcacatctgcatccactcacactcgagggagagggagagggggagagatgagggagaggggagagatgagggaggcgaaggcgcctctgatcgcggaggcggcggagcacatatcccattcccacggctccgggtcgtccggcaccggcagccacaccagcggcggcggcggcgggtggaggggctcgaggcagtaccagcgccgctcggacgccctcgcctacggcaaccggtaccagaaggcggccgccctcgtcgacctcgcagaagatggtgtgggtatccctgaggatgtcttgaatgacacaaggtttgagagggctatgagattctattttgtgtatctccggttggattggctgtggtcacttaacctatttgctttgattcttttgaattttctcgagaagcctctctggtgccggggatattctcaacatgcttgtgatcaaagggatctttactttctggggcagttgccatacttgagcaaaactgaatctctcatatatgaggggctcacacttgttattcttgtaatggatatcttctatccactgtcctatgaaggtttaaacctattctggaagaacacaataaataaactgaaggttcttcttctcttcatcttagcatgtgacatactggtgtttgcatttagtccccaacctttcagagtagctccttacatccgtgttgcgtttctaataatgaatatcagggaactgcgaatgtgtgctgttacactggttggtatggttgggacataccttaatgttttggccctttcactattgttcctcttattcgcaagctggctagcttatgtaacatttgaggatacaccacaaggaaagactgttttctcgtcatatggtaccacgttatatcagatgtttattctcttcaccacctccaataatcctgatgtatgggttcctgcttataagagctctcgttggtcctcactattttttattgtctacgtacttttgggagtttacttcctaacaaatttaattcttgctgtcatttatgatagctttaaggagcagctagcaaagcaagtttctcaggcagactgtacaaggaaaagtatactagagaaggcatttggtatcattgatgctactggtcagggttatctcaacaaagaacagtgcctatcattactagatgagctcaacaaatacagatcgttacctaaaacctcaagggaagattttgaattaatttttgccgagcttgatcagagtggtgattttaaggttacctctgaagaatttgctacactgtgcaataccattgcaataaaattccagaaagaaccacctccatcctatctcgagaagtatccatctttctatcattcagcactgtgtgaatggttgaaatcttttgtgcggagcccactgtttgagtatattgttatttttgttcttctgatgaatctagtcgctgtcattattgaaacaacgctggatatagaaaacagctcctcgcagaaagtgtggcaagaagttgagtttgtctttggatggatttacgttatagagatggcactcaaaatattttcattaggatttggtgcctactggatggaaggtcaaaacaagtttgattttgtgcttacttggactatatttattggagagactctaacatttgccttcccatcgaagctttcttttctttcaaatggagaattgattcggtaccttcttcttggaaggatgttacgcttgacaagaattctgttgcaagttcggcgtttcagagcatttgttgcaacattctttactctgatgtctagcttgatgccatatttggggattgtattctgcaccctttgcatttactgctcccttggtttgcagatatttgggggcattgtgtatgcaggaaatccaacactagaagaaaccgatctcttcagtaacgactatcttctttttaacttcaatgactatccaagtggtatggtaactctgttcaatttgttagtgatgggcaattggcaagcttggatggagagctacaggcaattgactggaagttattggagcctgatttattttgtcagcttttacctcatttcagtattactgctgcttaatctgattgtagcatttgtgttggaggcattttttgctgagatggaactggagaaagatggcgaagctgatatccaggatcctactttggaaggaagaaacaggcggcgatctgtgcgtgtgaggacaaaggggaccatggttgatattcttcttcaccatatgttgagcaatgaacttgatggatctcaaaaccgtgaccaatagcttatcttcatggccctgcaggaagaaagcaagaacagaaaaaaaaaaggaaatgattagagccggttctcgagcatggagttatgttttgttatgtcaggtactcaggtgcaaaggaatcttggtgaggtgatggaaaggactctgcttgtcatactttagttgtcaaggagaacagcagatgtgttctctttctgctccaaaggagaccttaaaggagctttttttttaaaagtaaatattgtaggagattctcctacagtgcatatatatttatacaaaggagctctttttgtataggattaaaatgtgctaatggttctggtgattttcttttttgaaaactttacaggttattatagccataatactcc

SEQ ID NO: 17393 - DNA, 1389 bp, Oryza sativa
  ref <308>: DATABASE ACCESSION NUMBER: AK067840
  ref <309>: DATABASE ENTRY DATE: 2001-12-06
gacccacccaccggcgagcagctgctccgacaagcgctctctctctctctcaactccggcgaggctcacgcgcgctccgaagcttcggatagcggcagtagtcagtgcattgatggcgaccgacgtggcagcgactgagcccgaggtggcggcggaggaggctgcggccgccgcgcctgagaccacggccaccgccggggattccaagccggcgaaggagtccaaggccaagaaggccgccgcgccgaggaaggcacgctccaccgccacccacccgccgtacgccgagatgatctcggaggcgatcgcgacgctgaaggagaggaccgggtcgagccagtacgcgatcggcaagttcctcgaggacaagcacaaggaccacctgccatccaacttccgcaagcagctgctcgtccagatcaagaagctcgtcgccgccggcaagctgaccaaggtcaagaactcctacaagttgccgccgacgcgcgcgccggccgcggccaagcccaaggcgaagcccgccgccgccgcaaagccgaagccgaagccgaaggccgcagctaagcccaaggcggctgccaagccgaaggccaaggctccagccaagtccaaggccgccgcgaagcctaaggcggctgccaagccagccgcgaagccgaaggcggcggctaagcccaagtctccggctaagccagccgccaagcccaaggctgcccccaaggctaaagccaagccggccgcgaagccgaaagccaaggcggctcccaagccgaaggcggcagccgtgacgaagacgaaggcgacctcggctcccgcccggaggccggcgaaggcggcgaagacgtcagccaaggacacgcccagcaagaaggcggcgccggcggccaagaagcccgccgccgcggcgaagaaggcgcccgccaagaaggccgcgccggcgaagaaggcggccgctccggcgaggaaggtgcccgcccggaaggcgaagaagtagagctctctctccggcgagcgagcaatctagggcttcatggttgttttcttagctgtttttttttctcttctctttgttgttagttgcgaggaggggtcaggggtactagcttgtaaatttgatatcgcggcgggggtacactggtcatttcgtacccaggtggtggtgcgcgacgatgatgacgacgacgacgagacagtttgtttttagggcaatgtatttctgagtagattggtggagtttttattgtggtaacaatcttgtgatatttgtcgaaatcactttagctaagtaattaattatgcagtaattttacttactgtattggcttgaccacaccctgtattcctctgaattttcagatctggaaattgaaatgaaatataggatttgcg

SEQ ID NO: 17394 - DNA, 1962 bp, Oryza sativa
  ref <308>: DATABASE ACCESSION NUMBER: AK067841
  ref <309>: DATABASE ENTRY DATE: 2001-12-06
ggggcgacatcgttctctgtctgtcccgcactcccgccttttgccaaagcggcccgcgacgcgacacagcggagaggtgcaactctgccatcgtcgtcgcttctcaaggtttatcaatatctctctctcggcgcgtatagccgtcgcgcggagggacgagccaaggccacgccgcatccacagatcgagaatcgcgacggggagaggcgaggcaccgtgtgggccgccgggaagacgcacgcacgagatggcggcggcgtggctcgtggtgctcctcaccgtgcaccggctcctccacctctccggcgtctcggccgtcgaccgcagccagttcccgccggacttcctctttgggacctcttcttctgcttaccaggttgaaggcggatatttggagggtaacaaaggtctcagcaactgggatgtcttcactcataagcaaggtacaattgaggatggaagcaatggcgatacagctaatgaccactatcaccgttacatggaagatattgagttgatgcactccttgggtgtcaactcgtacaggttctccatatcatgggcaaggattctaccaaagggtcggtttggagatgttaatccggatggtgtagcattctacaacgcccttattgatggtcttgtacagaaaggaatacagccatttgttacaatatgccactatgatatcccacatgaactggacgagcgatatggtggatggttgagtccagaaatccagaaggacttcagttactttgcagaagtatgcttcaagctgtttggtgaccgaataaaattctggacaacatttaatcaaccgaatttgtccataaagttcagttacatggatggattttactctcctggtcgttgttctgaaccatttgggaagtgtgccttagggaattcttcaatagagccatacgtagcaggtcacaatatcatactgtcgcatgcaaatgcagtcagcgtttacagaaacaaatatcagggaaaacaaggtggtcagattggaattgctttgagcataacctggtatgaaccattccggaataccactatagatctcttggcggttaagagggctctatctttcggtgcttcatggtttttagaccctatacttcttggtgattatcccacagagatgcgtgaagtcttgggtcaaagcctacccaagttcacatcaaaacaaaagaacagactgcagagcacaaaattggattttatcggactaaaccattacacgacatgttatgtgaaggattgcatcttctcaccgtgtgaaattgatcctgttaatgcagatgcacgagtatttagtttatacgaaagggatggagtgcccatcggtaaagcgacaggagcgccattctttcatgacgttccacgagggatggaagaagcagtcacatactataaacaaagatacaacaacacaccaacatatatcactgaaaatggttactcccaagcaagcaatagcaacatgactgccaaggattttaccaacgacacaggaagaattacctacattcaaggctacctcatttccttagcctcggcaataaggaaaggagctgatgtacgtggctactttgtatggtctctccttgatgacttcgagtggaattttggatacacgttaaggttcgggctctaccatgtccactacaagacactgaagaggacgccaaaattgtcggtagattggtacaggaagttcctcacgggttcactgctgaggagaaagttcagagatgaatctcagcttcataagtttaactcttattaatccatacatgctgttcttccctttccatattactttatgtaaagtcaatatgtgatgctttagcgtacatatgcttgtacttgcatatgttcgcaattatccatcctagaccatatgcatagagtataatatgtactgaataaaagggacggatttttgtgtgt

SEQ ID NO: 17395 - DNA, 1896 bp, Oryza sativa
  ref <308>: DATABASE ACCESSION NUMBER: AK067842
  ref <309>: DATABASE ENTRY DATE: 2001-12-06
gtcggccttcctcgccccgctcgatcgctcgcgacgacgcggataaaaataaaaaaacccagttgagtgagtattaatggcgccatgttgggcagggtcttctaattcggttccctgacacggctgtcgccgcggaaaccgtttctttcttctttttttcctccctccgggggggctccttgcctcggaccacgcgccgcccgcgtgccccgcctccacgctgccgagatccggctccttcgaggccggcctccggtcacccgcgcctcctcctcttaccgtttctcccaaggattccaagccgtcccctcgtctccaccgcagccgctccaccgccgccacctccaagcccccgccgtccccgcccccagataggcgtcgcgacggcgcgatgcggcagaaggtgtcggagatggaggaggagctgaggaaggagaaggacgcggcggagaaggtgcaactcttgcagcgggaggtggagaaggccaaggagtcggagcgcaagatgctcgagtcgctaatataccagacgaagcagctggagcagacgaagatctcgctcgaggaggccaagctggagatcaccactctgcagcaagccaacgcgagcctcgaggcctcggcggcggcggcggtggtgagccggcggggtggcgcggtggagcagaggagcgtcaaggacctcgtgttcggcggcggggacgatgagatcagggccctgcgctgcgagctccggacggcgatgcagggggaggagaagagccggaaggcgctcgacgacctgtccgtcgcgctctccgacgtgacgatggaggcgaagcaggtgaagagtggctgtccgaggcgcaggccgagctggaggccgccaatgccgaggccgagcggctgaggcacgagctggacgccgccgaggcgaggctgcgcgacgtgttcgacgagcacgaccggtgcaggctcgacgccgaggagtgcgccgccgcgtggggcgacaaggagcgcgtgctcctcgactgcgtccgcgcgtccgaggaggaggtgaaccgcgaacgccaggagaacaccaagctcgtcgagtcgcagcgcgtgatccgcgacgagaacgcccggctccgcgacatcctgaagcaggccgtcgccgaggccaacgtcgtcaaggagtcgctggagctcgcccgtggcgagaacgcccggctcaacgacgtcgtcgccgagaaggacggcgcgctgcagagcctccggcaggagtacgagtgcatcaaggtcagcgaggccgccgcgcagggcagcctcaaggagctcaacagcctgctcgccgccacgacgacgacgacggccaccacgtgcagcaccccggcgtcggcgaggaccgcctccgtggcggactacggcttcgaccagcacctgccgagcgttcgtctcgtctccagcgccaagggcacaccggaggcggcgtcgcaccggtggacggcggcggacaagtccaggacgccgagcagccggaggtactcgatcggcgagcccgccaagttcaagggcggcttctcgcagtcggcgaggatgggcaacctgaaccacaaggaccgggtgttcgcgtcgctgagcaacatcgccgacctcaagtcggcggcggaagccgccatgagcgacttcgacgatgagttcgatcacgtcgacgagagccactacgacagcatggatcaatccatgaagcagaagaagaagaggccgatacttcgcaagttcggggatttgttcaggaggaaaagcttctacaaggcgaatttagcgccagtacacacttgaaaggaaaaaaaaaaaatctctcccatgtaatgaatgtcaatttgttttgttcttctcaatacacaagaaatgaaatacttttggatccaattt

SEQ ID NO: 17396 - DNA, 1431 bp, Oryza sativa
  ref <308>: DATABASE ACCESSION NUMBER: AK067843
  ref <309>: DATABASE ENTRY DATE: 2001-12-06
gaatctgagctattattcgtgaagctcacgcgcaccttctcctctccgccatggccgccgctcgctgcctcccgctccgggcctcgccgccggaggtcgccaaggccttctcctcctccatccctgcctcctcctcctcctcctcctcctcttcctccaccaccaccgcggccgcctctctccctctccgcgccgccgttcccccgagctccggccgccgtatcccgccgctccggtgcgcctcctcctcctcgtcgtcgcagggctccgcgtcgccggatatcgccgtgctcctcgaagtggaaggagttcttgcagatgtgtatcgcttcggcaatcgccaagctttcaatgtagcatttcaaaatcttgggctggattgtgcaaattggacagagccaatatatgctgatttagtgaggaaagctagtggcgacgaggaaaggatgttgttattattcttcaacagaattgggtggcctacttctttgccaactaacgagaaagaatcatttatgaaaagtgttcttcgtgaaaagctgaaagctttggaagtgttctcagcttctgatagcttaccactgcggcctggagttgaacagttcattgatgatgcgcttaatgagggtgtgcctgtcgccatattgacaacatacgggagaaatggagagaaaacttcaagatatatcattgaaaaattaggccaagagagaacatcaaaaatacatattgttgggaaagaagaggttgaaagaagcttatatggacaacttgttcttggtgaaggagtagcctccagtttggatgaacagctagttaaggaagcacaaaaggctgcttctgcagaaaagcagaggatagcagaagaagttgcgtccattctgaaacttagtgttgatatcaatgcagcgtctaaaagctccgagaagattattgtcactctacgcgctggatccgagtatgttggacgggacgtgcaaaactgtgttcttgtcgcaggtagccaatctggcgttcttgcagctgagcgcattggtatgccatgcatagttgttagaagcagcctaaccgccagagctgagtttcactctgcgaaggccgtcatggatggatttggtggtactgacttgaccatatcgaaactattgagcaagaagtggtcttgacaactcggcactacattggagttgcctgctactagtttgaatttgtatgtaacccatggattgggtatatgttacaaccaaaatgaggcctctatgtagtacattgcagaaagaaaactatgagaagcacaagctacttcaggcatcattttttttttgggaacagaaaatgtactgaactcgctgtacttggacgaggcaattgaactcattgtctggtttggtctttgcataaaagtgagtaataagatggtgatttttcatc

SEQ ID NO: 17397 - DNA, 1549 bp, Oryza sativa
  ref <308>: DATABASE ACCESSION NUMBER: AK067844
  ref <309>: DATABASE ENTRY DATE: 2001-12-06
ggtcatcccgctgcaatggccattggtgggcatgctgcccgcgctcctcgccaactgcaaccacctccacgagtggatcacttccgtcctcacagtcacaccgttgaacttccggttcatcggaccaccgagctcagacatgcggctctttatcaccagcgatccggccaacatccgccacgtcttcaacaccaacttctccaactacccgaaagggcgtgagttccaggagatcttcgacatcctcggcgacggcatcttcagcgccgacggcgaatcgtggcgccggcagcgcaccaaggcccagctgctcatgtccagcccacgtttccgggcgttcgtggcccggtacagccgtgacaaggtcgagaaggcgctgctcccgctgctcgcccacgtcgccgggacaggagacgcgtgcaacctgcaggacgtgttcctgaggctgacgtttgacacgacgaccacgctggtgttcggcgtcgaccccggatccgtcgcgatcgacttgccggaggtgcccttcgcgcgcgccatggacgacgccatgaccatgcttctcctccggcacatcgtcccgctgtcgtggtggaggttagcgaggaggctggggatcgggtacgagcggaagatgccggtggcgtggcgaaccatggaccggttcgtcgccgacacgatcgccaagcggcgggcggagaaggccagaaccgggatcgacgactcggcggacctgctctcctcctacatcaacgacgacgaagaggacgccggcacggtggacgccttcctccgcgacacgaccattaacctcatgctcgccggccgcgacacgacgggctctgcgctctcctggttcttctacctcctcaccaagaacccgcgtgtgctgcacaaactcctacaagagctcgactccgtcaagagcaccaccgccgcggacggcatggtgatcttcgacccggacgagaccggacggctcgtgtacctgcacgccgccctgtgcgagtcgctcaggctgtacccgcccgtgccaatggagcacaagggcccggccgccgccgatgtgctgccgagcgggcacgaggtgcgcccgggggacaagatcgtggtgtcgctgtacgcgatggggaggatggagtccgtgtggggcagcgactgcatggagttcaggccggagcggtggatctccgacgacggcaagctgcggtacgtgccatcgtacaagttcatgtccttcaactcggggccccggacctgcctcggcaaggacatggcgttcgtgcagctcaagaccgcggcggcggcggtaatgaagaacttcgagatcgaggccgttgccggccacgtcgtggagcccaagctctccatcatactccacatgaagaatggcttcatggtgagggttaagcgaaggcttgcggtttgctagagaaatatcggattccatggttctaggacaaggacaagagggaggggaatcaatcacgattaaacagtgctattgtacgtccatttggtgcgaatatcgtctatagcgatttgctctgcc

SEQ ID NO: 17398 - DNA, 1413 bp, Oryza sativa
  ref <308>: DATABASE ACCESSION NUMBER: AK067845
  ref <309>: DATABASE ENTRY DATE: 2001-12-06
gaagatttcctcggcggcggcggaggggatcgacggagggggggatggcgacctcgtcggtggcgggggacatcgagctggaccggccgaacctggaggactacctcccatccgactcgctgccgcaggagttccccaggaatctccatctgcgcgatctgctggacatctcgccggtgctcactgaagcggcgggcgccatcgtcgatgattcattcacacgttgctttaagtcaaattctccagagccatggaattggaacatttatttattcccattgtggtgcttgggagtagtgataagatacggaatactattcccgctgaggggcctaactcttctagttggatggttagcattctttgctgccttttttcctgtacatttcttattgaaaggtcaaaagatgagaagtaaaatagagagaaagctggttgaaatgatgtgcagtgtttttgttgcttcttggactggagtgatcaagtatcatgggcctcgcccaagcacacggcctcatcaggtatttgttgcaaaccatacatcgatgatagatttcattattctggagcagatgacagcatttgctgtcattatgcaaaagcatcctggatgggttggatttattcagaagactatcttggaaagtgttggttgcatctggtttaatcgcaatgatctcaaggatcgtgaagtggttgcaaaaaagttacgagatcatgttcaacatccagacagcaatcctctcctgattttccctgaaggaacttgtgttaacaaccagtacactgtcatgttcaagaagggtgcttttgagcttggctgtgctgtatgcccaatagctatcaaatacaataaaatatttgttgatgccttctggaatagtaagaagcaatcgtttacaatgcacttggttaggcttatgacatcatgggcagttgtgtgtgatgtatggtacttggggcctcagtatctgagggatggagaaacagcaattgaatttgctgaaagagtaagagacatgatagctgctagagctggtcttaagaaggttccgtgggacgggtatctgaaacacaaccgccctagtcccaaacacactgaagagaagcagcgcatctttgctgactctgtgttgcggagactggaggaaagctaaacagatatcaatcaactctggtgctcattggtgagtccaggttactaatgtcctagtgtgtatctgggtctctggagtatgtggaaattaccactgcagttttgttgtaaattgtttgcagcttggcagaatcaacatttaatagcctgtattagccaagattttatgattggttagggttaacacataaatattataccttcccaaatgatgtattaatacttaccctctgcctgatgccctgatcattctcatc

SEQ ID NO: 17399 - DNA, 2425 bp, Oryza sativa
  ref <308>: DATABASE ACCESSION NUMBER: AK067846
  ref <309>: DATABASE ENTRY DATE: 2001-12-06
gcgttagcgggccgcgcggcgccgcgcattgcttcacctccgctccgcgcggctgaaaccgaaaaaaacccaatttggatcgaagcggggagagaggacttgaggagacgcgtcgtggagggaagtttttgaaaaaaattttccccaacccgctgggcgcgatgccgtcatgatcccccccctcgcctcgctgcccaaaaatttttcaatctctctcgcccacattaatcaccttcctcacgaggccaacgagcagaaatcccatttcatcatcattcataccaatcctctcggtttcttccgcgtccccggattcagtttcctcctcctctccccccctctcgatccctcctcctcttcccctcgttccagcgcgctcgccgtcgcccgccgccgtccgccgaccatggaagcagctggagtggaggtgaacggaggaggaggaggcgacgtcgtggtggtggtgccgcagcagcatgaggtggcggcgaagcaggcggcggcggcggcggcggcgaaggggaagtccgtcgaatccaagggggtccgcgtcgtcggcggccggatctatgatccggagaacggcaagacctgccaccagtgccgtcagaagacgatggacttcgccgcgtcatgccacaagatcaagaagaacaacaagcagtgcacgatccagtactgccgcaagtgtctctttaacaggtacggccaggaagccgagaaggtggccaatgacggcacctggacttgccccaagtgcaaggatatctgcaattgcagcttctgcatgaagaagaaggggctgccgcccaccggaatacttgcccatgctgctaaggcttcaggttgtgcttcggtccatcatttactgaaaaaggggaaagaagcggtggctgccgcgcagaggagcacccagaaagtgagatctacacctgtgaagaagagcccaaagagggccatacagccagatgctgctgctgatgaacctttggctgaaggggatgagaatgtatgcattgatttcaatgctgctccagtgaagaagcagaagagaagcaggaaggtgggtaatggtgtggctctgacgaaggatgaaagccctgatgctcccaaggaacaagttgttctgcccaagggcactccagtcactagtgttgccggtgcagagtgggagcctgaagatgttggtcttgcacttcagttcttcgaattctgccgcacatttgctgagattttccaagtacgcaagggtcaaccagaaagaatccttcgggacatagctggaggtcgtggacttcgagtggtgtcctcagtcatcgctgacttccacataactttgttatccatcatccaagaaggccgaggaatcaagcctatcacatattcaagagataatgatgcatggattgttgatactggaaaatgcataagcgagtcaatctttgtcccagagggacttccccttgactccctaagtcagggggtatcgggatataaaaatctgagcccttcttgtaagctcagtgttctgaactttttgtgtgatgaaagtctttctactgagaagttgaggagctgcatattatctgaaacaaaaaacccctccagagaaaaagctcattctgcaaaagagaaggaggagccaaaagaagaaactataaagaacacagatgaagcagtgcttttgaaaactgaaggagcagctgttgctattgaggaagataagaatggcatttctcaacaaaaggatgtgaaagaagtaaagaatgcagacacaaatgaaaagaagcatggaggtttccttaggactaatcctttcatggtagacaaaaaggtaatctattggaagctggatgactattgtaataacacaacaatgatgctccaagaggttgatgctgatgatttaatggggaacaaagacaagtggtttatgcttaatgaagatgaaaagaaaatagttgaaaactatttatccacaaggcctaaacgcagggggagaaaagctgcacaatagtctactgatcatactctctaggttcctcacctggctgaaggtgggtggactatgctagttgagataaggcaacctctgttgaggccagaagggccattttttgctacagaaaatttgcgcaattacagaagaaccaagaattgttggatcattcacagaaattgaatcagaagcttgaacaagttttgtccagatggcaaagccggcaacttttgtaacacctttgcagtttcctagatgatactgacggaaaatgtttcagtatgatcgcgttatactgaaatgttgcactatagcaagagtttgctatagtcagtcaacccccgttaccgtggtgtggttaaagttaaactgttgtgtgtaacatgtgactgtcgataatgactatccatccattcagttcagtgc

SEQ ID NO: 17400 - DNA, 2090 bp, Oryza sativa
  ref <308>: DATABASE ACCESSION NUMBER: AK067847
  ref <309>: DATABASE ENTRY DATE: 2001-12-06
gagctctacaccaagagcgcttataaacataaaaaacatctcaaacacaacccaaaatagggccaaaattctagaatattatttttgttttgaaaggaatttaagtttgtgtggtgtgtcatccatggcggacatggtgaagttcaccatggagtggcttcaggatcctctgagcctggcgatcgtcgtcacggtggccgtcctaatcatgcggatgcagcggcggcgcgcggcgccgttcccgccggggccgaagccgctgccgatcgtcggcaacatggcgatgatggaccagctgacgcaccgcggcctggcagcgctggcgaaggagtacggcggcctgatgcacctccggctcggccggctccacgcgttcgccgtgtcgacgccggagtacgcgcgcgaggtgctccaggcgcaggacggcgcgttctcgaacaggccggcgaccacggcgatcgcctacctcacctacgaccgcgcggacatggcgttcgcgcactacgggcccttctggcgcaagatgaggaagctgtgcgtggtgaagctcttcagccggcgccgcgccgagacgtggctcgccgtgcgcgacgagtccgcggcgctcgtgcgcgccgtggcggcgtcgcgcggcgaggccgccgtcaacctcggcgagctcatcttcaacctcaccaagaacgtcatcttccgcgccgcgttcggcacgcgcgacggcgaggggcacgacgagttcatcgccatcctccaggagttctccaagctgttcggcgcgttcaacatcggcgacttcatcccctggctcagctgggcggacaccaacggcatcaacgcccgcctcgtcgcggcgcgcaccgcgctcgacaggttcatcgacaagatcatcgacgagcacatggagcgcggcaagaaccccgacgacgccgacgccgacatggtcgacgacatgctcgcgttcctcgccgaggccaagccgcacgccggcaaggccgccgccgccgccgccggcgccggcgacggggccgacgacctgcagaacacgctccgcctcacccgcgacaacatcaaggccatcatcatggacgtgatgttcggggggacggagacggtggcgtcggcgatcgagtgggcgatggcggagatgatgcacagccccgacgacctccgccgcgtgcaggaggagctcgccgccgtggtgggcctcggccgggacgtcgccgagtccgacctcgacaagctccccttcctccgctgcgtcatcaaggagacgctccgcctccacccgcccatccccatcctcctccacgagaccgccgccgactgcctcgtcgccggctactccgtccccaggggctcccgcgtcatggtcaacgtgtgggccatcgcccgcgaccgcgccgcctggggccccgacgccgacgcgttccgcccctcgcggttcgccgccggcgccgccgccgaggggctcgacttcaggggcggctgcttcgagttcctccccttcggctccggccgccgctcgtgcccgggcatggcgctggggctctacgcgctcgagctcgccgtcgcgcggctcgcccacggcttcaactggtcgctccccgacgggatgaagccgtccgagctcgacatgtccgacatcttcggcctcaccgcgccgcgcgccacccgcctctccgccgtcgccacgccccggctcacctgccccttgtactgacggcggccggcgaccgcggcggcgtacggcaagaatggtttgcaggtgatggtgttaaaagttcagacgcgtgtggcgccattggaggagcttggtgtggctagcttagcttcctctgggccttttttttttttgctggtttaattttcttttttttttctcctttgtaatttaatccatgtctccagaacaataagtggattagtagggtataattaagggtgacagtgtgatatatagactataagatcaaagttgtaaatttggtgtccggtgtgcctgtccacataagcacagcctctgaattttcttgtaaaactttgtcatgaaaattgagaaagaaaacacctcgctttccacgcgtacgcttacc

SEQ ID NO: 17401 - DNA, 1238 bp, Oryza sativa
  ref <308>: DATABASE ACCESSION NUMBER: AK067848
  ref <309>: DATABASE ENTRY DATE: 2001-12-06
gaatttatagtcactccccacctgtatgtacccttggtacggagcgttatgcagccactggtgagcacatccgccgcagcagctgcgattccctcccctcctcctcccgcgctcactcttccgcctccacgccggcgaatccccccgcccctcaccgccggagccctcctctgcaaccgcaccggctccggccacgccagcccgcggggaagacgacccctacccccgccggcgatgtcccacccgctctcctccgaacctcatgctttggaacaaagggcagtggtagtaaccaacaagcatggggagaagctcgtgggagtgctgcatcacacgggttcaagcaagatcgtcgtattgtgtcatggttttatatctaccaagaacgacagtctcattcttgacctgatggctgcattgacaaagaaagggattagtgtctttcgctttgatttcagtggaaatggagaaagtgaaggagaattcgagtatggaaactacaggaaagaggctgatgatttgcactccgttgtatcatatctttgtaaggaaaagtatgatgtaacagcaattgttggccatagtaaagggggagatgtagtaactctatatgcttctatttatgatgatgtacgcttggttattaatgtatctggtagatttgacttagagaaaggcattgaagaacgtataggggaaggatcaattgatagaataaataaagaaggctaccttgatgtcaaggataaatcaggaaatgtacagtacagggtaactaaagagagtttgatggagcggctcaacaccgatatacgtgctgtaggcatgtccattaccaaggaatgcaggttcttcacagttcacggttcagcagatgagactatacctgtggaagacgcctataagtttgcgaagcatataccgaatcacaagctgcaagttattgagggagcaaatcataactacaccgcgcatcgcgaagaattggctgatgctgtagtggatttcatcacatctaattaggtatagaaaacctatctgttgaattattcatcctggtctctatgggcccttcagaaattactcttttctccacagttctgcatgtctgagagactgagacaacctcattcacgagagatgacttcttgtgatggaggatccttgtgtaggttttgtgccatttctctgccttttctcctctaaacaggtataaatctttggggaatcaaataagc

SEQ ID NO: 17402 - DNA, 1332 bp, Oryza sativa
  ref <308>: DATABASE ACCESSION NUMBER: AK067849
  ref <309>: DATABASE ENTRY DATE: 2001-12-06
acattaaggttcaaggtattattggaccatgcacatctttggaaaagaaaggagctctatgtgccgacacagttgttggtcaaggaaatacaacagcatggaaaatgtgtggtcttgacaggaatacttcattaacagtattttttgatgtctcaccgagtgagcggtcaagccaaccaggacatcagaatcccgatctgtatatacaatttgtaacaagttaccaacacccagaaggtcaaatgaggattagagttactaccatatgcagaaaatgggtggatggatctaccaacacagaggaattagtcgagggttttgaccaggaaactgcagctgttgtgttggcgagatacatctcgttgaaaatggaaatggaggaagagttcgatgcaacacggtggcttgatagatccctcatacggctttgttcaagatttggggattatcggaaggatgatccatcttcatttagcttgcattcaaatttctctttgtttcctcagtttatgtttaatctacggcgttcacaatttgttcaggttttcaataacagtccagatgagacagcttatttccggatgttactcaaccgtgagagtatcactaactcagttgccatgattcaaccatcattaatttcattctcttttgatttgcctccatctcctgtattcctcgatgtggcatcaatagcagcagatcgtatactgctacttgatgcatacttcagtgttgtcatcttccatggtatgacaattgctcagtggagaaacatgggttaccagaatcaacctgagcatcagcaatttgcacaattgttgcaagctcctcacgaggaggctcaaataataattaaaggacgatttcctgctccaagactagttgtctgtgaccaacatggctcacaggcaaggttcttgttggcaaagctgaacccatcggctacatataactcagcacatgatgttcctccaggttctgacatcatattcacggatgatgttagtttccaggtcttctgtgagcatcttcaaaggctggccgttcagtcctaaggacatgtatgcaaagttgtacaccgtatctgatagctatatttactgagtttggtaggtctgagttgtgggagatttctgctttccctttttttgacctcatgtgttcttattacatcgtgtcaggttttccgacatcagacaattttttcgggaaataatcttgaaagcatgtataagttgtccccataatattatttatccatcatatatacttctttatattgacctcactgtcatcttaaggtgtatagacaagtaagatttttgtggt

SEQ ID NO: 17403 - DNA, 1444 bp, Oryza sativa
  ref <308>: DATABASE ACCESSION NUMBER: AK067850
  ref <309>: DATABASE ENTRY DATE: 2001-12-06
gagtagtggagcgcgagctgaagaggaggaggggagtggaggaggcggcgctgcagatctggaggcggagcggcgaatggtggtgtcgccggcggccgccgcgatctaggcttgccgcgcgcgcgcggatctgcgagctgcgtagccgtttctcgctgtgagtggaggaggaggaggaaggggaggaggatggcggcgaacgcggggatggtggcgggatcccgcaaccggaacgagttcgtcatgatccgccccgacggcgacgcgccaccgccggctaagccagggaagagtgtgaatggtcaggtctgccagatttgtggcgacactgttggcgtctcggccaccggcgacgtctttgttgcctgcaatgagtgcgccttcccggtctgccgcccttgctacgagtacgagcgcaaggaagggaaccagtgctgcccccagtgcaagactagatacaagaggcacaaaggtagccctagagttcagggcgatgaggaggaggaagatgttgatgacctggacaatgaattcaattataagcatggcaatggcaaaggtccagagtggcagatacagagacagggggaagatgttgacctgtcttcatcttctcgccacgaacaacatcggattccccgtctgacaagtgggcaacagatctcaggagagatccctgatgcttcccccgatcgccattctatccgcagcggaacatcaagctatgttgatccaagtgttccagttcctgtgaggattgtggacccctccaaggacttgaattcctatgggattaacagtgttgactggcaagaaagagttgccagctggaggaacaagcaggacaaaaatatgatgcaggtagctaataaatatccagaggcaagagggggagacatggaagggactggttcaaatggtgaagatatgcaaatggttgatgatgcacgtctacctctgagccgcatagtgcctatcccttcaaaccagctcaacctttaccggattgttatcattctccgtcttatcatcctgatgttcttcttccaatatcgtgtcactcatccagtgcgggatgcttatggattgtggctagtatctgttatctgtgaaatttggtttgccttatcctggctcctagatcaattcccaaagtggtacccgataaaccgtgaaacataccttgacaggcttgcattgagatatgatagggagggagagccatcacagcttgctcccattgatgtctttgtcagtacggtggatccactaaaggaacctcctctgatcacagcaaacactgttttgtccattctggctgtggattaccctgttgacaaagtgtcatgctatgtttctgacgatggttcagctatgttaacttttgaggctctgtcagaaactgcagaatttgctaggaagtgggttccgttttgcaagaagc

SEQ ID NO: 17404 - DNA, 1553 bp, Oryza sativa
  ref <308>: DATABASE ACCESSION NUMBER: AK067851
  ref <309>: DATABASE ENTRY DATE: 2001-12-06
gacacacacacgcacaacgcccaaactggtgcgcacctacacccgcgcacacaacacagacacggacgtacactttgcacctctctcaccgcacgtagtcgccatggtcgctgtcaccgtgatgaggaagtcccggaacttcgtcgggccgtctcctccgacgccgccggccgagatcacgacgacgctcgagctgtcgtccatcgaccgcgtgcccgggctgcgccacaacgtgcggtccctgcacgtgttccgccgccacaagaacagcgggcccgtcgtcgacggtgatagcaggaggccggccgccgtgatccgcgcggcgctcgcccgggcgctggcggactacccggcgttcgccggccgattcgtcggctccctgctggccggcgacgcctgcgtcgcgtgcaccggcgagggcgcgtggttcgtggaggcagccgcggactgcagcctcgacgacgtgaacggcctcgagtacccgctcatgatctccgaggaggagctgctgcctgcccccgaggacggcgtcgaccctaccagtattccagtcatgatgcaggtgactgaattcacttgtggaggatttatcttgggccttgtggcagtccacacccttgctgatggacttggagcagcacaattcatcactgcagtagctgaattggcccgtggcatggacaagctcagggtggctcccgtgtgggatcgctcgctgataccgaacccacctaagctccctcctgggccaccaccatcgttccagtcctttggttttcagcatttctccacagatgtcacctctgaccgtatagctcacgtgaaggctgagtacttccagacctttggccagtattgttccacctttgatgttgctactgctaaggtttggcaggccaggacacgggccgtcgggtacaaaccggagatccaggtccatgtgtgtttctttgcaaacacgcgtcacctgctcacgcaggttctcccaaaagatgggggctactatggcaactgcttttatccagtgactgtgacagcaatagctgaggatgttgccaccaaagagttgcttgatgtgatcaagataattcgggatggaaaggcgaggctccccatggagtttgcaaagtgggcttcaggggatgtgaaagttgatccctacgcattgacatttgaacacaatgtgctttttgtgtctgattggacgaggttaggattcttcgaggtagactatgggtggggtacacctaatcacatcataccattcacttatgcagactacatggcagtcgcagtgcttggtgctccaccaatgccaaagaaagggacccggattatgacacagtgtgtggagaacaagtgtatcaaggagttccaagatgagatgaaggccttcatataatatatattatatgtgtagtaggttggaataaatttgctatttatgagtagtatttgcagggtccaatcaataccatgcttgttgtattgtgttaaatacatgatatatgacctggacaattatatatacgtgtgttaattaagttataagg

SEQ ID NO: 17405 - DNA, 2338 bp, Oryza sativa
  ref <308>: DATABASE ACCESSION NUMBER: AK067852
  ref <309>: DATABASE ENTRY DATE: 2001-12-06
gcacacgttgtactacaaccctagcagtcagctctgctttccccaacgcgttctcaaccctactccatcccacttcgttgtcatctctgatgaatcttttctctcctgctgcaggctgcgtgtgcgcggaggaaaggaatctttatggagccaaaatttcgcagagataggaatggaatccttacgaagccaaaatttcgcagagaggaggatatctgtttgaggaaaaaaaggacggggtctcccttcctgcaacagaaccgcgtgatgatgttaccgtttgatgtgacgtaccttagtttgtacgcgagattcaacaagatgaaggggccggtgggcaaggcgtcacttatttgcggaggaaaggaaacccatgatgccaaaattttgcagataggagatggaggagattcagttcattgtgtgcaaaaaagacgactgatctccccctgcaaatgtgtacggaggaagcctatgattggtattacaactcgtattgatgagcactacaccatggtgtttttcgagatcccggcgagcgtggattcagcacaaggcccaatctttctttggaacagttgagtgttggccctggggacactgcggacttactgcggaaagtacttccaggcattcgtgatgcaagtaagacctttgctatccctgcgttgaagcaagtgtttgaggacagcattcgtccactacttgtttcaaagtgtttactcattcaccagcctcttgataaatccatgaaaactttcaaccaaagaacaaataacctgttgaagaagtctccacgctacctcagtgccctagatgtgaccacagaaaaggaaatcctgctggaagatgaatggactttgttccttgagcacatctttaaacatagggtcattgttgtagatgattggacaaagtgctacgggaccgttcagaccttcctccactcgagtgatgctgaatcatgcagtgattctttcaagggggagtgtgatgcttcattctgtgagcaaactggaaaggcaaaacttgcctttgtcatctttaaagagggtaaacttgtctgggctgaggttttccatgaggtaccttgcaagagtgttgtggaggcagaggctttggcagtcatagctctcctcttcaagcttattgaccttaacttgttaagagggactgtttggaccgacaacaaggtctgttataatgtgctgaatggtgaatatgagataaaggttgatgatcccaacaggtcgctgtttctgtttctgaggagtttgagaggtcgctttgagtccttgaccccggtctggaaacccagagaactactgctgatcccagatcgtctggttagtatggttgatgaccccctgatatcaaggaatagattggtactcagtatactggaaaaaacagttccaattcttagtcagccgcagttcaggatatcatggagcagctatctgggaacaatttttgacaaacgtgatggtggaaaacaaatttctaacacaacaaatgaaattaaggaatcagatgaatccgaggattcaatctgttgggttaaggctgatgatgaagaagctgaaattgcttcctttcttgaaattatgaaaactttttcagcccatcgcttgcttattgtggttgacaactttgaagacaaatctcctcattatcaaaagttaattaaggatctctctcaaaagttttacacgtgttggatgagtaaagaaggcagtgtcacaattgtggagtatgactctcctaacactgaagagaaagagaccaaaagattggtggttatgtttggtgggacaatggcactggatgaatatatccaccaaaaaaatctctgtacagttgttttggtgaagacatctgagattaagctgctaagagatgctggaatcgaagaaataagtgctaagacacttctgagttttcgcaacatcaaagcaaaaccagttgtgccaaagaaacctcgggaggatgaggatctagagaaggggggggggggggggggggagggcaggtggtgaataggatgaggagagggcaggtgtgaagataaggtggacaactcactgaacttcagtcttttgcatgattccttgcgacggcagattccttcggtcttttacatgtttgatactttgatgcatcgttgagacagttttttttgtacctgaatcatgatgttcatgtcacaaccgtacgtgatgctcaagtaatcttatctgacaatgtagcttagctaactaaaacatatgaagataaaggtggacaactcactggacttcagtcttttgcatgattccttgcgacggcagattccttc

SEQ ID NO: 17406 - DNA, 1802 bp, Oryza sativa
  ref <308>: DATABASE ACCESSION NUMBER: AK067853
  ref <309>: DATABASE ENTRY DATE: 2001-12-06
gcccctctctctccttcaaagcaggagaaaagaagaaaaattgattgctctctcgttccgttccggaggagagagagagagagagagagaggagagcggcggcgatggcgtcgtcgtcgtcgtcggcgtcgagcaggttctcgccggcgctgcaggcgtcggatctcaacgacttcatcgccccctcgcaggactgcatcatctccctcaacaagggcccctccgcccgccgccttccgatcaaacaaaaggaaattgcagtgagcacaaatcctccagaggaagcagtcaagatttcactgaaggactgtttggcttgcagtggttgcataacatcagcagaaacagttatgcttgagaagcaaagcttgggtgacttcattactcgcatcaactctgacaaagctgtcatagtatcggtctctccacagtcaagagcatcgctagctgcattctttggtctttctcaatcacaggttttcagaaaactcactgcgctgttcaagtcgatgggcgtaaaggcagtttacgacacaagttccagtcgagatctgtccctaattgaagcatgcagtgaatttgttactcgttatcatcaaaaccagttatctagtggcaaagaagctggaaaaaatcttcccatgctttcatctgcatgcccaggttggatatgctatgcagaaaagactctcggttcatttatcttgccttacatctcagctgtgaagagcccccaacaggccattggtgctgctatcaagcatcatatggttggaaaacttggtctgaagccacatgatgtttatcatgttactgtgatgccctgttatgataaaaaactagaagctgttagggatgattttgttttctcagtggaagataaagatgttacagaggtagattccgtattaaccactggtgaagtgttagatttgatacagtccagatctgttgatttcaagaccctagaggagtctcccatggacagattattaaccaatgttgatgatgacggtcaactatatggggtttctggtggctcagggggttatgcagaaacagtctttcgacatgcggcacatgttctcttcgatagaaaaattgaaggatcagttgatttcagaatcttacgaaattcagattttcgtgaggttacgctggaggtggagggcaaacctgttcttaagtttgcactttgttatggattcagaaatctgcagaacattattaggaagattaagatgggaaaatgcgaatatcactttattgaagttatggcatgtccttcaggctgcctgaatgggggaggtcaaataaaacctgccaaaggccagtctgcgaaggatcttatccaactactagaggatgtgtacatccaagatgtatcggtatccaaccccttcgagaaccctattgcgaaaagattatatgatgaatggcttgggcaacctggttcagaaaacgcaaagaagtatctacacacgaagtatcacccagtggtgaaaagcgtggcatcgcagttgcagaattggtgataacacagtggtggaaagcatttcccagtgtgggcagttgcttgtgccatcttggtgccctgcccacactaagcaaacactgaacacacagaaaagaaatacacgtcatcaaagattttgcatgcgggcaaatgaattttgttagattgtaggttttaccagcttttcttggtaatgtttgtatactacctcctcactgggaaacacagatgagattgtaacatgtaaaaacgaagtgaaccaaatagtagttgatctactcagctg

SEQ ID NO: 17407 - DNA, 2240 bp, Oryza sativa
  ref <308>: DATABASE ACCESSION NUMBER: AK067854
  ref <309>: DATABASE ENTRY DATE: 2001-12-06
gaggcgccgaatcccacgcggccgctgccgcgcggcgctggcgaaggagcaaggggccacggccgcggccgcagtcccgcggcgtgcggaaggaacaggactttcgcttgtgggcaaacaacgatgtatccgtggagtatcaaatttcagaagcaacactggatccacaaccgaaaatgattatatttgttcagactctagggtattcaattacagaaattctagtggcacttctacaagatgttctgccggtgaacaactgaaaaatggaatgggaagttgtcattcacagccttctgtgttggcagaattaatgcatcttgatacagcaaaggcagaaacttccttttcgagttcaagacggagcaaattctcttacaattggaaatcgcttcatggaagtagtactacctcaagttatggatcaccctgtcatcctatgttcaacctcagcaaacacagtactaatccgaagccacctccaccattaaaggactccgcacggatgagtaatttcagttatcaattggttagaagtgctgaaagtccaaagaatgcaaaatattccctatcagagaaaatgtcacacttactaaaaccacctaatagtagcagtcatcagaatggaaacttcactgttggtgctttaaagaggcgtcataatattgcacattttggaggagcaatcaacaagcttttgaaaaatgaggttcataagaaggccaccccatcagagggaagacattggcagactttattggataactcattaatccgacagaataaattgtactgttcagagccacgcaatgaagaatcaactgaacaatcatggagctctacagacagtgagtctgagaaggctgtgtgcttttcctccagtggcagcattgctgatttgcatgcatcggtttcaactgacaccagtgactcaagtgaccactctatgtcatcttcgtgcctatcagtaaatgatcgatggaagatgacttttaagaaggtacactgtgcccttgctgcaaatttagactctatgtatgtcactaaccacaaggagctagagcagccaagtccagtatctgttcttgaaattccagatgaggatttctctgtcactaaaagcatcaagctagatctccatccagaaagtgaacttgttagatgtccatctgttgagagtacagctgaggtaggagaaattggaatcagtgattatgctttgggggtggatggactagatgctagtctgaacggtgaagcaatacagcttgttgaagatatctttgaagaatttggagatgaagaggaaagagaattttcttacgtgctggatatactgattgtttctggcattcatggcaccgcggaggatcagctgtacaaggtatgccaatctcttgattgtcccgcaggctatgatgtgtttgagaagcttgaaaagaagtacatgaaagttgctgaatggtcaagatcagacaggaagcttatctttgatatggttaacaccatattatcagaaattcttgcaccatgtttggacatgcacccgtgggtgaaatctgctagaaaaatggcaccagtatggggttcagagggtctcctggagaagattttgcagatgttggttcagagacgggaagaacttgggctaagtaagactaagcctgagaagaaagcgttagatcggaagtggccagatttatcggattgcattgacagggtagggagggatgtggagaacatgataaaagatgatcttttggaagagatgcttttggatctgttcagttaggctgttggctgctttcagagtttcaggtttccatggcacaatacacttgcttcccccttatttagtttttgatttttcttaggtacttctcagcttgtaatgtttcttcgttggttcataaggtcaaaagtttttttttttttttggtttgttgaagcagtggttgacgagttttttagttgagtcgccgtgcttgaggtatagagcaagttgtaaattttgttagtttagatcaggtccgtagattaaattcttttagaacgagaaagggcatcccataggttgtaagtctttggcggaatgtataaggagtatagtggctctctatttgttggattttctcagttgaaggcatttaagtctgtaaatcggggaaatagtaccctgccaacatttgtattgttcattggagaataaatgaagtgtgtacttctgagttttggttgag

SEQ ID NO: 17408 - DNA, 1769 bp, Oryza sativa
  ref <308>: DATABASE ACCESSION NUMBER: AK067855
  ref <309>: DATABASE ENTRY DATE: 2001-12-06
gaagggactcaaggtcatctctcagatctttggtcagtacaatagtacaatgttttgggcttttcatgctcctctgcatctaatctcctttcttgcttgctgacatctctcattttctactgacggtcttctttcttgcattctctgaatggtttttgcagtagtgaaggagcatgagatgcagattggtagtccgacagacgtgaagcatgtcgcgcacatcggttgggatggcctgacagggaatgcttctccaagctgggtaaatgtacctgaatttcagtgaaatgatacaatcatcttcttgtttcaaattgtctgatttctctcatctgttctttagatgaatgacatcagggcatcgtctgaacttctgtctttgggcaactttgcaccatctgcagggacctcttgggcttctcaaggtatggcaagaattacttgttcttcagagtggaagattttctgtgttggtgcgattgcttcatatgattgtggcttctttgggaaaggctttggtctgtcttatgagtggcatgtatggataagcatgcaaacttggcaagttactctagtttaatcctagaatcatgggcacgtctgcatgttcttgatctgggatccggagttgcagggaacactccgataaaacaaatccacacttctgatttcctaactaccagcagcatcttttgccaggcaatggattgtgtgtacacatgattactgaaccttttgaaagaaaacttgatgaatgataaaaacatgtaagcctctggtaatcctcttcaatcattatgtgattgatggttagaatcacgagaatcgaaatttattacgagttaagtaagtgtgaggaagttcagagaaaacaatgtttaaccaagaacaatacactgtatcatgcatagtttaatactgcaatacggagtgagctcgagacgtggtctagctaataaactagcagaaattttcttgttgaactcatatggcaggacaggattcggatttgataagaacatgatgtccattgtccactcatgcataaatagatccttcccaaggcacaaacaccgtagattagattcccattgtcacaaactgctgtctgacagacaacaaacaagcatgctaatggccacggaacgactgaaattttgcatgatcactcaacatattcagttaaacactgctgcaacaatgcagttcttggacagcatcagcaatcggccatgtcgatcctaatgtcttcttggcactcacatgctgatctgcttccactgttgggacagatttcgaccagcctcgagactcgtcgtccttcgccacgccgtcagagaacaccagcctgcagcagcaagaagcggcgccgcctcctgacataccacgcccgccggcggcgaggaagacgaggcggaagcggaggtccacgagcgactgcccggtgccttcttcttcttcttcggcgagacccagctgcgattccaccatggcgcctgcttccgacgccaatgcgtcgcaagatcaaaactgcaactctgcaacgtgaagtgcagcactgatcgaatttccgggtgtgctactgctacttgcgcagagagtgctgtacatcgttgtctgttcagtgctctctgctttgcgccaactgtacatgtaaatgggtttggagtttggagtgcagattaatcggcgatcgtacggagaaattggaatgtgatcgccgtttgtgtgtttgattgtgactaaccagagaagttaatttgatgtcc

SEQ ID NO: 17409 - DNA, 3460 bp, Oryza sativa
  ref <308>: DATABASE ACCESSION NUMBER: AK067856
  ref <309>: DATABASE ENTRY DATE: 2001-12-06
gatcggcattcggcacaccacacctcctccacttctctcgtcttccttccttcctcccccaccacgccaccgatctgacgaggaggaggaggaggacgggaggcttcctcgccacgccgccctcgccgccggccacctccgcctcgccggaggagcggatcgccgacgccgccgccgccgccgccgccatggcttctacttccgccgcctcctcctcctcctccaagtacgcgaagcaccggcggatcggggaggaagaggaggaggaggaggaggaagcgggggaggccgaagaggagctagagcggtttgacgatttcactattgcttcatcatgggagaggtttatatctgagatagaggcaatttgccgtcaatggcttgctgatggcccaaatatcttgacgcaaaaaggtgcagagagtgtgccttccttcgataacttgtatgtggtcaaacgtgaattgaagcatgggaaaagagtttattgtatggaatatcatttcatgaaatctgcaaaagggaaacattcatactgggacgatgatacacatagtatgcagctctcttttggagtatatgagtttctgattattgctcccttgagtgccagtggtgtggtgcttgatgatcctgaatcaactaagcttttgagttcagtagcaattgctctgtctaattgtggaagcaattggccagcctttgtaccagtgcatgacccttcacgtaaagcatatataggaatccaaaatttgggaactgtatttactcgaagatttgaagctgatcgtattggtagccaggttccgatacgactcatgcatctggaggggttacacgagctgtttctatcaaaatttgtcctatcctctacagattttcctgcaagggtaaaggtaatcttctccatgaagcttacctacaggactcctgaatatgattactataacgaggaaactttggtgtccgaagctaacgagtcaatagcagaaagcgaagttgcaaaccacccaaaaaaacaatgggatgatgattgctcttgggcagagtggtattctgctgaggatccagtcaaaggttttgagttgactgccatttggggagagagagtgtttgaagagacccttgagatggctgaggtggaaaatgcttcgtcatttgatgctgatcgttggcttcttcacccaattgtatctccatacatggttgatgattctattggaaagtttgtggggtttgcatcgcagctgcaacttctggtaaaagcatttgaatcatcagcagaggcacagtttttggaagattttgttgcagcagatacttcaggccaggaaaattcaaaatctaccgtcactgtacctccaccatctgttgttgatcgtgttatgaaagatcttttcaatgatgaggttgggaactcgaattatgtggaagcagaaaataagtatggccgcgctatgaaaggagcaccttcagattcactctttgcccaattctgtttgcatgctctgtggttcggcaactgccatatacgagcaatagcagtcctgtggattgactttgttcgtgaaattcgttggtgctgggaggaatcagagcgattgccgaggatgaagagcacttctagtatcgacctctgtacttgtctgatacaccaaaagttgcatatgcttgcaatatgcattgagagaaagaaatcattgagtcgcgagaagggtactgatcatgcacatgaagatggtatttcaaatagcgtggcacaaaataagactcgtaaaggatcagcaggtgtcgtcccctcaatgatgcttctgaatacatttcaagaaatgcatgcaccatatactcaggatgcacttttgatgactgaagatatgcatgaagaaaggctccatgctgctgaagcttttggcaatgctgttggattatctggtcaattggaacgagatgtattatcttctgatatgtctgcttttaaagctgcaaatccagatgctgtttttgaagattttattcggtggcactctcctggtgactgggtgagtgaggacggagcagaggattcttcaggttggccacccaaaggaaggctttctcagcgtatgtctgaacatgggaatatgtggcgtaaaatctggaatgacgctcctgctttacctgtctctgaacagaaatttctgcttgatcctattcgagagggagaaaaggtaattcattaccttgaaactttaagaccacagcagctccttgagcaaatggtctgcactgtgttcaaatcgtcagcagacatactgaacagaaccacatatggtggctttaaattaatgaagactaaaatggatcagctatatgctacgttggcttcaacattgaagtctctccaaggtaaatctgacatcagtgatttgtctgatgacttgaagcggctttgtcaagttttcgagcacattgagaagttacttattcttgctacttcagtccaccgaaaacttattgatgctccacgtctgtctcaagcaattttcgctgactacttcaattactatctaccaaaaatgggcactagcttggaaagtgtttgctatgagaaggaattcactgctaaggaaaaggtggggatgcatgagagagatgctgtatcaaatctgtttcctcctccaactgctaaccaatcatggaggaaagttttgagcatgggaaatcttttaaacggtcatgaacccatacaaagagaaattgtattctctgtcattgaaagaattagcaatggccactattcgagcccaaccccattaagtacagatgaacagattgagacacatcggatgtatatatctgggacgtccaatgatctttgggttgcattatctgtgacatcctgggattgaaccagtcagatggtttacctatgggttgataggagtatccagctgagcccggaagagtggatcatgtgatagcaatgatggttagtgttgtgtcttgttgactggttaagcagttggcacaatgttatcagcaaagggaagtatcagttcgtcatccacgaaaagtgacaacggggaactttttttgacagcggggaactttatgaaagcaggcagaaatttaatctcgcagcaatcagagttcagaaaacagaaccattttgatgggagtacaccgagtaaactatttgatccgtttttctgtgggggtatgtgggatacacagctgcactttagatgaagggactttttatatacgagctatggatgcaattttcaaggatgagaatgtgctaaatgccagcaagaaccgtttgtgtgaggttctgtttgcatgttaggtctgttcactcaagctttatgtgccattgtttcatagtttctagaagtgaaagaaattgaattgtaatgtacacggggaggtgcacgaaaagaaattagtgcaaggtcttgcttgcatgtgtggtttgtcc

SEQ ID NO: 17410 - DNA, 2630 bp, Oryza sativa
  ref <308>: DATABASE ACCESSION NUMBER: AK067857
  ref <309>: DATABASE ENTRY DATE: 2001-12-06
gactagcacacgcacacgcacaccacacagtctacctatacctactactacctgtcatcttctccttcttaatcccaactaaatgcgcacataaacgaagaagatttgcactgatacccgcgctgatacaagcaagcatccgccgttgcgacgggtgggcctgacgccgcgtgggaggccgtggcggcgggggtgctgcggccggagcacccgcacgcgctccaccagctcgtctactactccgtctacgccggctgggatcgcgccgcccggggcccgccgccgtactggttcccgtcacagattgacactaaacaaacaaatcttggtagactgatggaagcacatggtcctaggttgttaggatcatcatataaggacccagtttcaagttttcacctcttccacaagttctccgtagagcatcaagagtctatcctttgttaggtctactggtcaatggtgctgaaggagatctcaatcaagttccaacaagaaccaaagtcaattctagatacatcagataaatcaaggaaagggggaacatggctccaaggtgctgtgcttaatattgctgaatgttgtctgttaccttggccttcccaaaacaggacagatgacagcacagctattgtttggagggatgagggtcttgacaatcacccagtgaaccgtatgtcactgaaggagcttcacaatcaagtgattacagttgctactgcgcttgataccatgttccaaaagggggatcgaattgcaatagacatgcctatgacatgcaatgcagtcatcatatatttggctattgtccttggtggttttgttgttgtgtcgatagcagacagttttgcacctcaggagattggtacacgcatgagtgtgtcaaaggcgaaagctatttttactcaggatttcataattagaggagggaagaaggttccactatacagccgtgttgtgcaagggacttcatctaaagctgttgtaattcctgcaactggaggctttcttggggtttcactaaggaatggtgatatgtcctggaaagatttcctttcttgtgctgctggaaggtcgtccatttatcccacagtttatcaaccttcagacgctctaactaatatactattttcttcagggacaactggagaaccaaaagctatcccatggtcacaactttctccaataagatgcacatgtgatacatgggcgcatttggatatccagccacaggacatattttgttggcctactaatcttggatgggttatggggcctatactcttgtactcatgctttttaagtggtgcaacgttggctttgtatcatgggtcaccacttggtcgtggtttttgcaagtttgtacaggatgctggtgtcactatattaggaagtgtacctagcttagtgaagtcatggaaagctgggaattttactgaagggcttcactggaccaaaatcagggtactctccacgacaggagaggcttctgatattgatgatgatctatggctatcttcgcgtgcctcttacaagcccattattgaatgttgtgggggtactgagctggcatcgtcatacattcaaggcagtcttctgcgttcgcaagcttttggagcttttagtggtgcatccatgtccactgggtttgtcatacttgatgaacaaggaactccatatcctgatgatgtaccttgtgctggagaagtgggcctcttccctttatattttggcgctacagatcgacttctcaatgctgacaacaataaggtttattttgatggaatgcccatttacaatggaaggcaacttcgacggcatggagatataatccaaaggacagtaggtggttactatattgtgcagggaagagcagatgacactatgaatcttggaggaattaagacaagttccgtggaaatagagcggatatgtaatagagccgatgaggctctactagaaacagcagcggttagcatcaaacctgctggtgggggaccagaacagctggctatcttggctgtgctaaaagatagatcaccaccatgtgatgcagatgttctcaagagcaaatttcagagagccatccaaaagaacttaaatcctcttttcaaggtgagctatgtcaaaatagttcctgagttcccaagaacagcttcaaacaagctgctaagaagagtactgagggatcagctgagcaaagaactctcgaatcgcagcaagctatgaccgacgtgacatattcaacaaggaccacaacaacaacaacaatagtagactttagtccaaagcaaggtagagatgaagagccatacgaacagtgagggtaattcaaaatcgcttcaaaaatgccctcttgcttgtcaaatggtaatattgaattatgagtgtgtcaaaaaaaaaacagccacttgaataaagagtcatgattcattgggggcgtatagagaacttcaggaaactatttttttccatgttaataaatgttgttgaattgtgagcatgttcaataggcaacggcttgaaaaagtgacatttcccgatgggaatttgtagagaacttcagaatactcatcgctgtactgtattatgttcagctcatgataaagtggtggcatggtgtttggatt

SEQ ID NO: 17411 - DNA, 998 bp, Oryza sativa
  ref <308>: DATABASE ACCESSION NUMBER: AK067858
  ref <309>: DATABASE ENTRY DATE: 2001-12-06
ggtggacgacggcggcggcgacgattccaacgagaggagaagcgcaaggaggataggcggcggcggcgactgggcgaaagtgatcagagctcgcgaggatgaaggcgacggtgaagggcaggtacgagggcgacaaggccacggccgccgccaccctcgccttcaccccctccgccgccgacctccgcttcaaggcctccgccaccgatgccgccttcgcccgcgggccctccctcgagggcctcatcctcaccctcgagaagcccggctccttcctcctcgacctcaagccccactccaaggatgtgcgcttccaattcatgaactccgcgctgctgctcgaccgccgcgtcagcctcacctacacgcactccaccaccctctccccgggccccgccaagctgcccgcccgcaccgccctcgacggctccctcaccttcgatccggccaacaagctcagcctctcccacacgctcggctcctccggatgccgcgtcaagtactcctacgcgcacggccaagaccgcctcaccaccatcgagccctgcttcgacaccgctaacaacgcctgggacttcgccgtcacccgcaagtttcaaggaggggatgccatcaaggccacctaccaagcctccaccaagctcctcgccctcgactggaccagggactccaagatcggtgcctccttcaaggtcgcagcgtcatttgatctgtctgaccaaagcaaagcgccaaagctaatagcggagagcacgtggaattacgagatctgattgcctcttctaggaggcaggcaactcctgcttaagaagcacccttgtcatactggttgtcttgtacttgggaactattctttctgggtgcaacaatttcaatacctactgccctttgttcatttttggctgccctatgattggagttgtcatggcgatgctacggcattgacaatgaacaccgattatcttttactatattctctaatgcacatgatatgattg

SEQ ID NO: 17412 - DNA, 2366 bp, Oryza sativa
  ref <308>: DATABASE ACCESSION NUMBER: AK067859
  ref <309>: DATABASE ENTRY DATE: 2001-12-06
gtgagggtttccgctcctcctcgatcccgtctcgccgccgaagtgcccctccccttcctccccccacccccacccccacccccgccgtcgatgcgtggcggcggtttcgttaacgaaatgaggcatactggcaaacgccctcagcaacacaggggccatgacagagaagaaaggagggaccaaaagaggaggccagtgccacgtgcccaggaaaactctggtaatgatgaattggttgtttaccgcatactctgtccggacagagtaataggtaatgtaattggcaagaacggcaaggtgataaactctatccgacaacagacgagtgctaaagtcaaggttgtcgaccctcaccctggtgcagacaagagggttattttggtatattgttttgtcaagcatagaaacctagatgttaatgacgacgatgacagggagcctgtttgcacagcacaagatgcattactcaagctagtcaatctgcaagtgtcataggaaagtctggtgctgtcatcaagaggcttcggtcaacttcgaaagcatttattaaagtgagcccaaaagatccaaatgaagttacacattcatgtgctatgagctttgataattttgttcagataaccggtgatgctagagctgtcagaaaggcactatttgcagtatcaaccatcatttacaagtgcccatcaaaagagaccattcctcttgaaacttctgtttcagaccttcctccaagcattatagttccttctgagcttcctgtttacccatctagtaacttctactcaccctctgatgctgccatatcttctggacatccaagtctatcaatcttagggtcaacacctcatgttcctgaacttacagtatcggctgatgctcatagtcgactgcccatttaccaatctgtgcttcctgtaattcctgcttataatacaccgaaatgttctggggagctagtattgcgtgttttatgccctgctggcaagattgggttggttattggtaaaggtggggtgaccataaagagtataaggaaagagagtggtgcaaggatagatgttgatgactcaaaaaatgaccgagaggaaagtataatcaccattacatccaatgaggccaccgatgatgctaagtctgcagcagtggaagctgttctgcttctgcaatcgaagatcaatgatgacaatgaaggtaaaatgaatcttcgccttcttgttccaggtaaggtaataggctgtcttattggcaagggcggttcgattgtcaatgacatgcggagtaagactaaggcagctatctacatatcaaagggtgaaaaaccacggaaggcatcttccagtgatgagcttgtcgaggtgtttggagaagtggaaaatctgcgtgatgctcttgtacagatagttttaagactcagggatgatgttttgagggacagtgtggacaggcaaaattctgagaaagatgggaagctaactgttgccactactgatcctttgtatgcaagcagttatcctttgcctgcattattaccttacagacaacagatcactcccctgggctatgatcataggggtgacatagaacgtggtttggaagtatatccgcatagcagtttgtatgggtacagctccttgcaggctatagatgatggctattcagcagtctcgtcatatgcatcaaagggatatggaggacgtcctccgcatatggaaatgactattcctgctagtggcctgtcaaaagtaatggggaaacatggcacaaacctggacaacattataaagatttctggagctcacattgaaattattgaatcaaaatcgtctcgtcatggccatgttgctcgcatatctggcaccactgaacagaagcaatcggcagagaatttgatcaaagctttcattatgtctacttaaggttcctgttatagttttcaatatagctggacacttcaatctgttcctttcaacttctcgtgccatcccataatttccttgggtccaggaaagagcatcaaatacccgtccacacaagtttcgatgaatctcatgcttatccaagtgtgttcccagggtgaacctagcattctatgttccttaggttctcaaccttgacctatttgtgttgccttgtccatcttatttggcatgttcaaatatacccggttaatctcaaatgattctcaaatggttagttcaatctcatcgtggtttaacttatgattgtgtcctttcagcagtgatagctgattcattcagttgttaccacaggggaagaactcttctttctaactactctgctgcagagcctaagcttcctttcttttcaaatgcagtatgtccctatggtggatttttcttacc

SEQ ID NO: 17413 - DNA, 2138 bp, Oryza sativa
  ref <308>: DATABASE ACCESSION NUMBER: AK067860
  ref <309>: DATABASE ENTRY DATE: 2001-12-06
gattcccaatttcccattcccccctctatttcaacatctccccccatgtctctcctcccccatctcgccatttcaattccaccaacgcgagagagagagagatcgagaagcaaacccgacccgacaaccaatttctccgacccaattcgcctcctccaagattcttgcgccaccgccgaggaggcgatcggttcttgatttcttgaattcgattcttgaagaattcttgggggtggtatgaggtcgtcggcgacggcggcggcggaggcggcggaggctgaccagtcgagggcgatgtacgagctgtgcgcgctgctgctgacggtgctccgggcgtggccggaggaagggggcgggcggggggcggcggcgtggccgcggcaggtgacggcggcgggggtggcgtcgatgctgctgggggcgtcggtggcgctgatgctgtgcgggtcggtgaccttcatgctggggttcttcctcatgccctgggtcatcggcctcgcctgcgtcttcctcctcgtcgggttcgtcaccaacctgtccgtgatctggagggccatcctctggcccgcctcgtgctcctcctcgcccaaggtggcctccacatgtacgtgatcttggccgtttaggagtagggctcctacatgtttggggacaaaagggaagaggctcctctttttacatgtttgggttagtcaggattggggaattcactgtggattcatgcgtaatttggggggtaaatatgatgattggtggtgtttcttggctttatcagagttcaaaatgcgctaaattgagcgcctttgcttaaattatgcccaattgtgaagcatctgtcatactttgggtgcttctctgaaaattgagatatgtgtagcttctgtatttaaattgtggttttattaggattgttgcgttgatttagttcgggaggacatcattccaaataatgtgagcagcttgttgtcgtagttaaaataaaattgacgcgatggtaagaagtggaaagggtcagaattggtggttgtcgatgcaatccagatgattctcaaatgttttggatctctaatttgatgtagagaggctggctatagcttcaggttgatgaaattcgatattgaaagggcgtaagggactaaattgcgtcggtgagcaccgaccatatgaactgaaagggggaaaggagctgtaaacatatagagtcaaaaagggccatataacaatgaaatggatgcctgagcgctttcgtgcttgctaagtaggagaccagaaagcttaagtttataactttgttcgtttcgacgggatacaagctgagtttcttaggaacaaaggagcttgagaggaactaaatgcaactagtgacaatcgagaagaagagctttcttagattcccaggaagaatagaatagcctagttaagcttgacctagtgtattcctttcacctttcaagatttcactgtcaatgcatctagaaaaattgatatagctagttaattgttgaaattagaaaatactttatatgggtgtaatacaggtgaagctgaacctcaatttccctgccaaccttgatgtgcttgttcctcacaaacgaacagtattctacatcaattttctgtggtaaattaatgcggatgtattaagttcaccatcaagatcagctattacaacccaaataagttcaaatatgatatcagtgcaattcctttcttggtcctactgactgtaaacagtatcatgcctatatcactattatcatcactatcatgcttttaagagttgttgtctttattgcattcatacctatttccaacgttatcgtataacaagagctttggattgtatcttctggcagggtatatattttccaagcctccattcatgtcctacatgtgaagttgaatgagaagtaggttctcatggaggtgtatacaagcagaagagtttgggcggcattacgttgttgccatcctatcttttccttcccggacaacatttttaccatgtaacgccgcaacaagcttagatggttttatatattataattaggatggcaagctttaacagaaaactttgtacatatggaaaaagaacggtttggttttattatttattacatctatcctataattgtttc

SEQ ID NO: 17414 - DNA, 2533 bp, Oryza sativa
  ref <308>: DATABASE ACCESSION NUMBER: AK067861
  ref <309>: DATABASE ENTRY DATE: 2001-12-06
tgtggatgttgaaagagagaaagagaaacggaattcggtgaaaattttctcgtcagattgagcaacgacttgagattttggagctctcgtcccgaatccgtccgttgccgacagaggtccgggggccgtccacgatcggggcaacaaaaggcaaccaacaacggatctaatcttccgtcagtggaaccctgtgaacttcggcctatcacggcaacaacctcatcatctgcacgagtggggacgaagattcagtttaaataaacttcccgcgaaccaatcatttcggcgattttcatcgactcgaatctcgtgtcgaaacgagagatatcccgatgttgcgacagcttcttgaacggttcggatcggcctcttcggatgccaaaatacagccgccaatcgtcggtgtggttccggtggttcaccacctcaaagccgatcagctcaacgtattgaaccgaggggaggatgaggagtttcataaggacaacaacttccaaccgcagcgacagaaacgcagtaaacgtcgctgttttcgacgcatttttaaagttaagaatttctacgaattgctccgcttgtccaaccggcggagcagtgctcacaatgttcaacacacagatgcttccaagacggtttcttcaaaaaataatgaacccgccaaagaggattcagggacgagcgacgacagcgagccccgacacagcgattcacttgaagccaatatcccgcaaccacaagatctagtagataatgtcgatgaccaagcagatcagtccgatgaagcttctcccggacgatcgagacagtccagcgccaaggagccgttactattccctctcgcagcgactagaggcaaagtgcagcctacttcttctgccaaaaccaggcgggcatttcaagagaccgttaaacggaacgaggacgttcggacgaaaagattgatgagagagctccgtgatatacaacgaataattgcatctcaacaatctccagaattcacagttgaattaaagaacagcaacctgtttgagtggatagtccgtctccatcaggtgagtttgctcgtccaatcaatcggcaacattactgaaacaaggctagcatatgcaaggctgatgaagataaataaaacaatcgcattcatccgcaggtggacaccgaaagccttctgtataaggatatgacagaacttggcattccatcaattcagctcagttttgaattccctgataatttccctttccttccccccttcgtgagaatcatttcgccgcacattgagaaaggttttgtcatggagggaggcgccatatgcctcgaactgttgactgctgccggttgggcatcggcttacaccgtcgaggcaatcatcgttcaggtcgctgccgcattgtcaaaaggccaagctcgtataaatttgttcccaaaaccatcgaaacaattctcaaagaagctcgcggagtcgtcgttcaaatctttagttaagactcacaacaagtatggttgggttacgccaccaaagtcagacggatagaatgaacacatcaaatcatcgacaaaacttttgaacagcgtcctgatgacagccgaatctcaattgtaaactactttagtcggaagggaaatcatgagcatgaagaacggctgcgaaggaagactcaacgtgttaggagcgtactcgctgtaatctctgtaaaatctccactacacaattctggatgttgttcgcctcacgcgatgttggttcacgaatccatcaccgtcgcccgcatcatcagaaatcccctaaaaaccagtgggatgatttcaaagttgtttctcatgtgtgtgtgggcgttagaattgttcgaaacgagatctctcttctcaacaatgacgcatccggggaggatatgggatagaagtacaacgatagcaagcgacaaaaatcaatatctgtatgtattggagaagcacaaggaatttgtgtggtaccggctcggagttcagctctcgacggatatctgcgtaaaaccggtcagcagcatggaagcagccaaagaagataaattttatcgacacgacatgaagtgaatcatgggatactggggtgtttctttttttcttggaatcattctctcgagttgccacttcggttgtaagtccgtaatttacggtgcccaggaagttttactcgagacacgtgctgaagagcggagcgagacatctgtgaaataggaaagaaatgttcaaccacatgaactttattttacaaactgaccttgctcccgattttcgttgcttggacaaggtagaataggtttttgtaagatgcgtctatttaccagttagcaccacagtcacccgaagagtgccgcagtgtccaacgcctatgagttgttcctctctagaccgtggtccgtctatcgtaaaattcatgtaactgtttattgttccatttgcatattgaatcgacgattgaatgtatccggctggcatgaatttcaatttacattgtgaacgtgttgttgaataaaagtaggcaaaatactcg

SEQ ID NO: 17415 - DNA, 1441 bp, Oryza sativa
  ref <308>: DATABASE ACCESSION NUMBER: AK067862
  ref <309>: DATABASE ENTRY DATE: 2001-12-06
ggtccttttattccaaccctcaccgccccacgattcacgccaccaccactccgtccgtcgtctcgtctcgtcgcctacctagggtttcgtgtttgggagatctgagagggggagggggatggaggtgagggagatggccgtggcggcggctgcggcggcggcggcgtcgtccgggggaggaggtggggggttgaggatgccgccgcccaaccctaacctgccgtacagggaggattgctggagcgagggcgagacggaggcgctggtccgcgcgtgggggagccgctacgtcgagctcaaccgggggaacctgcggcagaagcagtggcaggaggtggccgacgccgtcaactcgcggcgcggggcggccgcgcgccgccgcccgccgcgcaccgacgtgcagtgcaagaaccgcgtcgacaccctcaagaagaagtacaaggcggagcgcgcccgcgtcatgccatccacctggtccttcttccccgagctcgaccgcctcgtcgggcccaccctctccgcctccgcctccaagaggccctcgccgtcgccgtcgccggtgccgccgcccccttacttcgccatgcccatccatccttccgcggtgaggaagcccccctcgccttcgccgtcgccctctccgccgcctcctatggcgttgccgctgcccagctaccgtcgcgggtctccgctccccgccgccgctcttatccagcaggaggccgcggctgcagccgctgccgcggtgtctgattcggaggactctgaaggccctggcgataacaacaatcacaacgcgcagcggtcaccgtcgcaatctgtgtcatcgcgctccggcaatagcaacaagcgcagccgtcaggaagttgatggtggtttcagggagctggcaagggcgatcgaggcatttgcggagatgtatgagcgtgtggagagtgcgaagcaaaagcaggcactggagattgagcggcagcgaatagacttcctgaagcagttggaggtcaagcgcatggagaactttgtggatgcacatgtcaagcttgccagggcaaagcgcatcaagaagcatgcagggactgcacccgatggtattggcgcagcggaattggtttcctctgtcgctgcgctgcctttcctctccacctccacctacatatgatgctgaggagatgttgagattatcagtgtgaagttcattagatggccttgctgaccatgggaagactggtttggcacttggcagcgattcattgtagttcgtagcctggtagtatatggaaattgaagactagaagttcctagtgtaaagcaatgttgacattggtgcctgtgggttgttaatctgtttacctattgttttattgacattttaggcatgtaactctgacctcctgttttatttttctttcttaaaaaaaagtgtatcgacaaaaggtgttgc

SEQ ID NO: 17416 - DNA, 2446 bp, Oryza sativa
  ref <308>: DATABASE ACCESSION NUMBER: AK067863
  ref <309>: DATABASE ENTRY DATE: 2001-12-06
ggcatgctccaaaaaaggtgaagctctctccctcctccacctttcccctcccccctcctcgcctagggtttcccacccccaccatgcctcaccccccccgaaccctaaccctaaccctaacctagcctagtgcggcgaccatggcggcggcgggggagtactcgttcgcggcggagtacgacggcccgccgctgccctactcgctgccgcgcgccatcccgctcgacctgtcgcggatcccactcgcctcgctctcgtcccccacctcgccaccgccacccacggcgccgccgctccccgtcgtgcgccccctcacgccctcctccctctgctccgccgagtcaaagcgggattcgctggggagaggctcacgtgtgctgcggcggctgctcagcgccacggaggtggagcttgtcatgaggagcgagcgggaatgcgccgccaaccagctgcgaccggaggacgtgtatgtgaatggcaccaagctgtcgccggaggagctcgtcatgctgcaggggtgccagtgccctccttctaagctccggccggggttctattggtacgacaaggtttccggcttctggggaaaggagggtcacaagccccattgcataataagcccaaatctaaatgttggaggcgctctagatcaaaaggccagcaacgggaacactgggatcttgataaacggccgcgagattacgaaatctgagctgcaaatgcttaagttggcaggagttcaatgtgctggaaaacctcacttttgggtgaatgctgatgggacttaccaagaggaaggacaaaaaacagttaaaggcaagatttgggataagcctattgtgaagctgcttagtcctgtcctatcactgccaacgcctaacaaagcaaataatcaatgcggtgaagagccagtgaatgtggtaaatcgacccatccctgactacttggagcaaaggaccattcagaagctcctgttggttggatcagggacaaacaccatactcaagcaggccaagttcttgtacaagagcagaccattttctgtagaggagtgtgaagatctcagacttatcatacaaagtaacatatacaactaccttggtatactacttgaagggcgtgaaagatttgaagaggaagctatagctgacagaagaactacctgccaaagtgatccttctagctctggccattgtgaaccagagctttgtaatgacattactgagtactatattgctccacgcctgaaagcattctctgattgggttctaaaagctatggccataggtaatcttgaagacattttccctgcagctagtcgtgaatatgcaccaatggttgaggaactatggaaagatcctgctattcaagctacatataaccggagaagtgaactgccattccttccatctgctgctagttatttccttgacaaggctgttgatatttcccgaacggaatatgagctctctgatatggatatcctttacgctgatgggataacatcctcagatgggttagcatctacagatttctccttcccacaactggctttggacgggcggggttttgatgagccagatccacaagacactttgctaaggtaccaactaataagaataaacaacaaaggattgcatgagaactgtaaatggctgcaaatgttcgatgatgtgaggcttgttatcttctgtgttgcggtcagcgactatgatgagtactacgaggatgcaaacggcaatgttgtgaacaagatgatggagaccaggcagctatttgagagcattgcccttcatccgatatttgagcagatggatttccttctacttctcaccgagtttgatatcctagagcagaagatcggcaaatctcctttaacatcatgcgactggttcagcgacttcactcccctggtaagccgcaatctgatcaacggcaccagcaaaagctcgcggggcagctccactggctcgacattggcgcagatggcgggtcactacattgcggtgaagttcaagagcgtattccagtcgttcacggagcggaaactctacgtgtcctacgtgaacgccctggaccaggagtcggtccgctccgcgatccgctatggaagggagatcatcaagtgggaagacgagaagcccgtgtttgggtccagcgagacgacatacagcgaggagccgagctcctactctcactgacccctcctccctcaacaacatttgcttttgaggtgtaaatagctgtgaatgcatttgctctcccagcaaccttttttccttttagagttttctcattttttccccttttgttgcctagcaagatcatcggcttgtatggttgtttagttgtttacaagtagggtgagatgcaagaggtctgcctgattctgattcttgtatgtatggaattataatctttaaattaacatggtgctgattcttgt

SEQ ID NO: 17417 - DNA, 2221 bp, Oryza sativa
  ref <308>: DATABASE ACCESSION NUMBER: AK067864
  ref <309>: DATABASE ENTRY DATE: 2001-12-06
gtggttgatctctgaagagttcagaattcagagcagaagtagtatgaagcttcttgacacatgcatgccaaaacatggctccgtttggagaaggcttagcaattagcatgtttgaggatgtgcaagaggaggtttatccaggacaatctataaagtgcacaccatggaacctgacaacttgaagctcaccgaatttcttggtttcactcatcatgcataagccagcaaagtagccaacacaatcgaaaataccaaaaccgagagtgtcaatggttgttttgtcagaggacttgcattaggcaaccatggatatgcatccggaggtggcatgacacaattatcaccattgaagtacacgcggtgtgggaaggcccatcccttgtcaaaggtgaagtccttggaatccttacgcagaagaagttctgactgtgcatttccaagtggaccagcttgcatgagcaaatcgttatagaacttaactccccagaacatcgcagtatcatctaaaatagaaggaataaacttcatcagagaaagagagagagagagagagataaaggaacgtattacaagtgcactccaattttcttaaatgaaggagaacagtttgtaaattgacttacttatcttgcttccatatggagtaagtggcttgtagttgaagctaaacagctgggtgatattattgaagttaggatgttgagcgaccaaattccactgtgtgtaattcaagcggtagttgaagttcgtaatcgtgatcttcactctccaatattccttatagttgagtttcacatgccagtggattctgatcgggcacatgtgagaagtacattggacaagaggctgaccggtccatttgccagggccatcaatggcagattgtaaataaggtgaattctcactgtggaaatgcatggaacttgttagcaattttgcagaaaagttgggcctcaacaagaagcgaagtaagagttttggttttattaactcactttacacagcttccaggacttgtcccattgttttggcagccacaagagcatgttgggcagttcacaattgtgtcattataaaatgatgagagagatacacagcaggaaggagtcttctgagcaagaaattgggagtatgtgcaggtcacattccatgtcactgcaaacagattttatttttgttaagaaacaaaaaacaaaaatgaactttatggtataagattttgacaaatttaacttctatatggagccactatgatgcatgtctgcatttgacgaatattatttgctagagaataatattaactgaattagctgtattctattaggccaacatgccaagtaatataacctattatcaactattattcacagttggactcatctcactttgagaacaatctctttcccttcaacagattacatcttcttactaaccctacacataaggtaacctagttcaaccatgcaattgttgtttaggctgcaaatgcatttcctcaaagaatgaaagcaattggtattaaacattaaagaacaacagatgagctacttacttagagcttgggttgctctgcgcccatccccggtgaaaaacttagtaggcctgacaatcatagcacgcccgcacgtgtacccaggacctggggccttaagagtgaagttcttaggcaacttaactgtcttgttggtagtcccagcaagacctacactgatctggaaggaagaagcagcatttgatgggtcctggttaaatgtatttataactccagctttgcagcaattagcgatttgcatgttgtatggggtgcccggaagcagatcaacaactgtggggtccttcttgcagcagtggggcgtgccacccttgaactttgagcaatcgccctgctcagtggtctgtgctccaaccatcgaccaaatgacctccttctttgcccatgtccaccccagctgccacccaggtgcctggatgtgccggaattgttgatagttgaacatcgtgaccacagcctgcacaagaaacattttggggggaaatcatgacacacatatacaagataatcagagtatccataatatgctgacataaaactcgtgtttattattgttaattgctgcatatgtttctgaccagctgctggttatgctatcaactttgtacttcaaagacaacttgtagtagtatcaaataaaataaaattatggcctaataatagttgggt

SEQ ID NO: 17418 - DNA, 2169 bp, Oryza sativa
  ref <308>: DATABASE ACCESSION NUMBER: AK067865
  ref <309>: DATABASE ENTRY DATE: 2001-12-06
gttttttcctccaccgatggctctttccacgagtctcctctcctggtcctcctccgacgacgacgacggcgccggcgccggcggcgagctgtcccgccctcgcaggcggtggcgggcgcttgtcctggggctcggggtgaggaggaagaggagcatggagggggtgttcgggttcagggagatgatgggggaggagttcatgggcatgttcctccccttctttggcaagatggttcagaaagtggtttcagaagaagtagagaaagcaattttcagacaagtcagcacaccagcgcctccaagactgctagcaggattgaatcagcagcgtccaaggtatcaactcgtgttcctgaatgaactaaagcctgtttacacactgatgaaattagaagccaaggatggaccgggtcttaaggtggctatagtcgaaagactcgaaaacaatcagatgcgcatcgtcaggttcggtcatcttgcttctgctaaggttgaagttgtagtcctccacggcaactttaatgctaaaaatgaggaacaatggacccctgaagacttcagcaagcagatagtatgcgggcgagagaaaagcgcacaacttctcaccggaaatctgacactgaagcccaatggagggatttgaaaagcactacccgccaatgttggatgacgaagtttggcgtttggaaaagatcggccgcaatggagctcaccaccaggccttgacaaacagtggagttgatactgtacagaagttcttacaatcatattttacggacgaaaagaagctttttcagacttttagcaagatgtcacaggcagcttggaaaaccatcataagccatgccatgacatgtgaagtcggtgacgatctttgcttgtatgaagtgaagggcaacaacgtgggacttttcttcgatgcaatatatcagcttgttggggtgaagtttggtgattcttacaagcccataaatgagctcgacgaaatagagcagagtgcagttgaaacaatgaagcaattggcttatgcgaatataagtggtattcagtatgaccataaggtggtcaacaactatcctgtaccgcttcataggttccattgtgggggaacttctatgttgactgactttattcctaaacagcagatcccaacttgtggtcaatacaattcagccctggctggtcaaccatttgaatcaacggagaacttttcttcattccaagaagcctctaatgcttcagtggatatgtcaagatttgtgcagggtcaaacctccaacgtgcagtttagccaacagttgggcatgggcaattttatcccacatcattcaaatcaaggaacattcatacccagaccaagaatcactcctctgtgtatacctaataccgaaaaaacatattttaatccaaacgctcatagcagcatccaggctgatcatgctgccacacgaattggccagtatgcacataatgagcgatctcattcacctgaagaatcatacaagcgcttttctccagataatttcctccatacagatgaagttgtggctttgatgcaacctcacttagtgcctccgagcaacagcgagaatttcagtaacctgctcaacctatcaagcaatgaccaaacctcacagcaaattgccgctccattccagccatcaagaacaaacagctttgactccagctcatgtgatcagctcatacagaatttcatttctcagttttctagcaacgaaagagttgcggtgccattgtccccacgcaagtgggtcaagatcagggcagcgctgaagctggcatctgtgggtaggctctccagagcctcgagaaaggcttcgcatcgccccccagcaaggccaaggcttgtcccaatagtatgagcctggtgaaaacaggttgtaaaaaatttagattaaagatcgatcttggtgttgatgcagaagttctagagacatctggtcaactgaaactaatgattttgtcaaaaagttaggtgtatgtaatctgtacatagtagagcctgcttgtacttcatttagtgttagtatttcccagcagaggattctgacctctttgttatctctgaatttagaaccatgtaaacaaaaagaccatgtaatgtattccttttttgcacctaatgatccttgagagaaatttcctttt

SEQ ID NO: 17419 - DNA, 1206 bp, Oryza sativa
  ref <308>: DATABASE ACCESSION NUMBER: AK067866
  ref <309>: DATABASE ENTRY DATE: 2001-12-06
gatctgatattactcatccattccatccgcgacagggagcgtagcatgcaggtgcagatgcagatgcagcaggctaccaccgttctcagcagcagcagcaaccggccttggacgctgtggtgccatcctgtcccagtagtctcctccccatcccacgccaaaaataagaagcattgcctccgactccgagcaggcatggccatggcctcctccgagcttcctgacctgagcgcaatacaacgcgtggtgctggacatcgagggcaccacgacgcccatctccttcgtggcggacgtgctcttcccctacgcgcgcgacaatgtccgccgccacctggccgccacttacggcagcagcgaggagacgcgcgctgacgtggccctgctgcgggcgcaggtggaggaggacctcgcgcagggcgtcgacggtgccgtggcggttccgccggatgcggaaggggaaggggaaggcgccgtggtggaggccctggcggcgaacgtggagagcatgattcgcgcggacaggaaggtgacggcgctgaagcagctgcaggggcgcatctggcggcggggcttcgacagcggcgagctgcggagcgaggtgtacgacgacgcggcggacgcgctgcggcggtggcgtgccaaggcctacatctactccagcggaagcagggaggcccagcgcctcatcttcgccaacaccgctgcacacggcgatctccgcgaccacctctgcggattcttcgacaccacaataggggccaagcgcgaggttagcagctactacgagatctggcagactctgggcacggaccgcccctcccagatcctcttcttgacagacgtctaccaagaagccgctgcagcaaagactgcaggccttgaggtgataatatctgtcaggcctggaaacgcacccctccctgataatcatggttttcacacaatcacatcattcgctgaaatctccatctgaacctagccagaaatgtcttgtactatacaatctgatccgaacaatattctaccgtacgctagcagcacagttagcaaatggtttggttaggtttaaggcaagacaatctggggtgtaaataaatgtgtaatagtcccaatcaagctaatactatcatgctcccattccatccaaacctggaacaacaatttcagatgcatatactactactttacatttgttccttttcct

SEQ ID NO: 17420 - DNA, 2469 bp, Oryza sativa
  ref <308>: DATABASE ACCESSION NUMBER: AK067867
  ref <309>: DATABASE ENTRY DATE: 2001-12-06
tgtgttctcctcattcctctctgccactgccgtccgagccacggaaaggcgagcggcgcgacgcggcgacgccctatggcgacccaccacgcccgccgcctccccgccgccgccgccgtcctcctgctcgtcctcctcgccggcggctccgcggccgacgacgcctccagcgacgacgacgcgggcgtcccgccgtcgcccggctgctccaacaagttccagctggttaaggtgaagaattgggtaaatggaactgaaggtacaattgttgttgggttgagtgcaagatttggagcctccgtgcctcgagatattcatgaagctcagaaaacatttgctgtccttgcaaatccacttgattgttgttccaattcgacatcaaagctaacaaattatattgctatagcacaacgtggagaatgcgctttcactgctaaagcaaagattgcacaggctggaggtgcagttggtttactagttatcaatgataatgaagaactttacaagatggtttgcagtgacaacgatacttccattaatgttacaatacctgttgtaatgataccacagtcagctggaaaaaagatgaagggcctcttggatcagggagcaaggcgcgagtagcaaacacggaaggagcaatgtggagggatcttgaagcaaagcagcagctggcttgaaatagagcgacctgcttgaagcagaataatcagcattccaacaatatggtggactggcaggcagagctggtggtggagaaactcatggctatgctagatctccaagctggtgacggtgcagcttcctctctagaagtcctggtggcttatttgctctccagaaatcctgcacgctaccttttgagataacaaaatgggcaagcttcccacctggacctgtgtggacacatgcatgcacgctcacacaagcaaagtcgctcagttgactccctgtataaattggaaatctttgtgttgggtgctgtgattgcataaatgttgactagttgaagtgaaattgtacttttgaattagtagtttatggtaatacaaagtatgcatgctaacaagaatgttcttttgctgcagtggaggtgcagctatattcaccaaatcgaccagttgtagacctttcagcatgcttcttgtggataatggctataggaaccatagtttgtgcttcactctggactgaatttgttgcatgcgagcaagttgatgagcgttataatcagttgacacggaaggatgggcctaattctggaacaaccaacagagaagataaagaaatcttcgagatcagtgccaagggggctattgtttttattttagtagcttcagttttcctcctcctcctcttctacttcatgtcttcttggttcgtctggctgctaattgtattattctgcattggtggtattgagggtatgcatgtttgcttggtcacacttctcactaggatttgcaaggattgtggacagaagactgtacaactccccttttttggggaggtgttgaccctttctgttctgattgtaccattttgcactatctttgcaattctttgggctgtctatcggcatgcttcttttgcttggataggccaagacatccttggaatctgcctgatgataactgtgcttcaaatggcacgcttaccaaatatcagggttgcatcagctcttcttagtgctgcatttgtgtatgatgttttctgggtgttcatttcacctcttatattccatgaaagtgtcatgattgcagttgctcgtggtgataactctggggaagcaattccgatgctcttaagaatacctcgtttctttgatccatggggtggctatgacatgataggctttggtgacattattttccctggattgctagttgcattcagctacagatttgatagagcaagcaaaaggggcctcttcaatgggtattttctatggctgacggtgggatatgctgttggccttttccttacctatcttgcgctcttcctgatggacgggcatggtcaacctgcgctgctgtaccttgttccatgtacattagggcttattgttatacttggttggtttagaggtgaacttcatgatctatggaattatggtagaagtcaaacagaaaatttagtcgacgaaccatagaagaatctgcggacaattgagatactaattgcccagtggatctcctggaacaatatcagaaatgtacacagtttactttttgcaagaaaagttagatgcaatgtgatttgcttacctgcagtatatagttttagtaatgtagtactattcagtgctgcattgtactaacataagtgttgctctttatttttattttttaaaataagcatattcactatacagtctatatccgtgcctctacaatttcttttcttgtctgtagacaaggagcagctggaagttattttttatatattatgggcatgtttgacatggct

SEQ ID NO: 17421 - DNA, 1282 bp, Oryza sativa
  ref <308>: DATABASE ACCESSION NUMBER: AK067868
  ref <309>: DATABASE ENTRY DATE: 2001-12-06
gacctgcagtcccgtcgctctctcaccagcagccatggccgcggatcccaccaccggcggcggcgaggcggagtccttcttccgcgccgcgccgccgctccgcgaccaggaccgcgtcgccggggacctcgccgacttcgtcgcccgccactccgggagcggaggaggggggaggctcgccggggtggtctgcgtcacctccggcggcacgacggtgcccctggagcagcggtgcgtgcgctacatcgacaacttcagctccggccagcgaggggccgcgtccaccgagtactttctcaaagctggctacgcggtcatcttcatctaccgccgtgggagcaagcaaccttactgtaggtttcttccagaggattcctttcttgatttattcgagcttggtgaagaatcagatatccaagtcccagaatctcatgccgcggttgtcaagacagcaataagaaattatcggaaggcgattgatgaaggcctattgctgaaacttcctttcaccactatctttgagtaccttcagttactgcaaatggtaggtacggcgatgaattgcttgggacgccaaggaatgttttaccttgctgcggcagtttctgacttttatgttccatgggaaagcatggctaaacataaaatcgagtcagcaagtggtcttttgaacatgcaactcaatcaagttccgaagatgcttttcattctgagaaaacaatgggctccttcagcattttgtgtatccttcaagcttgagacggacccagatatccttctgcagaaggcagaggcagctctgagaaagtatggtatgaatgtcgtggtcgccaacgagctagcgaactacaaagatgtagttgtgatggtcacaagcaatgggaggacaaccgtgcgaaggcccagcaaggaggacgacgtcgaagaacagttaatcgatctcttggtagagatgcactccgaacacatcatgcagctcaatcaagacgtgcacaagctgacataacaattatactgaatggaatacgagtatcagaattcttggcaactacatcatccaaagttgttacaacttacgagccacgagctgaactatgaatatcatgacttgtaaaaaagaaaaagaatagcatatgcccacaaatggtggtaaagtatgtatgtaccacattcaggtgtcaatgttacgcctggtgcttctgtaacttactacatgttaattccctgggaaagggccttgggagataggcatgattttttttttctaagttttccttttctc

SEQ ID NO: 17422 - DNA, 1210 bp, Oryza sativa
  misc_feature (658)..(658): "n"=any one base of a, t, c, or g
  misc_feature (1182)..(1182): "n"=any one base of a, t, c, or g
  ref <308>: DATABASE ACCESSION NUMBER: AK099021
  ref <309>: DATABASE ENTRY DATE: 2002-08-28
gaatggcgaacaagggaggagagccggcagcaagagcagctgtgcgccatggtggaggccccgtcgcgttcaaggacgctgtcgacgtcgacgccacgccggtgcgccctccgacggagctcgccgccgccgtctccgccctgccggcgggcgtctcctacggccagccgatgcgctgctacggggggacctgggtgttcgagagctgggcgcagggcgtggtcgccatgcaccgcggcggcctcgtgccccgcgccggcgacgtcctcctcgccagcctccccaagtcggggacgacgtggctcaaggcactcgcgttcgccaccatggcgcgccgcgcgtgcccgccgccggcgagccccgaccacccgctccgccgcctcaacccgcacgactgcgtgcccctcctcgacaggctcttcgccgccggccgcgacgcgcttctcgacgagctgccgtcgccgaggctcatgtgcacgcacatgccgctctcgctgctgccgccggcggtggctgacggcaactccaacaccaagatcatctacatttgcagggaccagaaagatagattggtctccatctggcacttttcggaacgcaatgtgccagatctgttgctccaagaagtgtatgagtctatatgtgatggcactgggtntgctggtcctgtctgggatcacttgcttggttactggagggcaagcaaaatagatctaggccgagtgctcttcttgaaatatgaggaggtgcttcgagacccagtgaacaccgttagagagctcgcacaatttgtcgggcagccattctctgacacagaggaagaagctggcattgttgcggagatcgtcaagctatgtagcctagagagtctaaggagccagaaagccaacaaagaaggcatacaaggtgtgtacatcaagttctcgcacgactcgtattttaggaagggggtggaaggggactggaggaaccacatgactcctaagatgggcgaacatctggattcgattatgcgagaaaagtttgatggatcggggctcaccatatgatgcgccattatggccggggtttcatcttttaatttgtagtcacagttttcaagctatgtgtttcataataaaacaaagcctcctagcctgtttggaggcttaactttaactgtttatgcttataaacaggtancatctatgacctatgtaattttcggtgc

SEQ ID NO: 17423 - DNA, 1585 bp, Oryza sativa
  ref <308>: DATABASE ACCESSION NUMBER: AK067869
  ref <309>: DATABASE ENTRY DATE: 2001-12-06
ggggaaagtttgaccccctcttttctctccgattctgcgaggcgacatcggcggcgagaggcgggctagggtttcgagcaccgccaccgcgcgccatggccgaggccaaccagtaccagatcctggtgcggctcctcgacggccgcacacgctgcctccgcttctcgacgacgaccgtctccggcgcggcgctcctcgacgccgtctcggcgctctcccgcgtccccgccgcgtccctccgcctcgtcaccggccgcctcgacgtctcgccgtcctccgtcctcgcctcctccgccgacggccgattcccctccgcatccgcgctccttcgcctccgcggaggcaagggcgggtttggctcgctcctccgtggcgccgcctccaaggccggccagaagaagaccagcaacttcgacgcctgccgcgatatcaacggccgccgcctgcgccacgttaacgccgagcgccgcctcgaggagtggaaggccgaggccgcagatcgccagctcgagaagctcgcggaggatttcatcaagaagaaggctaaggaagcgggtcgcggtggtgtgaaggcggccgaggtggacaaatacctcgagaagtaccgcaaggatgccgagagttgcgttaatgcggttgaggagtctgtgcgcgcctctcttgggaagaggaagaccgtgcccaagccacgcggtggggaagatgccaagaagcttaagatttggctgggcaagaagaaggtacaagaggatgagagtgatagcgatagtgacactgaaatggatgatgatgagggtgcagatacaaaatccataattcttgatgatgggaattcctcgcatggatccaaaagtgaggacgagaaggttgatctgggttcaattactgaatcaccttcagaaggagagacctcaggtgagaagtctggacgctctgaatcagaggagaatggaaacggtgttcaggagtccagggaacctacaattaggtcagaaggtgaatgcggtgattttatatcagatggtgtggtggagcatgagattggagtggtggatgagcacacacctgagaatggtgttagtgctctttcagaagaagtgttgaaaccagatgtaaaagcagaggataacactgcttctgcttcagccacatcacatcttaatgacctagaggcgcctccagtagaagaacctgccaatggaaatatatctcctctttcacaggaaccactggacctgacaatttacagttcagctgcagaattggaggtacttggcatggagagactcaagctagagttgcagaatcgtggactaaaatgtggtggcaccttacaagagcgtgctgccaggcttttccttctgaaaacaacacctctggagaagctaccaaagaagctgttcgcaaagcccagtggtgggggaaagtgagaactagtgcatataacagctaaaatgacgaaatgcaaatctatatgtgatgttcttttataatttgaaattgttgtaatgtgatgataaacttttgtcttgacgctgaaaattaatgagctatgacgtgccagtatgcacatgttgtaatgtct

SEQ ID NO: 17424 - DNA, 1780 bp, Oryza sativa
  ref <308>: DATABASE ACCESSION NUMBER: AK067870
  ref <309>: DATABASE ENTRY DATE: 2001-12-06
tgacgcgcgcggggacagccttccgacctcctcccctctgatccggcgcggccatggcgtcgagcgggagcagcacggtggtgggagagatggagagcagcttggagcgggtgaggcggcagctctcgtccacctccagccgccacctccttcagggccctctcctgaagcgatccgatacactaagaaaatggaatgaacggtgggttatacttgatcctgcaactggaaagatggaatacaagattcgtagaagtgatgcagctgtgaggggaataatagtgtttgattcaacaagcactgtgacgttgtcgccaatgaactttcatggactgccgaaatatgatggatgctgtttctgtatccacacggactaactttttttaaccttacattcttttgcatgggtgatatttattttgggaccctctattttgttttattcaatgactaatgttctagatattggaaccccacagaaaaaggaatattttctttgtgcagaaactcctagtgctgcaagagcttgggtgtccactttacatgcttctcagttggtgctacaagctcacaaagaagcagtgaattcgttgggtggaaatggtcctaccaaattgggaaaagttgctacagttgtggctgtggccaatgcgactgcaatcgaagcatccaaagaggtagaggcagcgatgaaggtatccctgcgggcagctttgggctcaactacaaataaactcagtaaaggtcaattagatgatctcactataatgatggagacccttcgagttaaagatgatgaacttcaccagttattgcaagatatccgtgcacgtgatgcaaccatcagagatattacagataaattacaggagactgctgaagcagctgaaactgctgcttctgcagctcattcaatagatgagcagagaagatttttatcttcagaacttgaacgcctgaaacaagatcaggaaaaacaaattgaattttcattgcttaggttaagggaatcggaagaaaaggcaagcttctttcagaagagagggagcatttactcaaggaaagagattctgctcttcaagaagctcaaatgtggcgttctgaactaggaaaagctagaggaaatgctgtaattttagaagcagtcgttgtgagggcggaagagaaagcaagagtttcagcagcagatgctgatatgcgaataaatgatgctgcgagtagactcgattctgcgacaaaagaaaaggaagaactcgtagctcttgtggacgcgctacagttgcaaatacgaagccaagacactagcacaaaacaagtctgcgaggagaggtcggagctgtgctccacgtcttcaaagcatgtagacatggaagatgataatgtggataaagcttgcttaagtgatacagatccaatacccattactgagaacatagttgatttggatgatgatggagtcgatatccctacaattggggtcacggagtggaataatcctcattcttctgaagtatctgatgtaagagaagtaaccactgaacctgaagataacagcttggatattcctgttgatagccaaccagtatctgagaatgctttccacggttaacctggcttgtttctattcttaaccccgttggcttgtattctatgttctcattttagttcattgcaaacattcatatattcaaattaaagctcgctatgagctcatggactttagttccacaacgtgttcactgtatccaagtggaataaaacagtgcaattgtgggtgtgt

SEQ ID NO: 17425 - DNA, 1169 bp, Oryza sativa
  ref <308>: DATABASE ACCESSION NUMBER: AK067871
  ref <309>: DATABASE ENTRY DATE: 2001-12-06
ggtcctcttgcgttggagttgggaccaaagcgaagggaaagtggaacagcgctcgcgggttgcgcttgcgccggcgaagaagcgcggcggacgccagataaagccctccctccattgacatcaacatgggtgacaatctgatggataaggtcaatgccttgggtgagcggctcaaggtaagtggggcagaagttagccggaagatgtcagctggtgtcagtaacatgagtttcaagatgaaagaattcttccaaggccagaacatggcggacaagatagtcgatgaggccacgctggagaccatggatgctcctgattgggccaccaatcttgagatatgtgatatggttaacactggaaatgtcaacagcattgagctgatccgtgccatcaagagacgcatcatgttgaagaatccacgagtgcaatatcttgctcttgtcctccttgagaccgttgtgaaaaactgcgagaaggctttctctgagattgctgctgagcgggtccttgatgagatggtaaaactgatcgatgatccacagactgtagtcaacaacagaaacaaggcacttatgcttattgaagcatggggagagtcaggagatgagctccgctaccttccggtgtatgaagagacttacaagagcttaagatcaaggggaattcgctttcctgggcgtgatgatgagagaactccccccgcactaaagatggcactgtagggaagcgagcaggttctggtgctgatgagttgcttcaggatcttgacgacatgatatttggcaagaagggcggcacctcatctcagcaggacaggaaggaacaaaaggacgatttcatcagtttctgaccaccagatccagatacagcagggccgcagggagacacttgatatggatttgtgtgatatgcccatcttgcttgaatgcatcccagggattttgtttggtttaatgtcttgggcatgactagtttcttgctgtacaggaatagatagatgtagcagtcccccttactgtgtcaagccagtcagattttggctcatgactactatcagtgtcagaggtttcattacttgctgtacgctcggtgaagggtttgatgctgagtttttttatggtacattctactgctagtatatactaccagtatatttgatttgacggtgt

SEQ ID NO: 17426 - DNA, 2419 bp, Oryza sativa
  ref <308>: DATABASE ACCESSION NUMBER: AK067872
  ref <309>: DATABASE ENTRY DATE: 2001-12-06
tgagcattctgcgtggagagagagatgcttgctcgccgttgccatggcctcctcctccgccgccgccgccgccttctccccaacctcccaccactctccaccgccgctatctccaccccgtctccgcctccgcctccggatgctaccctcgatggtgccgcgcccggcgaccccggcgcgctcgcccccgacgacgccatcgcgtccctccccaccgtggcggactccgcgggctccgcggcggcgctggcgctgttccgccgcctcgcgtcgcgcccggacctgcgctgcctcatgcggctctacgtcaccgcggccaccgccttcgtcgcgagggggagcctcccgatggcgcacgaggtcatgcgggggctggtggccgccttcggcgaggccgggaggctccccgaggccgccgacatggtcctcgagatgcgcagccacgggctcccgctctgcgtcgagacggcgaactgggtgctcagggtcgggctggagaccgggagcttcgtgtacgcgcgcaaggtgttcgacggaatgacgagggccggtgtgtgccccgatgagcgcagcttccgggcgctggtcgtggtgtgctgccgggagggaaaggtggaggaggttgatgccttgctggcggcaatgtggcgttatgggttctcgctggataacgcgacgtgcacggtggtcgtgcggtcgctctgtgagaagggacggttcaaggatgtgtctgagttcttcaggaggatgttggagacgggcacgccaccgaacgtggtgaattacactgcatggattgatgggctgtgcaagagacgctacgtgaagcaagccttccatgtgctggaggagatggttggaagagggttgaagcctaatgtgtacacgcacacaacgttgattgatggtctctgcaagattgggtggacagagcgggcgttccggcttttcttgaagctcatcaagagtagctcgtacaagccaaatgtccacacgtacactgtaatgattggagggtattgcagggagggcaaacttgctcgtgctgagatgctattggtgaggatggttgagcaggggttgaaaccaaacacaaatacatacactacgcttattggtgggcattgcaaggggggcagttttgatcgtgcatttgaactaatgaataagatgaagcaagaaggcttcctacctaatatttacacatacaatgctgttattgatggcttctgcaagaaaggaaagattcaagaggcttacaaggtgctccgaatggccactagtcaggggctcaaatttgataagataacatatactatactgataactgagcactgcaaacaaggtcacataacatatgctctagatttgttagatcggatggtggaaaatggttgctgtcctgatatagaagcatacactagcctcatttctacatattgtcagcagagacaaatggaagaaagtcagaaattttttgacaaatgtcttatgataggactactgccaaccaaacaaacgtatacatcaatgattgcagggtactgcaaagtgggaagatcaaccttggctttgagggtctttgaaaggatggttcaaaatggatgttttgcggactctataacttatggtgctctaataagtggtctctgcaaagaatcgaggctagaggaagcaaaggctttatacgaaggcatgcttgataaacgtttggtgccatgtgaagtaactcgtgtcactttaacttttgaatattgcaggagggagaaaacaagcattgctgtatcagtcttggatagattggacaaacggcagcaggttcatacagtagatgtagtagttagaaagctcagtgccttgggagatgtggatgctgccagtctttttcttaaaaaagttttggacgaggattatgctgttgaccatgcaacttatactggcttcatcaattcttgttatgaaaataatagatatgccctagcttctgaaatgtctgaaaaattctcaaagaaaatatctagctttaaagaaaaaagatgatttagcaacagccattgcttgatcagaaagggtggtgcattgcttctactgatacagacaagaaattctacattcaaggtatagacctgactttctcaaatggagtgggggagaacttgaagatagtaatggcatcttctttgtataaaattctgtgagaactgagaagaaacaaggtcattcgttgatttgatggagaaatgaagaacaagtctttcttgaatacttgggagatagtagtcactaacaaaatccatctgtgcattgtataatgaaggttatttcattaaccattatactggttctgaacaattagttcaattttgtacttaagcaacaaggatgttgtttcatagaaaagttatccattattcctacc

SEQ ID NO: 17427 - DNA, 1703 bp, Oryza sativa
  ref <308>: DATABASE ACCESSION NUMBER: AK067873
  ref <309>: DATABASE ENTRY DATE: 2001-12-06
gctagtcttctgcatcgcctccttttcgtgagcttcaaaacagcggggaagaaaagaaaagaaaaatcgatccagatcggagaagcccagcgccgcccctccgcccgccgccgccgccgccgccgcctcgcgcagtcgagcagcatcacagcgggaaggcttaattaccgccgaggccctccgcctctgccgcaccggaaggcggcggcggtgcctccacctcccgctcggtgcccacggcgaggtcaacaccgttgcaagttattcatattttgggaaactttgctagaatttggtctgtgtactccctgtataactacctgtctagtagtggggattcaatggtcggcttcatcttcagttgccttgtacctgcttcagtcatcttcctggctttgcagaagccttggaaaggccggcctctgcccaacacacaggttgttccgacagttatcaatggaggaattctggcattgtacttcgtgctgtggggtaaaggacttcttgcttgcggaccacttgtcgctctgctggcggagtacgcaggtgctgttcttggagttctctcagctgctttatatggaaggaaagttaacatatggaagaagattggtgggctcgctgctatgctggtagcatactatctcttaggaaatggatgggctacaagaacacattcaccactatatagctttggaagtgaatcactggagaagggaacacaagttattggaatgaaagaaatggtggtcccacttactgctggaattttatctgctttgaggagagtattagctcggcgggtgtcccttaagaatcaacttaaaaggcgacttcatgcaattaatgttgcttctgctacatgttttctttttccttttgcaatgtgggatacaatcctgggctcggcatctgacagcatagttaaactgcagtttccaagctgggcgtacttgagtactgttttgtttggaatggtgcttatattctatgttgacaatgttgccgaggaaaaattgcatctggtcttctcttctccaagacatctaatggtttcaacaggttgcatcattgttttggagatactgtacaaaatggatttctcccttttgggctttctgctttgttcagtgattttaggatttggcatttttgaagcaacatccttggagcgctcgaagaaaagtcctttggaggcacatgaactatcaaatggatcatttcacaaccagttgccaatttctgcacttccaagctaaaagtattaaatcgggctataacatgcggacatgcatactgttgcacatctcaaacttgtggtttcaatccacttttttaaggcttcaaccacagatagctttgggtatttcgaccttcaaattttgcctgtgaatctgtgatcctccattgacattagtagtgctgctgttcgtcgctgcaacgccctgtagatgtatattcatgtttgcaacgcagttcactcgattgccccaaaaaaaaaaaaatatccctctccatcctctagctatatgattattgcaatcactcagttggacctccttttttcctatggatttgtaacccatgtgtaaaatgaagattaccccttgcccgtgtacacattccacctcgattgaattccgacttcggaaagcagccagcatagcatgctgctttcatgggttatgcaaaaattttgttct

SEQ ID NO: 17428 - DNA, 788 bp, Oryza sativa
  ref <308>: DATABASE ACCESSION NUMBER: AK067874
  ref <309>: DATABASE ENTRY DATE: 2001-12-06
gagtgaccgctgccgaccaccgcccgcgccgccgcgcagctgccgaccaccgtccaccggagttcgcccgccgcggcggcagccggaagaggcgtatccgctgagacagcaagggcctcttttgtaatctatttatgttttagtggattccaagcaaaatggctggtcaaccaagtggtgctgacaaagaagtcatcaacgagcaaatggttgcaaacatgtatgccaacatgcgctctgaaatgaatcaactctactccaagatcacagagctggaaatggaagtcagtgagcactccctcgtgatcggtgcaatcgagccacttgacccctcgaggcgctgctacagaatgattgggggagtgctggttgaacggactatcaaggaggtcttgcctgcagtgcaacgcaacaaggagggcctcgaggaagttgttgctcgcatgaacgaggcactggagaagaagaagaaggaaatcacggagtttgagctcaagtacaagatcagaatccggaaagcagatagtgacacccaggaagaaggcagcatgaaggaaggatctgcgcagggtgttcttgtaggccctgcctctgggcagtagaagtgataaaattacattgttccttataaactgaaatttctcccttttgagtccagttttatagggacacgcatgatccaatgttctgctgttatttttggcaaatctggttgaatttccatgttacgtgctatgtaccatacatctttgacactagactttatccaatggtattgttatctgacc

SEQ ID NO: 17429 - DNA, 1611 bp, Oryza sativa
  ref <308>: DATABASE ACCESSION NUMBER: AK067875
  ref <309>: DATABASE ENTRY DATE: 2001-12-06
ggttgttgtgcactggagagctagctatcagagcagagtagcaatggagaggacgacggaggatgatgagaggccgacggttcctctgctggagcctaagccggcgagcaacgaggaggaagaagaggttggatcggtgaggcggcgagtggtggaggagaacaagaagctgtgggtggtggcgggtccttccatctgcgcccgcttctcctccttcggcgtcaccgtcatcagccaggcgttcatcggacacatcggcgccaccgagctcgccgcctacgccctcgtctccaccgtcctcatgcgcttcagcaatggcatcctgcttggcatggcgagcgcattagaaacattgtgtggacaatcatatggcgccaagcaatatcacatgttgggtgtctatctacaacgctcatggctagttctcttctgttgtgcagtcatccttctcccggtctatatcttcacaactccactcctgattgctctcggtcaagatcctgagatctctgccgtcgctggcaccatctctctatggtacatccccgtaatgttctcttacatatgggcattcatgctccaaatgtacctacaagcgcagagcaagaacatgattgtcacttaccttgccttcctcaatcttgggattcacctcttcttgtcatggctcctaacagtcaagttccaacttggtcttgctggggtcatgggatccatggtcatctccttttggatccctgtgtttggccaactcgcttttgtcttctttggtggttgccctctaacatggacagggttctcatcctctgcttttactgatcttggtgctattatgaagctttcgttatcgtctggagtgatgctttgtttagaattgtggtacaacaccatattggtgctcctcactggttatatgaagaatgcagaggttgctcttgatgctctttctatatgccttaatatcaatggttgggagatgatgatttctatcggatttttgtctgcaataggagtgcgggtggcaaatgaacttggagccgggagtgcaagaagggctaagtttgccattttcaatgtggtcaccacttctttcttgataggatttgtgttgtttgtgctcttccttttcttccgtggaagccttgcatacatatttactgaaagtaaggcagtagcagatgaagtcgctgatcttgctccccttctagctttctccattttgttgaatagtgttcaaccagtgctctcaggtgtcgctatcggatcgggttggcaaagtgtagttgcctatgttaatgttacatcgtactacttgattggtatccctcttggtgcaatactaggctatgtgctaggatttcaagcaaagggcatttggatcggcatgcttcttggaacactagtccagactcttgtgcttctattcatcacacttaggaccaattggaaaaaacaggtagagattactcgagagagattaaacagatggtatatgggtgagaacggacgatcacagaattcaataggaaatgcatgatataaaacttctgcacacttgtaaagaattttgatgatttatgaatcaacctgtcaaaatgggattgtgctcgg

SEQ ID NO: 17430 - DNA, 1266 bp, Oryza sativa
  ref <308>: DATABASE ACCESSION NUMBER: AK067876
  ref <309>: DATABASE ENTRY DATE: 2001-12-06
gccgctggtccaggcagagagaccaatggcgtcttgctgggagcagctgcagggcctctgcgccgccggccacttgcgtcgccgctgccgcggtagaagcttggtcctgctgcagcagctgcagctgctgggggttttggtggtggtggtggccggggttgcaccaggcatcagtgaggcacaggtgaggagccggttcaaggcgatcttcatgttcggcgactcgatcgtggatccagggaacaacaacgggcaactaacggaggcgagagccgacttcccgccgtacgggcaggatttccccggcggggtcgccaccggcagattctccaacggcaaggtccccggtgacttgatagcttctaagttgggcattaaagagctattgccagcttacaaagatcaggaccttgaactaaatgacctacttactggtgtggcctttgcctcaggaggcagtggatatgatcccctcacttctatatcgactgccatatcgagttcaggacaactcaatttattcagtgactacaagcagaagcttacatctttgatcggagaggaggcaatgacacgtattctctcagaagcagttttctttactgtcatgggagcaaatgacttgctcaacaattattttacgcttcctgtgaggcggcatcaatatgacattcctggctacgtggactttgttgtctctaacgcagttaactttactctgacaatgaatgagatgggtgctaagatgattgggttcgttggtgttccaccacttggttgttgtccctcacagagaactggtccatcaagagaatgcgaaccattacgaaatcaagcatcagaattatttaatactagaatgaagcaggaaatcgatcgactaaatgtcgaacataatattgatggtttaagggttgtttattttgacatatactacaatttgctcgacctgatccacaatcctggttattatggtttcaaggatacatctgatggatgctgcggcaacacagtgctaaatgctgctatattcattaaatatcacagtgcatgtccaaatgtttatgattatattttctgggatagcttccatcctaccgaaaaggcatacgacatagtggttgataagcttatccaggaaaataagcagtatctgatgtaaatgaaatatattatcttatatattacatgtgcttaaacggaatatacaacgactataaatgtattctataagtgatttcaaattaatcataactcttatttagg

SEQ ID NO: 17431 - DNA, 1602 bp, Oryza sativa
  ref <308>: DATABASE ACCESSION NUMBER: AK067877
  ref <309>: DATABASE ENTRY DATE: 2001-12-06
agagagagagcgagccatcaacggtgccgtcaaagcctgccagaccaaccttattccccgtcccccttctctgcctccccctctctcttccttcataagctggcaatggtgccattcccccgcatcgccctcttccttgtctctagcagctcagccgccagaatattcaccattgctgactgtcgcctcttaactccacggcttccctcgcgctattgttgtcagccctacccactgctgacctccatcacggggcttcagcaacaccccccccccccccgcccgcctcgttgccctctgtcgtactcctacccaaaaccataaccttcatccatagattctctactaaagacagggaattgtcagcgacggcaaaggataggtgaggagctcatcgtcgtcattgccgttgatggttagccctggttgccaccttccccttaaacaccgttggtaaagttcgggaatatatcctatgcacataagcttccagtgcacactccatacacaccaactagcaaatatcacagaaaattctagaaaaaaaatagacacatactcctaatagtattacacatatatgcaaagtctcatattcaaattcattatattttatccgtaacaaaaaagtgaaaaatctgacagtttttatcgtaaaaatctgtcagaattttatcctttttgttacagctaaaatataatgaatttgaagttaagatttcataggttggtttaatactattagaagtatgcgtccaattttttttacaattttctatgacatttgctaggtggtgtgcacggattgtgcacaggaagctcgtgtaaataggataggatatgttcccgtaaagtaaagttcaacgttacaaaaccagtggacttcttcaatcccgttgcaatcaacttaggaaccattatttagatatgattagctgtaggttacacagacatgaatgggcagcagtagactagacagtggtccaaatcagtgcaactacccatctgcacggtgccaaaaggcccccatgcaaataaatggccaattcgaaacatgtactagtagcatatctcatcgtagcgcccccagacgctgtactgcacacgcacagtgccacggagagagaaaacagccttgacacaccggacaaatcatttaaatgcacacagggatgttacacaggacatgcatttgtcacatttttttattttatttatttttccttgatggtgtacatgtactggtggtagtagtactacaacccatgcttttccttctttttgcaaacatttttctcttttttttttggccctctcttttgtcagatactgagcaaaagggccgacaaagtaagcattgtgaatgacatcgtttgtggggacatgcattggaccactgaatgattttgcaatccattgctttatgattggagctgtttctttcttttttatttgttttttgtttattttttattttctcctctgctagctggtactcatgtttcagtgttattttttccccctagcttggaacagttctataccattgttgcctggaaacaatgtatagtatgtgtagtactacattatattctttcttgc

SEQ ID NO: 17432 - DNA, 730 bp, Oryza sativa
  ref <308>: DATABASE ACCESSION NUMBER: AK067878
  ref <309>: DATABASE ENTRY DATE: 2001-12-06
gaccaccaccaccattaacgcttaaaccacccaccaccaccaccaccgagcaagcaaacaccaaaggcaggcagggcaagaggcgaccgaatccgaaggagccaatggcgaaatccctactggcggcgtccgcgctgctgctggcgctgctcctggcggtggccgggggagcggcggcggcgggggaggtgccgctcgcctgggagctcggggtcggcggcggcggcggcggcggcgaggaggacagcttcgggttctcctccgaggatgcggcggccgacggcgccgcggtggtgaggcgggtgctgcaggggcaggggtacatcagctacggcgcgctgcggcgcgacaccacgccgtgctccgtccgcggcgcctcctactacaactgccgccctggcggccaggccaacccctactcccgcggctgctccgccatcacccgctgccgcggctaacccacctccgccaccacccgctgctctgctcaaaccgggattattcaaagttcgtttgcctcgtcttctactttttctttttctttttcccccccttttctttcgtttccttgtcgctgttttaaccgtgaaagaattggtctgggtcggtgcccacgaatcgaatcgagtgagaactgagaagaagatgtgtgccccctgtatattgcgattggattcttatattattatgaattaagtcgtgtataaactgatggattagatttgtcatt

SEQ ID NO: 17433 - DNA, 543 bp, Oryza sativa
  ref <308>: DATABASE ACCESSION NUMBER: AK067879
  ref <309>: DATABASE ENTRY DATE: 2001-12-06
ggctctgcgtccttgtcctgctctgcgtggcgagcctcgtggatgtcacggaagggcagcgaggcggaggcggaagtggaggacttgcaggcgccgcaggcgaggacagcataccattcggggccggagtcggcccgcgcggcctcagcagcggtacgtgggccgcatggtccgcctcctcgctgctcgccgcggtcgccttgctcctgtagcgcggcgcctatatggtaaagcgcgctgttgtttgcttttacatgcttttttgtactacgtgatatgtgtgatgtgtgcttggggagagagggtcctgtgcagcatgcactactgaacccatgtgcagtactggatttggattggtgtttggggtggcaactagtttgggcgcctcgcagatatattactgttctgtctttgatcgtgagataaatgggtaaaagtatgttgtatccaatcaagaatacgactattgtgagttgtgaaagtactatatgtaaaagtgtgatgtatctttacctattataaaatctttaagatgtttctgcc

SEQ ID NO: 17434 - DNA, 1313 bp, Oryza sativa
  ref <308>: DATABASE ACCESSION NUMBER: AK067880
  ref <309>: DATABASE ENTRY DATE: 2001-12-06
gactcccactcccacgcttctctcctcctcccccatctccgcgcggccacggccatgtgggccctcaacctgaaggcgggcggcggggggccctgcctcacgccgaggcggcgccccctcgccgccggcgaggccgccccgtgctccgtggcggcggcgtgggcggggaggagggtcggggggaggcgcggcatggcgctggtggcggtgggcgcgtcggggaggaggggcaaggacggcccaggcggcggcgatggcggggacgatgaggccaagagcaaggcctcgtcttcttccggaaatgacgatgcggcctccacaggtgacagctctgatggattgaaccaactgcataacgaatccaaatccaatatctctaacagcaattactggagagatgtcagagcaaaccttgtgcgccgggagcaggagctcttggtagatccaagtgcacccgcagagcagaaaacatcatcaggagaaccagcacaccagcttcctcaaaagtgggctcaccctattacaatgccagaagcagggtgtgtcttggttgctaccgaagtgcttgacgatgatagcatcttcgaaagaactgtcattctcctccttagactaggttccagaggcacatttgatagcccgtttggagtcatcctgaaccgtccactctacacaaagatcaagaatgtgaatccatcattccaggaccaggcaactccgttcggtgactcccccctcttcttcggaggccctgtcgacatgagcatgttcctggtgagggccagtgacaactctcgtctcaaggggttcgaggaggtcataccaggcattcgctttggcttccggaccgacctagagaaggctgctgttctgatgaagagtggggcaattaagagccaggacctgaggttcttcgtcgggcacgctgcgtgggattacgagcagctgttgagcgagatcagggcaggatactgggccgtcgcctcctgcagcacggagctgatcagcgatgcactgacaggcgatccttcttgtctctggaccgagatattgcagctgatgggagggcattactcggagctcagccagaaaccaaaggaagacaacgagtagatgctgctcatatgtaccatgacaaacagctaaaggttgtatctgtcctgtacataattgaaataggataaatctcacctggtacaactctagtctcatgccctccatgcttcttgtagcaactagcaactgctatgtatgcaactattgaatatgcatttatcatgctcaaataagctctgcacgatgattgcgaatgg

SEQ ID NO: 17435 - DNA, 1515 bp, Oryza sativa
  ref <308>: DATABASE ACCESSION NUMBER: AK067881
  ref <309>: DATABASE ENTRY DATE: 2001-12-06
gatattagtttgtgtgtgcgctaagtaatcgcccagttaggcggtcatctctggtgcttgttgcgcggcctcttccgtccacgcaatatctgcggttgttgctggatccgccggtgcttgcaaatattttgcaaatttctgctgacctgtaagcacacatctcatcgactccctaatttcttttggttctgttcaggctttgccaattccatacctcccgttcatatgaaatgcaccttgatcccaaaagaataattcaccagccgtttataagaaaaacctattatccttttaaagtaataaaaaaaaggagcccccacgttctctctcatgacttagaaattctgatattaatcggagaaaaagaaaattagaatccataagaaataaaatttaaaaataataaaaatttagaattaaaaatagggaatataagaagaggagactagagcccatacaagtatacaatttagaactaattgaaactcgaaattaaaaaataagaaaagtaaaacctagaagtcagagtccctatagaaatataatttaaaaataactaaaattggaattagaaaatacgaaatatcagaacaagatttcatagctcatacagaataatttagaaaaaaagacttaaattcaagattaaaaaataaagaatattaaaagatgagtttagagtccatatataaatacaattagaaacaacagaaattcagaattaaaaaatagaaatattgaaagaagagtccagagtccatataggaatctagaacaatttgaaagtcaaattgagaaaaaaaataaaaatagagcttagagtccatagagaaatacaatttagaaataactaaaattcaaaattaaaaaaaataatattgggagaagaatctagaatccatataagaatataatttagactctaagaatataatttattttataattttaaaaataaggaatagtggaaaaaacttagagtccatataggaatacaatgataacagaaatttggaactgaagaataagaatattgaaagaagaatatagagttcatataggaatttagatcagttgaaagtcagaattaaaaaatttgaaaaattaaaggtagaatttagagtctatataaaaatacaatttataagtaactaaaattcaaaatttaaaaactaactaagattgggagaagagtttagagtgcatatagaaatacaatttagaaataagtaaattcgaaattagaaaataattaataactatcaatacaatacaaaattcaaaattgtgttgttatttgtaatatattttgataataaaatatgctatattatatgagaaaaaataacgatgttacatgctagttctttagaatggctactgtagaggcgtatggataacagtaaataaccaaattaaagaatacatcagtattttcttaacaatgtacagatataaaagaaaaagagaggaccctcagtaaattttcctccctccacattctagcaaaaactc

SEQ ID NO: 17436 - DNA, 1424 bp, Oryza sativa
  ref <308>: DATABASE ACCESSION NUMBER: AK099022
  ref <309>: DATABASE ENTRY DATE: 2002-08-28
ggcctccgattttcttctcttctcttcttcttcttctttcccttctcttctccgccgccgacgaccgaataaggagagtagaggagagagagagagagacagagagatggctgcggcggcgcgtctcctcgcgcgtatctcgaggcagggcgtggcctcggccgcggcggcgaggcggcaggcggaagcggcggcgctgctcggcgcttcggcggggcggcacttggccccgccctgctcttcgatcaaggccttgcctctgctgaatcagccgaggctgtactcaacttcaacctttcaaaggtttgggttttcatcttctgctccccagcaagatgataaggcagcaaataaacagacagaggatggagttaataaaagcactcaatctgaagcttcaaatgaaaccaatagttctcctggaaccgagaatgcatctcaagcagatacagaagaccttgacctgtcaaaggaggacctgacaaagctagttctggagaaagaagaattgttgaaatctaaggatgaagaagttaaagacatgaaggataaagttttgcgcagctatgcagagatggagaacgtcattgcgagaacaaagcgtgaatcagataatgcaaagaagtatgcagtacagggcttctccaagagcttgttagatgttgcagacaatttatctagggcatcatctgttgtaaaggagagcttctcaaagatagatacatctaatgaatctgctgaagcagtgaagctactaaacaccctattagagggtgttgagatgaccgaaaagcaacttggggaggtcttcaagaagtttggagtggaaaagtttgatccacttaatgagaaatttgatccaaataagcatgctgcgcttttccaaattcctgatccttcaaaaccatcaggaactgttgcggctgttgtgaaggtgggctacatgctacatgatcgtgttctccgtcctgcggaagttggtgtcactgaaggtggtccaattgaagaggagccggaggagaaatctgacaagtcagattaagttagatatcgacttgtccttcagggatttttctaggcagccagacaagtgcttcgcacttgcatgaaaacattacggttctttggaacttcgaagggcatggcagacacagttttgcactaatgtatcaaccgatcaacaattttcccgttttagttggataagccgatccataggttacttgtttcaaggatatttgtaatacgaaatgccattttgctgtgatgagcgtcttctttttacctttctgtttgatataatttagtgcagactccgtccctttctattgatccaggcatatccagccatcactgtgtaataaaaaaaaagccatgtccatgtgtacgcctgaaatggcaatttgtagtcaaatttctctctc

SEQ ID NO: 17437 - DNA, 2236 bp, Oryza sativa
  ref <308>: DATABASE ACCESSION NUMBER: AK067882
  ref <309>: DATABASE ENTRY DATE: 2001-12-06
gaccaaaaaaaaaaaaggtgaaaaaaaaaagccttcgcatctagcgccgcctctctccacctccctcgtttcgatctagctcgccggcggcggcggggcaggcggcgaggcaggcgggcggcggactggggcagaccatcgccgggatcgtgcggatggccgtgttctggtacttcgccgccaagttcttcggcccgaagcggcccccggcggagccgggcatgctcatgtccaacctcttccagaagggagagccgctggatatgtggatgtatttatcagaaaatgagaaattcaatgacttcagtaatgaggatgcactcgtctggcatgaggcaaacataccatatgcagtctggggacctaccagtacgagaacgcacacattgacatactacccttctgaggctatcaagaacaatggttctttgtatgctcatgtttattttgcccgctcgggttaccctgtggatcctactgatcctgaatatgagcaaagttctgcatttggcaggacacaccctgttgtggcttacttgcgaaaaccaaaagatggtaaaaagaagagcttgctgggagattcaagtgaatctaatgaacaaccaccacctaaggagaataaagattctgtagacaaagatgagggcccagttgaatatatttcttattggaaaccaaatgtaacaataaatcttgttgacgacttcacacggtatccacacaataatgttccacccaatgttgctccatatttgaatgttgatccatcttcaaacaactactacccaactgtattcttcaatgagttttggctactgagagataaattgatagcactcaatgagactgtggaggaactgcctttgaaccttgaagttggtcctattagcatgaccaagtggcaaatatttcttcagatggagcagtccttccaagttcatcgcagttatggaagtatgcttgaaggggaggctgatgagctcaagagagttttccttgaaggaaatccatactttttgggattgaccatgattgtttctctgttccactctctgtttgattttctggctttcaaaaatgatattcagttctggaataagaacaagtccatggaaggtctatcagcaaaatccgtggttctgaactttgtatgccagctgattattttcctctacctgctcgacaatgagacttcatggatgatccttggtagctctggaattggtgtttgcattgaattttggaagattggaaaagcaatgcatgttgagatcgatagaagtggaaagattcccatgttgaggttccgggaccgtgaatcatatgcacagaataagacaaaggagtatgacgcaattgcaatgaagtatcttacatatgtacttctcttccttgtgttctgtttctccatctattcccttaagtatgagaaacacaagagctggtactcatggatactctcttctctcacaagttgtgtgtacatgtttggtttcatcatgatgtgcccacaactattcatcaactacaagctgaagtctgttgctcatatgccatggaggcaaatgacctacaagttcctcaacaccataattgatgaccttttcgcatttgtgatcaaaatgccgatgctgcatcgtctctcagttttcagagatgatgttatcttcttgatatacctctaccagagatgggtgtacccagttgacaagaagcgtgtcaacgagtacggcttcggtggggaagacgagccacaagctccccagacattggaagggagcgatctagcagctgcatcccagcaagccggggctgaggcggaggccgagacgagcacggaggacaagaagacgaagtgagcccctcctgctctgcacctccagatcatccaaccacagaacacatctcggctgccaccgggcgtaaattttctgtgccgagcttggaacgctggactcgcctcacccgtcgctgaatgctgctgaccataagagattgtagtaacaggctttgagtgggcgcatcgacgaacacacatacacttgcccaatctatggacgggcaacatcgtcaaacattatcgccactatttcccagtttgtcttaatctttttttaggtaacaacaaccaccaccattaccagatgtcgataacgatgcactagacgcgtattttattggtttatgtataagttttgcattggctgaaaaaaaagtgttcgtttattgatccgcc

SEQ ID NO: 17438 - DNA, 1659 bp, Oryza sativa
  ref <308>: DATABASE ACCESSION NUMBER: AK067883
  ref <309>: DATABASE ENTRY DATE: 2001-12-06
gatgtttgtattggtaaggttgttcaaatcaatcaagtctagtgtagtagctaattaagccgccgccgcgagtcgacctcgcaaccatccatggccccgcgcctcctcctcgccctcgccctcgtcctgctcgcctccggcgcaagcgcggcgagcgtgggggacacgtgctcgtcggagggagactgcggcgcggggctgcactgcagcgactgcggcggcggcggcggcggcgacaagacgtgcacgcgcgccaagcccatcgacccgctcacgcacggcacggatctccccttcaacaactactcatggctgacgacgcacaactcgtacgccctcgccggctcctcctccgccaccggctccgccctcatcacccaaaccaaccaggaggacaccatcaccgcccagctcaagaatggtgttaggggcttgatgcttgacacttacgacttcaataatgatgtctggctgtgccactcatttcaagggaaatgctttaacttcacagcctttcaacctgccatcaatgtgttgaaagaaatccggacgttccttgacggtaacccttcagaagtaatcacaattttcttggaagattatactgcttctgggtctctgccaaaagtattcaatgcttctggactcatgaagtattggttcccagtggctaaaatgcccaagagcggtggcgactggcctctactcaaggacatgatcagccagaacgagcgcctgctagtcttcacatcaaagaaatcaaaagaagcaagcgaggggatcgcttacgagtggagttacgtcgtggaaaaccaatatggaaatgaagggatggtagagggtaaatgcccgaatcgtgcagagtctccagccatggattccaaaagccagtctcttgtcctgatgaacttcttcacaacagacccaagtcaaacaggggtttgcgcaaacaactcagcgccacttgttagcatgctgaaaacctgccatgatctctcgggcaatcggtggcccaattacatcgctgttgatttctacatgaggagcgatggtggaggagctcccttagctactgacatcgcaaatggtcatctagtatgtgggtgtgacaacatcgcatactgcaaggcgaattcgacattcgggacatgtgtgatacctccaccttcaccgccgccgtcgcctcggaaggcacccagcggcggcaagggcacaagtgcaggcggcagctccagttccagcggcgcaatggctcgggttgtactaccaaagctgagcttcttcttcggagtggcacttctgatcctggtcatactctcttattaagagcagacccattcacttgagcttgtgctgtctttgtgctctgctggtacaagcacatactgtactgccattctgaggcaaaattttctgctctttttttagccacctgttccattggtttgtaacttctttttcttttttgttaatgagagctgtagatgccagattagctggagaaattgttcatgtgccgagctgtagatcattccttttatttgaggcaatatttttctgcatatcaagtgatcttattgctcataaaataactgcaatcgcattgtaaaaaaatgttgtggtaagaccttttacaggtgcaaaatatgcctattatgc

SEQ ID NO: 17439 - DNA, 1210 bp, Oryza sativa
  ref <308>: DATABASE ACCESSION NUMBER: AK067884
  ref <309>: DATABASE ENTRY DATE: 2001-12-06
gacacgtgtacacgacgcgacgccggcgacggcggcagccatggagcccgcggcgatggaccgcatcgccggccgcctcgccgccgtagacggcctctactacccgaccaccttcctcctcgccaacccgccgccgtccgccccggaccgcaaggccgccctcctcgcgctcctctcccgcgacgccccgctcttcctcgagcgctacggcgggtcgctgtcccgcgacgagctcgccgccttcgacgcgctcgccggcgactacgaggtcggctggcacctccgccgcctccgcgcggcctccgaggggggcccctccgcgtcccgcgtccgcaaccgccgccgcgcctacgaccgcctggtgcgcgagggggagtacttctccgaggaggctatgcgggagcgggagccatacctgcaccacgagtaccttggcaggttccaggatcccacgggacgggccatggcgaggccgggggagcggtggtccgagacgctgatgcggcgggctgcgaggccgtgatcgttgagaagattcgaggggagcagattaggagaggggttgatcccagcgagtgggtaggtggtggcgctgaggaggccatggaggagcaggaagaggaggaagaagaagaagaggaggaggaggaggaggaggaagagagcgaggaggagcaaggcatggacatggaggagaaaggaagaggtgccgataattcttccgagaatccgagtgtgactgaggtggttgactccaacaaaactgcaggggcttccaagcaaacattatctgctgaagatatggaggatcaacttgaacagtttaccagcttgatgcaacagaagttcctgtccggtgaagactctgagcatatggactactctcggatcgataacgacgagatgctggatgaccattggtcaaaagaagccaactatgatgcggaggagaagtatttcgaagaggattagttcaaagttcaaactaggctgctgttatagcatcagttatgtagtgcatcatcgcatctcgttttttttttgttcatgttcagcacttacttagtctatcatgtacatatatctatatatgcagttgttgcccctctaatccgaataagttgagtaacttgcttatgaaaactaccgtatgtgttggaacatcaatcagaaaatagggtcctgtcttgtggagatgtttacaaattgc

SEQ ID NO: 17440 - DNA, 2420 bp, Oryza sativa
  ref <308>: DATABASE ACCESSION NUMBER: AK067885
  ref <309>: DATABASE ENTRY DATE: 2001-12-06
ggcttccttcttcctgaatttttcccctcactctcttatctcatcttttccccacttgcttgcttcctgaaattttccttttccctctctccttcctgcgtcgccgccggtcacctgagtcgcctcggtgtacttcccttccagcttattgtggggaaaccttgaagggctccctggggtcagatccgtttgctcatggatcggaggtgtgcggcactggggatattgatgtgcgacgaaccgtcgtcggtatcggaggaccttcggcacagcaagggtcctttgacgaagcatctcgtttgctgtccatgattggagcagtggctcatggtttcaggtaaataggaatattcatgcatatcattcgtttttgtctcttatgcaaaatataaagttctcttcttgcttgttggctgtttgatttgattagcagtgtgaagctggcagtcttccgttggggatatcattaggattgattcatttgtctcttttattgaaggaaaagtgtactgctctttgacgcactccatcaaaaatattttacatcaagaagtttatcttctcaatctttgctgggggaaacatttgaagatatatggctatttgagatttttgctaattgattttttatgcttcaaatatttttattggttgactgagatgaatttttattagattagtagatatatatggatattaaaaatatactatttcagaacagtatcaagacaaatagaacatttccttaaataaattgatattagataatgtgaacctaccagcaccctatcttaagctcgatatacgtttgagaggactttcttatcaaatgggtcttattgaataacatttgtgcatctataaacttgaataacactggtacaattagaggattttaaatactgtgggtatatgtcagaggactttttacatagactgtctttcgagctcaccgtttctgcttgcagtaaaccttaaaaatattaagtcaattagaaaatctccttgtatacaatgtttctagcgacattttcttcgggacaatctgaatcatcaatcagaaccttcaggccatttcggtttgtgactctagagaatgctaccgccctgtttgggggagcttctcccagctgcagcttttcccaaaagctgcttctgctagaagctgcctcaaacagtccacagcttctgagaatctgcagttatagattctgaaaaatgaactaagaagccagaagctgggtttcagagcttttccagattctcaaaagctggctaccaaacagctgcttctcggaatctaaagctccccaaacaggcccccatggcagaagacttgtttaggacaaatggccagttggtgtcgctcggtgacatgatgattggaatttcaacgtgttgaggaactcggtaggatacatgtgctccatgctactgttgtttgtcatcgctttgcaaacggtgtcacagcttagcaaaatgtaaggtggaggcggtgcagtggttgggtcacggatcggccagggtggcgagcctgggggaatcggcgggcaggcaaaggttggttgacgctgtttttcttttcaattcctttgcatgaattatatgtttggatgcttcatgtgcaatcggttgcaaaattaggtctgtatatacagagatgtgataaaaaatcataaataaaataacagattgcatagtaatatatctcagtttatgcatatacaacattcgactattataatacagtacatgtaatgatctgtattgactatgaactattctttctagctagtatcattaactgtaggatattctatcgagctactgctaattatgaactattatcatgagctctaagcactatttgtatacttagaattcattttccttgttctctgaggccttgtgttgcatgctttattgtctgattgaacacatgttttctgacgtttttcaacagagctttccttgcctatgccattgatggttttagcctatctttttcctgccttgatggattcttcaacaactgatttgtttatttcatggctgtaggtgtcatttctgatttccgcctttgtggattttgcatgagcgccttttgcatttttgcctcgaacttttgcatctacgcattttatcatacttgtttcattgctctcctcttctgaatcgtcttctattatgtatgacctccgtcttatttgtttgcaactgggaggtttgtcagacgaagtgagttcatcttcactcgtgatttcctggtcactatcctctagctcttgcttcacgggtagcagtgagatggatctgtttttaataagagggccgctgctggtttgttcctgcaaaggcaatgaagtatttgtcatatgtgctatatattataaataaatgaaaatttgtattatatgtcc

SEQ ID NO: 17441 - DNA, 1962 bp, Oryza sativa
  ref <308>: DATABASE ACCESSION NUMBER: AK067886
  ref <309>: DATABASE ENTRY DATE: 2001-12-06
gagaccgccccggaatttcacgcgcaccctcccactccacactctcctcccaaaaatttcccccccctaaaaccctagcttagctccccccgcgcgcccatggcctccgacgccaagcccgactccccgcccgccggcgtcgaccccccgccgcccaaggaggaggcgaaggcggagaaggagggggagggggaggagccgcagtcgggggggcggaagcgcgggcggcggaagaagggggaggcggagaaggagaaggagaagcccccgcccgccacccccaccatcgagaggccctccagggagaggaagaccgtcgagcgctactccgagctcgccccccgcgtcacccccgccaagaagtcccccgccattctccagggctctggatcgaagctgaaggacattcccaacattcaattcaaactatcaaaaagaaaggcagacgagaacctgcaaagtcttcatgttttaatgtatggaagaaaatcaaatgtccatttcttgaagagaaacatatcccaattttctggttttgtttggactgacaatcaggaaaaacaaaggaccaggataaaggaaaagcttgacaaatttaacaaggagaagttgctggatttttgtgaaatccttgatatacatgtttccagagcagccacaaagaaggaggaagtctctgccaaattactggaatttttggagtccccttgcatcactagagatgttgttctcactgatgataagaaagggaagaaacgtggaaggagatctaaaggaaatggccaggcgactgctgaaggcgcttctgatgggaagaaaaggagaaagagtcgaaagcaatcaactgaagctgctaaagagaatgacgatgaagacgatgagggtcctgctgattctgaggatgcatcaatgggtgaggaagatgatgaggattctgaagcaaaagataatgctgggagtgatgaagaacctgatgagcctccagcaaagaaaaaggcaacagatgataaacaaacaaaaaaggcaaaagaaaaggatgcgactgccaagaaggcttctacaagacctgcaaaaggtgtgtctaagccttctcaagacactgaagaagatgatgagccagaagttgagttagaaagcaaaaaggttgtcaaaaaagtctcaaagagttcaaaggagagtgatgttactgtagataaaaccaccaagaaggcttctaaatccaaaaaggatgaaggaaaagatggccagaacaataattctggtgcattgaacaataaggcacgcaagaaggatgctgccaagacaaccaataaaaataaaggaaaaggaaaaggcagcacagaggctggggcagccccaaccactgaagagctgcatgctgttgttagtgacatattgaaggaagttgacttcaatacggcgacattggcagatattcttcggcaattaggtactcattttaagatggacctcatggataggaaatcagaggtgaaacacattattgaggaagtaataaatagtatgtctgatgatgaggaaggtgaggaagacaatgctgaagatgacaaagacaaaaatgctaaggaggaaaattcaaaggaagatgctgatggtgacgagaagtaattcagcggaccacatgtgatggtcgcttgtgttagtgttatggatgcaggactttctagcccaacattgccgtttgggctgtgttgggtctgtacaatgagggcaccgcaacaatgaactggtgacctgggggtagtacaaggttgttaacaatttgatagccacacacacctagttgttgtgcttgactttggtgtgacttgtagtctagttgctggtcatgtacaatagctgtgctgttataactttgcttaggtagctagcctgactgtaatatgcagaataattctttgcctgttccttccatttatccatgtaaaacagtgaatttgg

SEQ ID NO: 17442 - DNA, 2990 bp, Oryza sativa
  ref <308>: DATABASE ACCESSION NUMBER: AK099023
  ref <309>: DATABASE ENTRY DATE: 2002-08-28
ggggggggcagagatggagaactacaacagagaagaaggagatccatctacacatatatgaagaacacacgcaagagaaaacacagggcctcggcggaagggcacgccaacgtgtgcgcggccggccggccgaaggcggcgcagcatggcacaccaaaagtgtggcccgccgggggcgccgctcgatgctggaagatcaatctacccggagacgaaggctgcgacaagatcgacgccacgccgtccaggacgatttcatctaacattgtccagttcttctgtttatctctttctctctctacatgtatatttcaggctttcagcacatatatgcatggacagtcattcaactcccatcaatccatccattggcggcggctgcgccgaaggcagaacacggagggaggaagaacacgacggcacgagagaagccggtggctgccggccggcgcatccgacgctcggcgagggtacaggcggtcacccaagagacggcgccaggcgatcgacattcgtccagccatccctcttcctgatgagaaggtacagcacgccggccggcggctggacagaatgacagaggagagaggcagtgcacggtcatctacaccagcacgccaggccttctctttctttcttttttacagattgatcatggagtcgagggggcacagatgtagaaccacggcaaaagagaggatccatccatcaactcctggcatcaacaagatcgatagatcaacacacttccatcccgagaacactcaacacacataacacatccatcccgaaaacactcaacacacatctatccattgacgatcaacccatccacggtggcggcgagcgacttcggccggagcaccggcgtccggcaggagacgcggcgctctgatcatcggcaagcagagatcaatggctgctcaaggcaaaagaactaattagattggttccttcttttcttgttgcagaacatgcatgcatgcgtaggagatgtacatatgcgggtgctgttgctgccgtagtagttgcatcctctgtacgtgctccccgggaagtaatcgtatcggcgccaccgcccaccgctcatccgagtcgacgagatgctggttatccctggagtcgacaccgccaatcgagtcgccggtgatgcatccacctgaaactgcggcgtcgccgagatgccgagatgtcgggcgtcctcgctttgtcggctgcaagtttcaccgcggcggactgaccatgtcggagtcgtcgtgacgctgctctgctggggcacgccaggatcgccggaggcccggagccaccgtcgactgccaagactcctgcttccaccacgcacagcgtatcaaatcatggccgcagccctttcccccgacgcggccgatgttcggcgctgctactgttctcacgacggcgatactatcttcctcacgatggcagcggcgccgcgtgcagatgatggtggttatcgatctacatcaacaaatatcgtcgggctacagatcagatcggcgatcggcggcctcatgtacacacatcgcatggcagcaacacaagccgaagcaaagcagcagcatgccgagtcaactccattcagcaaatacatggtgtggcaacgtggccgaccaaccggagggtgacacatcatcaccatgcttcagtgccatgcataagaagttgtcaatgcgatggctaaacaaatcctgttgatttcaagctttttcaattcgatgctgagctgtggttaaatggccggctgccgtctacatcaaccacctcgtcgggcatgctaatttgtaagaggtcgacatcatgccaccccgccggagcgcgcagaatgtcatcggagcaagcatggttactactgagccgtgcccgacagaagtctcattcgaactgccggaatgtcgctgaactacccgcatccgcggacgtcgtcaagtcgctgagccgcccatgccatcctgatggatcagagccatcgtcaaccaggagatcatctcgtccaccgtatcggcgacgcccagacgctcgctgttctatcaagctgctggtagcactgtccaccgagtgccaccccatcaaagcccgccgttgtgccggcatcatcgcaccgacgccgagccctaaagatgcccctgttgtgatcactattgtgtgaggacgtctcactgagactccactggccggcgacgccttcacactcgtcgcggtctctttagtcaccgtcaatgtctactcaatcatcttcgacggtcctgccactttcctcacactcatcgccatgccgttcgaggagaaagccggagcgccattgcttggtgcccgcacaccatcatcaagtccgttcgggaagacttcacctcgtctaggcggaatcgtcatcaagttcttccatgacgcctgcacttcgccaagccggagttgtcgtgccgtccatccgtgacatctctctctctacaccacatgatgagacgctatctgtctacaatgctttcacttcatcacgccaagatgagatgccatccgtctgttgtgctctctcctcttaatcacgatcgatgttgtccgtccgtgattccctccctcttcgttgggatcgagatgtcgccgcttgtccgtgtattggagcgtcgctagtctacatcagcataaagtaagaatggtgtcatctgtgatgccagggaaccattcatgcttaatctacaccaacaaatgccctcaacggttccgctgacgaggcatttacttcttccaaggtcgccgtcgttaccggcgccctcatagagccccttttacgggctcgttatcatatcaactggatcaatagtagacccatcatctaaaggaggtgctaagccatgtttatccggctgttgtctgcaccgacttcttcatcaacattttcattacaagtccctgccgtataaggggcatgatgggtcaggaggtgcccagccatgtttattccggctgccatctacacc

SEQ ID NO: 17443 - DNA, 2039 bp, Oryza sativa
  ref <308>: DATABASE ACCESSION NUMBER: AK067887
  ref <309>: DATABASE ENTRY DATE: 2001-12-06
gggaagtagctagcgcaggccctaaggcaaccaaaaagagtggaagaagagcagtgagccctgaaagcgtgtctttggctacatccaccgccacgaccccgccgtctccggcgagctcgccggcgaatcttcctcagatccgcgctactgcagccgcgtccccctccccacgtgcggcacgagcgtcgcctcgcctcgtccctgcaaggtgcatcgtcctagcgtcgccccggccccgaccacggcaaagtcgaaggcaccgccgacacggccagccacccggctggctgggcctcctccccgccatgggcgccgcgcgtctgattgattaagcgaggacctcgcattgcacctggtgagtcggctcttcgcttcttgcgcggtagtgcccgcgtcgcccgccacctgttcgacggaatgtctcctaagcaaaagagcttgaggagcaagagaatggctgaggccagcgaagaggacgggatcgacgtcctcccggatgctctcctccagcacattctgtccttcctgccggccgaggatgccgtgaagacctgtgtcctgtcccggcgctggcgccatctctggaaattgacgcccatcctgtgcatcaccaatacagagagatggaggagccccaaggacttcatcaagcttgtcaaccatctagtgctcttccgtggcagctcgcctctacacaagtttgagatcaaaatcaattcatgtgcacactggatgataatgtccggcgacagtaatccattccattgtgccatcatgtgggtcatgtatgctctaatgtgccaagtccaggtgcttacaataaaaaatatgcatgcatacattgaaatggacgatggcttctcactcttctcgaggcacttgacagagctcaatctttctggtctggatttcagaaaatttgtcctcaacttctccagctgtcctgcattggaatatatatatttctctgcgagttgctgttttaattctgtcgagaagatcttgtcccagtcagtaaaatatcttacattcgacttccctgaattcagtgaacatcaccgcactcacatttatgcaccaaacctcattacgctccgtcttgatgattgttggggcagagttccatttctggaaagcatgccgtcattaattgcagcatttgtcagaccccaccgagatagtgatgacttgtgtagtaatacttactctggtaactgtgaagatgaatactgtcatggttgttatggtatggtagataatgctggcaatgacagtgccaaatgcgtgctccttggaggtttatcagaagctaagaagttggaattgatagctggacctgaaatgcgtattttcagaagtgatttaagatggtgccctttgtttagcaagttgaagtctttgttactcaatgagtggtgtgttgctaataatttctgggcactagcttgtattctcgaacactcaccggttctactgaaactcactcttcaaatttccaaggaaacaaaacctatgataggggcagtagaaaattacagtgcattggtgaaaccagctgcaatatccaaacatcttaaggtagtgaaagtccactgtaaagaagttgatgaaggggtctgtgaaactgtgaagttcttgagtacattggatgtagtggttcttatcagaaggatggatcggtcgacaaatcgttgaatcacccatccgcccctcgtaacatttattgtactctacgtgttgttgcagtcttcagtttcgaggaaggaaattcgagttcaagtcatgatgaaggatcctctagatgaagtacctgttgaatattcaggaatgcaaggcttaaacttgcagtgacaagaactctgccttttgtcaatgagattcatattaagttccactagtaggaagaactgggatataatgagttgtttagaccgtctagctgttggagctggttatttttcttgaattatccttttataagactgtctcgactgcttaattagctttttggtggtagtatatgccacttattagttgtc

SEQ ID NO: 17444 - DNA, 1606 bp, Oryza sativa
  ref <308>: DATABASE ACCESSION NUMBER: AK067888
  ref <309>: DATABASE ENTRY DATE: 2001-12-06
gaaaatccccattttctctccctcctctcttctcttctcttctctgcctctcgccgccgctcgtcgccggcgtccccctccaccgccgcctctccaccatctccccctcctcatctacctcgtcccgcctccctgcctcgcctcgccgcaccgccgggtcgcctcctcctccgcccaccccaccgtgggcaccacccccgcgcctccaccgccgatctcaggttccattaacttcgattatataatgtagaaaagtgtagcaggagccaatagccatgccagctagtgacaagcaactagcatccacagtgaagaaagtaacatcgcgtgagctgccaaagaaaggtgcagacattgtaaatatgtctcagggcacttcaccgctgccaaaggataaaggtactgcgacagagcctggaaagaccgtgggcaccaaacggtctgatgctccttcaagtcctgggtatcataatgtttatgtacgaagaaaagtggaaaatgaccatagtaaagtgagttcttctcaggaggtgaagggtaatggaagagacaaaacaaaagagcaggagacacagcaaaatgtgcaacatgatcagaccaataaaccagaagtgtcatcttctgttgctgtgcaacatgatcagtccaataagccagatttgtcatcttctgttgctgtgcaacatgatcagaccaataaaccagaattgtcatcttctgttgctgtgcaacatgatcagtccaataagccggatttgtcatcttctgttgctgtgcaacatgatcagaccaataagccagaattgccatcttctgttgctgtgcaacatgatcagaccaataagccagaattgccatcttctgttgctgtgcaacatgatcagaccaataagccagaattgccatcttctgttgctgtgcaacatgatcagaccaataagccagaattgccatcttctgttgctgaatctggaggcatagtgtctcctaaatctcctgaaaaaacaaatgaacaaattgtgaacaagaaaaatgagcctcctgtagctcctggtactaccgttcaagatgatacccataagtcaagcaatcaatactggaatgcgagatttaatcggttacagacatatttggagagctgtgatcggtcaactcaggagggttatatgcgaatgcttaggtccctctcggcggctgatcgaagcatgcatgcaattgatctggagaaaagggcaattcacttattagtggaggaagggaaagagctgcaacggatgaaggctttgaatgttctgggaaaagtttcgccaaacggtccttcaaaacaggcccctttgtagcgacaggaccaagaacgagatggatggtgtaattcgaagagctgaaatgttccaggtccatcgcagcaaagactatggtctactcatgtagctccatttttccttgggcctcctttgccatgtaactcattttccttcatttctttctgcttttacctctcgacgacttaccaacctcatgtgctgtgagattgctgtaatgtggtgtaattaacttgtatggataaacctgccatgcttaatggccaagcgtgacaatttcaatc

SEQ ID NO: 17445 - DNA, 2318 bp, Oryza sativa
  ref <308>: DATABASE ACCESSION NUMBER: AK067889
  ref <309>: DATABASE ENTRY DATE: 2001-12-06
aaaaatatcacccaagtcctcttctctcttctcttctccgccgccgcctccatccgcggcgcatcccatctcgccccggcgactcgtcggcgtcggcgtcggccatgggcggcgactggcaggagcttgcccaggcggcggtaatcggcctcctcttcgccttcctcgtcgccaagctcatctccacggtcatcgccttcaaggaggacaacctccgaatcacccgctccacgccgacctccccctccgccgcggacacccccgccgccccggccccacctccggcctccctcgacggcggccatggggacaccagcgacggcagcggcagcgacagcgacagcgactgggagggcgtggagagcacggagctcgacgaggagttcagcgccgcctccgcgttcgtcgccgcctccgctgcgtctggcacgagcgtccccgagcaagcccagcttcagctctatgggctctacaagatcgccaccgaggggccctgcaccgcgccgcagccgtccgccctcaagctcaaggcccgcgccaagtggtagattcgatccccctgcctccctgatcttttttctcttctggatttagttcaagcatctgttagagtcgggctccgcttaacccccactgtttcagttcgagggtctagggaaatggatcgaaatttatcgttatctaagtttaggttcagttactgctagaattgctgatcacgaaatctggtggtaggttttttgtgctttgcactgaccagaggagactcataaattcctgtgtgttaatcttgtagctatgattcttgttagaaacttaactcattgttattgcctctaggtttacaggtttggttcattggaagtgaaatctcctggtagctcgatgatctcacaaatagtagcattcctcagtcagatgctgcaattcaacttacttttgcattatgttgtttgatttattgtttcctgacttcctttggtggttttgaatttacccttttgaatttggcactggagtctgaattaagatatctactgtttgcagctaacttttattaacatcatactgtttgtcttttgcgctgtctatctctgtcaattttaaagacttaatctagtttacaagtatcctaattttcatatggtgtcaatatccaaggaatgcttggcataaattgggtgctatgccgacagaagaagctatgcagaagtacatcacagttgtggatgagctattccctaactggagcatgggttcgagcacgaaaaggaaagatgaagataccacagtatctgcttcaagttcgaagggaccaatgggacctgtatttagcagtttaatgtatgaggaggaagatcagggaaatgactctgaacttggcgatatccatgtttcagcaagggaaggagcaattgatgacatagcgaagcatctggctgctggtgtagaagtcaacatgagagatagtgaaggcagaactccactgcattgggctgtcgaccgtggccatctaaattctgttgagattcttgtcaatgcaaatgctgacgtgaatgctcaggtacttgactctacctttaatgcttcactcagtgcattctagtagaattcacgcgctgataaagttggtgagtatgtaattggagcaagaagctggtaatatatcttggcgtggcattttcattgggattacattatgtactacattgaataaaaagttgctattcattgtggccatataatagtgtcaataaatatgagattgccacggctaggtactactagtggatatatattggtttgataggcactgcttccctgaaaaagtctaaacattataatgagatcaatgagcaacactgtccatgtcccttttatattcaggacaatgaaggacaaacagcgcttcactatgctgtcctctgtgagcgagaagatattgctgagttgcttgtcaagcatcatgctgatgttcaaatcaaggatgaggatgggaacacggtgcgggagttatgcccttcaagctggtcttttatgaacctggcaaactgacgacacgatgccctctgcactcttttggttgcctaccagcaagaaaccgcactgtctatgttagccaaactagatgagttgttttacgaacctcatcgaataggtcactgtcaaaaggatatttctgtattagtgaaaggagattatcttgtactgcctatacagtttacactgctagtttgtttgtgctgaacatcaatgttggccaggtctgtaaatcatgggcacctaatttctgaatgagcatgatcggacttctctcc

SEQ ID NO: 17446 - DNA, 1830 bp, Oryza sativa
  ref <308>: DATABASE ACCESSION NUMBER: AK067890
  ref <309>: DATABASE ENTRY DATE: 2001-12-06
gctcgcgaataggggcttcgttgtaattggatataggcccctctcccgcgccgcctccgcctccccctcgccccgtccccgtcgccgagcgccgccgccgccccctcaaaccctagccgccgccacccgttcgctctccctctgtcgcgcagccgcctccgcctccccctcgcgccgtcctcgtcgccgagtgccgccaccaccccctcgcgcctttgccacctcctccgctgccgccatcgccggtcactcttccacctgcacgcccgccggtccccaccccgacgacatcgacctccacgcccaccggccgcccaaccccgacgaactcgtctcctgcgtccctcaagcccgcaccggcggcgctcgcctcggtggcacagggggaggaggacgacgaagagaagacggaggtggatgacggcggtggcggcggcggctgcgcgcggacgccggatttggggtgcccctactactacgctccaccgaagacggtgacgacgacgccgccgccgcctcctcctgcggcgtcggcggttggagggtgggatttctttaacccgttttacggggcgcccctctgccgccatcgccgccgccgtgtccacctccgccgtcgtctcggagcgccgttgccgtcggcgaggcgagcagccatctccgccgctgcctccccctccccctcgtgcgccgctgccgtctcatcgccgtcttcgagcgcctccgcctcagggccggcccagcagtgcggccgcactaggccctcaaactcacaggtcccccacctagctccgtaagaatcgtaaagagcgatgccagagccgcttattccaaaacgcgatacgtctgagattgccgccgtgatgagtatgcgatgcgaggcatgtagcgattccatctgttttcgtttcttctaatggaaattgggagatgacttctttcctttcaaaaagaagagtagcgatcccatttatgccattgactgtcgactgtcgggctcgattctagcgccagccaccgtccccggccagccgctccacgagctgccctgaatcgggactgctagagtgcagctgtgcaagaaacgggctcactaccaatctgctcatctgcatatgacataggggatgtggtctccatgcggtcggggtgaggtcttgaccaggctgacaggtggagaagcttggcgtgccttgatgagatcttcctcatgtccatcaccctaggccgcaagcggcgccattggcttctttgccaacacagggtctgctccgccaacgttgttgtgagtgtcatcgaggtgaagcttggcaagctcaagtgcatcaatgatgattgcgcttatattcccaagctgcagctacgagcattggcccattgtcatggatcatcccagcagactgtgtgccaccaagtagtagatgattggctgctacatccagagacgcttgccaaggtgccacaacgaggaataggccatgaagaagacataattttccccattttgtttgttggctctgtactctcaagaaactagcttccagagtgcatggaggcctgaggaagttgctcactactaatgtcagaatccacatgaatcatctatgcaggtcctgtactgcttcgaactgcaaggaactggcagtacaacctgatcttaatggttttcttgtcagtggagcttcattgaaggtaaagaggaatacaaacatattagaataattgtgtagacacaattacctgcctgattcactgaataccgtcttctttcttggttgtgtaccctgaattcatttacattatcaactctagcacggtgatgttttgcct

SEQ ID NO: 17447 - DNA, 1579 bp, Oryza sativa
  ref <308>: DATABASE ACCESSION NUMBER: AK067891
  ref <309>: DATABASE ENTRY DATE: 2001-12-06
gcggttcttccctcttcccatttccgcgcggcgcaacaccttctggacgtcggcatggcggcggtcgcctccgcctccccgctccccgccgcggcggcgccctccacccgctgctcgccgccgcccgccttcctccctctccgtgcgcaccgcccccgcgtcggcaccgtcgccaccaggagggttttccgcgcggaggcgatgaggacgcagcgggagaaggagcagaccgaggtggccgtcgaggagtccttccccttcagggagacggctcctcctgacgagccactggtcaccgccgaggagagctgggtggttaagctcgagcagtccgtgaacattttcctcacggagtcagtcatcacgatacttgatggattgtaccgtgaccgcaactacgctagatttttcgtattggagacgattgctagggtgccgtattttgcgtttatctcggtgcttcacatgtatgaaacctttggctggtggaggagagccgattatataaaggtgcactttgctgagagctggaatgagttccatcacctcttaatcatggaagaattgggtggcaactctttatgggttgatcgttttcttgcacggtttgctgcatttttttactacttcatgactgttgcgatgtacatggtgagcccaagaatggcataccatttttctgaatgtgttgagaggcatgcgtactcaacctatgacaagtttattaagctccatgaagatgagttgaaaaagctaccagctcccgaggcggctttaaactattacctgaatgaggatctttacttattcgatgaatttcaaacagcaagagtcccatgttctaggagacctaaaattgataacttgtatgatgtatttgtcaatatacgagatgatgaggcagaacattgcaagacgatgaaggcctgtcaaacacatggaaaccttcgttctcctcactctatgcagaaatgcttagaaactgacaccgagtgtgtaatacctgaagatgactgtgaaggtatcgtggattgtgtcaaaaaatctcttgtgagtaaagagtgactgatcctaattggaatggagtgcgtcatagtctcatagaatagagttttgataacagtcggtttccttttttctttcaaaagatagggaccactataatcttaacattcttgataatccttcagaataggctagctgtatcacaataaaaataatatattcatgagatagatgttactgcaagttgtgaagccctacaaaatttgcaatcttgatgtgctgtggttctatggaaagttcggttgcttgctgcttcttaagttcacaaagctgctctgtaagggaaatggagatggctcatgatcaggcagcatacggtgaatatggtcagctcaaggtggaactgactcaaaccgtagaatttcgtgaagatgagaaggaagctcactgcagtatcgaagaagtcaatgcgaaatgaaaaatcaatcatactgctgctttgttttttctgaagatttatttgtcatttattcagtgtacagatgatactattacatctcaggcaaattactgt

SEQ ID NO: 17448 - DNA, 2506 bp, Oryza sativa
  ref <308>: DATABASE ACCESSION NUMBER: AK067892
  ref <309>: DATABASE ENTRY DATE: 2001-12-06
gggggcgtagagccagctatctatcagccaccgcacaacccacaactggccttcagaaagggaggaagaagatgatggaggtggagaagccatgggagttgaaggaggatgtggagatcatgacggaggaggaggaagaagacgacagcagcaacctgctgcaggccaggggcaggaacaagaagcacgcgctcatcaatggagatgaacaacaacaacaacaagaagaagaagaagaagaagaggttgttgaggagcacaagagcgtcttctttgatccaacccaagtttctgagcatgttactgaagtaagtggtaagaatgaagttacaagagtggagcagttcgttgctaaaaaggaaaaggcgcatgaaacatcaagttcaaagggaaaagaacttgagacacaggaaaatgctaattctcaagaaactaatgaaaattctaataacagcagtttggagaacagatcaccttcaaatggttcacatgaagtctgtaacagtggtgaaacagttacagttgcaaatggaaaagcaggcttgaaagtgatcacaatcattgacaagaaccaaaacggcctggcaaactcaaatggttctcttcacattgccaatgtcagcatgaacaaaactagtgtccatgaaattgaagctgagaaggatgaagatgtcattaagggcaaagtgaacattgaagagtatgaccttgagaaaattcttgatgagcaagaaactcatgacctgttctgtcccaattgcaactcatgcataactcaaagggtgattctgcggaagagaaaaaggacagtaagacaaacatcacctgatgaaccaccaaagaaaacacagattgcagagccttctgctaatacttcaaatcagactgtacctgaaagacaagggcaagagtcacctgacatattcagatgtttatcatgcttcgccttcttcattccaacaggttgtggctttaacatattccgtatatttggaaggacggaagtgaaccaagaagctcaggtacaggaagctgctgcatcaggtcagatgtctggctccgacaattgtgcaagttggcttttttcttgtttcgagcctggagacggtccaaagaaaactgatgcaggtccagaaaaggagccactattacctgacaagcaggactccaataatggttcagcttcatcagttgaaggtagcacagcatccgttcatagtcatggcataagtgtacaacaacaagaatcaaagagaccattgccagctgagtcatcttcccaacttcaacccagcaatacaaagaaagaagacttcggaacagtatcgttcagtggatcatcatcggtagaagctccttcatcgtcatctgctagcattatcaaccctggacagaccgcgacaggattccttcagactggggaaacacatgtggtgattgggcagcaggacatcgtactgcaacagaacgttcctcttccaaagcctggagatgcagctcacctagataaacagaaacaagaaactccaccagcaagccacacatttcctacaccgggagtcaagatcccagatgcaaatccagctaaatttataccagatgtggtgaggccaatggtagataaaccaagtcgaggcattgtgattcctcctgaagcagttgagtcacaaactcgacctgagcattcatcagtgcaaatagggcctgatgcgagcatgccattgattgatactcctgcaccagagcaaagggatgattgggacatcctgaaagctatcgtatacggtggcctcgtggaatcgatcaccagcctctctgtggtttcagcagctgcatccagcggcgccaggacattggacatattcatcttgggcatagcaaacctcatcggtggacttcccatcatctttcacagcatggctgagctgagaagcattggagatgtggatgagagggaggagcagggcggtcactactggttgcagctggggaggcgatccaagtaccggctgcatgtcgccatggccgtgctgtcctacctcctcttcggcctgctgccgccgctcatctacggcctctccttccgcggcggcgacgtgagggagaagaagatggtggcggtggcggcggcgtcgctggggtgcatcgcgctgctggccatgggcaaggcacacgtggcacggaggcggagctacgtgaagagcctcctctactacctgagcattggcgtgagcgcgtcgggcctctcgtacgtcgccggcctcctcgcccactttgccctcatcacccaccaaacccctcctgcttcatcctcctgggcttcatactgaatttcttcttcttgtttggttcgacaaaagttttgatgccttcccatttacagcaagcccttcgcaagatcatagtgtaaaagctctttttcgttgtaccatagcaccctttttttttgtcaataaactttggcaaggaaaataacaaggtcaggcttgccctgttctttttaccg

SEQ ID NO: 17449 - DNA, 820 bp, Oryza sativa
  ref <308>: DATABASE ACCESSION NUMBER: AK067893
  ref <309>: DATABASE ENTRY DATE: 2001-12-06
ggcactcttcttgtctcgttctactctcacacacaaaagttcgctagtaagttacttccaaaaaaattaaaacgatttataacatcaaccggagtagtacgtatttgcaaattgcgggcatgagcaccttcaagcatggccgcagcaacgacgaggcagggaacaatcaagaagtcacaaggatgacatacaaacgttccagtaaacaagtcacatctgcaactggatcgcaacaaccgtctgtcagcgaaccacccgaaggcacaaggatgacatacagacgttccagtaaacaaggcacatctgccgctggatcgcaacaaccgtctgtcagcgaaccacccgctgatcggagaatgatatggagcaagcaatccaggcggtaaacacaatcgcgtacttccccggcccatgataaatacatagcgcgtgagcagcggaagcatgcatagaagatattcatcggatcgaagatggcgttcagctatattgtaataaggaacatataagaatccagccatacttcccggcgcaccatctcatacatgtgtgtatagcatacgtacgtgcgcgcgtataaatatccatacacaaccacattgccggtgtggcaggtaatcactagttcgtatactcgtacacatgtactcgtgggcgtacgcactatactattaaatgtatatgcaatactgttaaatgtatgagttgcaatgtaagcagtgcttgtattatcatctatagttatttgtgtactcgggcagtttaatacaagcactgctatttatgataatacagaaataataaaatacaaaagtttatt

SEQ ID NO: 17450 - DNA, 4032 bp, Oryza sativa
  ref <308>: DATABASE ACCESSION NUMBER: AK067894
  ref <309>: DATABASE ENTRY DATE: 2001-12-06
gacacactactactactcttctccctctccatctcttccctatctcccgctgccggagccaccgccgcgcgcctcgcctcgcctcgcctccacgcgctcgcggcggccggcgagcacgcccccgcccccgcccggagcgcgcgcggcgtggaaacggtgctcctctccttctccggtcccgccctaggcagcctcctcctcctccccctccgccgacgaaagcaggttcgcgagaggcggcgtgcggcgtggcggccgcggagctgaactcgaaggtgattgtgtggcgagatgggaagagcaggttacatgatagagaaggatggagggtaggaagattgagagggggagattgaggggcttcgtccggcggatggcaatggagtgcctgtgctccggggagcagctgagggcggcagatgagatcatccggtcaccggaatctgcaatcaccaaagattgctcggccagcgggtactcgtcccagaacggagagatcgagcagtaccttgataatggcaacattgaggaggccgagttgtcgctccgggagggtgtttgccttaactatgaggaagcaagggcattactaggaaggctagagtaccagcgtgggcatgtagaagcagcacttcgtgtatttgatgggattgatatacctgctttagtccctaagatgaaaatctcaattgctagaaaagtggatcgtcggaagactcgttcacaatgggattctccaccaatgcccttgcatgctgtcagcctactcatggaggccatataccttaaatcaagagctcttcatgatcttggaaagttcaaagaagctgcacaagaatgcagaatgatattggatatcgtggaagcagcagtgcctgagggtttaccagcaggctttggaaaagattgtaaattaaacgaaataatatgcaaggctgtagagttgctccctgaactatggaaactagggggattttcacttgaagccatatcttcatataggaggtctcttctcaataattggaaccttgatggagagaccatagctcgcatacaaaaagaatttgccatttttctcctatatagtgggctgtgaagcacgacctccaaatcttcattcacagttggatggttcatttgtacctcgcaataatatggaagaggctattcttcttctaatgattctattaaggaagttcaatctcaagagggttgagcgggatcctactataatgcatcaccttacatttgctctgtccatctcagggcagctaaagtcactagctgtacaatttgaagaattgttacctggcatgctggataaaagagagtggtcatacaatgttgcgttgtgttaccttgcagaagaagatgattcgacagccctgaatcttctcaaaaggatattaaaatctggagatgattctgacaatttcaaagaactcctcttagcttcaaaggcttgcactgaaaggagtgcccaaactgaaggtgcttcctacgcacagagagcaatagccaatatgcagggaggatgtgaacaaatggcgggtgttgcagacctgctgcttggagttaacctttctaatcaagctagatgtgccacatctgatacagagagagcttcttggcagtgtgaagctctggaggtgcttgaaaatgctgaaaataagatgcatgggaaagatcctcgtgcaatgtacagtctcagccttgaaaatgctgaccagagaaaattagatgctgctgccttttatgccaagaaattggtgaaattagaggctggatcggaattgaggagttggcttcttttagctcgaatactatctgctcagaaacagtttgctgatgctgaaaccattattgatgctgctctcgatcagactgggaaatggagtcaaggagatttattgcgaaccaaagccagaattcaggctgcacagggccaactcaggaacgctgttgagacatacaccaaacttctcgctgtcattcaactcagaaccaaaagtctcagtgctgggatctttttggcaaagggcactaaggatgatataagcctggaaatagagacctggtatgatctagctctgttgtacctacgcatgtcacaatggagggatgcagaggtctgtgtatccaagataaggaccatcagtccatattctgccttggcttggcatgttaaaggaaaactctatgaagcaaaaggtcaaccaaaagaagccttgggatcctatttcagagcattagaccttgaccgtaaacatgttccaagtttgatatcaactgcctctgttcttcgagaaattggcaacaggccattgccttcggtccggtgctttctgaccgatgcgttgcaactggatcgaacaaatcatgcggcttggtttaatcttgggctactctacaaagaggaaggtggtcggtcagcagcagaagctgcagaatgtttccaggcggctgctcttcttgaagaaacagcacctgtagaacctttcaggtgacacttgtatgtacaggtgctatagaaactgtaagctattgtttgtcttttgaaatgtttcatttacactgatgaaaaggtagattgcagaactccagtcatgacctttgggagattatagtgtcagaaattgttggagaaaaacttggttaacagtcaatatatatagcctcagttcattttttatgtagatttctgaaaaatgatattcctcttgatttcttcatggatcaactttgttcagtttgatttatagatggtcagggcaacaatgtgatgagtatatcttgagaagcagcatgtcttaaaagtctgatgtatttttatttctggtactgatgccaattacataaatgtctcagcaaatcagaacttcagcagtagatgagaagttatcgatgccctcactaccaaggcctttgaaatttatgtaatccagtggtacctcttgtgactgcatggtaatgttggatacttgtggatgcttgccatgctgacaaccaaagcttttttcgcagattgcacatgtatatttttaaagcattagaattgtttctgatgcagcagactgcattgctctatatagacttttactgaggccttccttggtttcctgacctccatgaagatccttcagcatttactactgttcattcagcagcttatctagtactagtactagactcaaatgaatgctggtagatattggtctcttttcatgcactaatgggactgtctgctgtctacctaattaaatggtgtctcaaccttcttgttggtggttttttgttaaagtcagatgacgatgaatcggaggaattccaatcattttttttctggtaagcttgctccaaatttcacacatgttcttctagtgcatcaatgaatttctttttatgatcatatggtttcctactgaaatatgaagctgatcttgtattgtctgaaatttgcagttacctgttaattacctcacataaaaccagttacctgttcttctacggaaataggaaaaatttttagctagttaacttagttcaatttcaccatgaaatctgattttttttttcaaactccagttaaatttccaggcctgcctgcttacactgcttccattttacagtcttctagcatagcaactttgaaaacgcatcctggacattgacttgtgttctttgcctttgcaggtagcaccatagcaacatgtaaaaaaaaaaaatccaaaatgaaacaggcccatgcaaatgtaagctcggtgtgaatatttatgccctttgctgaagccttctccatcatccatgcaaacttgtggataaatggttcagccttattccctgaacgtcagtaaatccgttgtgcatgaattgctgagatgttcaggggattctcgtgacgtcattgtgccgtcattttatggcaaggagcgttgttttaacatttctttggtacatggtcatgaattttccattgttgtgtactctaccgaatctactattagctgaactggaatcaaatatcttaacagt

SEQ ID NO: 17451 - DNA, 933 bp, Oryza sativa
  ref <308>: DATABASE ACCESSION NUMBER: AK099024
  ref <309>: DATABASE ENTRY DATE: 2002-08-28
gactgagcccgcatcgtctcgtctccctctccctctcccaccccgcctccctcctcgacgagctccgagcggcggcgatggcgagcgacggcgcggcggccacgccggcgaaggcgagcccgaagaaggccaacctcctcgacccccactccatcaagcacctcctcgacgagaccatctccgacgtcgtgaagagcaagggctacgcggaggacacgcggctgggcaactggaagctggcgattggggcggccgtgatcgccatcgctctcctcgcgcagttctacccgaagaagttcccccagaaccgcgagttcctcctcggctgcatcgcattatatgtggtgttgaatgtggtgctgttgatacttagctataccaaggaaaaggatgccattatgttcacacaccctcctgcgggttctttcaatagcactggactagttatatcttcaaaattaccaagattctcggatatgtacactatcacaatagccagtgcagatccccagtctatttccgccaataagccagttcatttcactaagagtgttacaaaatggtttactaaggaaggagttctcgtggaaggcctgttctggaaggatgttgagaggttgattgatgactacaacactgagcgcaagggcaaatgaatgggtagtccatgtgactatgagacgttaattgtctagaaaagaaaccctcttgtggaattccttgcttggaagaatccttagcttaatcaaaatagacaattttgtcatacattactgtttcactggtgattgaaatactgtcgaagacacccggtaccatcccaattcttttttatgagcttacaagcctatcgatggttaatcatagataccagcactgagctctgtacgttctgcttatatgacaacatgaatgaaattgcctcaggaaaac

SEQ ID NO: 17452 - DNA, 2676 bp, Oryza sativa
  ref <308>: DATABASE ACCESSION NUMBER: AK067895
  ref <309>: DATABASE ENTRY DATE: 2001-12-06
tggcgagtcctcctcctcttctcgtcgccgtgctactctcgctttctctctctctctctctcacttgttccccaaggcgagaagcagccgccgccggcgagcgtcgcgggggaggggagggaagggagggaggagcggtggatccgggcttgattggattgggtcggattcgattttggatcaaccccggagggcgggagcggttgctacagatgcgttgagctttggttaatctatccggcgagagataatgggcgagcttgctgatctcgttgtcgtgccgtcgcagccgccgctcgccggtggccggcgggacaggctggcggcgctgctggagctcgcggcggcggatgatgttgatgggctcaggggggcgctcgcggagggaggcgaggaggcggcggagttggctgatggggtcgggctgtggtatggtcggagcaaggcgtacgaggcgcgcacgccgctgatggtggcggcgacgtacggcagcgccggggtggtctcgctgctggtgggcctcggcggttgcgtcgacgtcaaccgtcgccctggagccgacggcgccaccgcgctccactgcgccgcctccggtggctcgcgcaacgccgtcgctgttgtcaagctgcttttggccgctggcgccgatccggccacccccgattccgccggccgcttccccgccgacgtcatcctagctcctccggcttcgccagatgcccttggcgatctcgaggtgctcctcggccgccgccgagcactcgccgtggcgacctcggtggcttcaggttcgtcatcccctccgctctcgtcctcaccagatgagggcaacaggtcgccctcgtcgcgttcgtcgtcgctgtctcccatcactgtggatcgtgggaagaaggagtatccggtggatccaactctgccggacatcaagagcagcgtgtatgcttcggatgagttccgcatgtttgcgttcaaggtccggccctgctcccgtgcctactcacacgactggactgagtgcccgtttgtgcaccccggcgagaacgcccgccgccgtgatccccgcaagcacccatacactgctgtgccttgccccaactttcgccggcctggtggctgccctagcggcgatagctgtgagttctcgcatggcgtgtttgagagctggctacacccatcacagtatcgcacaaggctctgcaaggagggagcagcttgcgcccgtcgcatttgcttctttgcccatgatgaggatgagctccgccatgtgcctcacaacagtggtgccggcctgctgtctccccgcgcttcttcatccattgatatgactgctgcagctgcgctcgggcttcttccaggttctcctaccagacactttgcaccgccgcctgtgtcaccatctgctgggagcaatggaggagctgctgctgcgcattggctccaaggcagtaggctgcgttcttctttcaatgcaagggatgctgctgttgatgaccttggcatgctcctcgaatgggaatcacaataccttggggcactctgcctgccacccagcagccgcccccaaccacgcctttcagctggtctgagtatcaggccaacaattgctccatccaatcttgaagacatgtatgcttcagacatggcaatgtctccgaggttccctaatgaccaaggtcactcagtctactcaccagcccacaaatcagccctactcaacaagcttcatcaacagaagggcctcttatcacctgttaacaccaacagaatgtactccccaagggctcttgatccgtcatctttggcacattctccatttggtggcatgtctccccggtccccccgtaccatggaacctacatcacccctaagtgctcgtgtaggagcccctgccacacagcggccttctgttggttcaccacggaattccagtgcttggggcaccgtggggtccccgatgggtaaggttgactggggtgtcgatagcgaggagctagtccgcttgagacgccctgcacaaccagggtttggagaagatgagacagatgtatcatgggtgcagtcactggtaagcaatgctgagcttaatggcaagaggggcgaagtacaaggcatgcctggtacttctgcattgatgaacaggcctgacctgaacaatcagggtgacttgttggaccagacggtgatcggtgcttggcttgagcagatgcacctggatcagaagtgatttccaagggaagccatgaagtcccaaagtggatgaagcctttattttgccaaggttatttaccaaagaatagttgttggtcctagtaaataataatttattctttttaattcttgaaatttttggtgggcaaagtcagagatggtggtcaagttcaacaaaacatttggtcacagattggtagctgaaatcagttccagagattggtaaacaacctcattacttggggtcctaactagtattcttttgattagctcagatgagtctttattttagtgggttaaaattcatatgttccccatggttattatgtccatgatctcttcctaacaaaagagagattataattgtccatttttcatttatcaatgaatgattttgttaaaacaatgtaagttacattcttaattttttctctgttcaatggaattaccttccttggttagtcctcc

SEQ ID NO: 17453 - DNA, 933 bp, Oryza sativa
  ref <308>: DATABASE ACCESSION NUMBER: AK067896
  ref <309>: DATABASE ENTRY DATE: 2001-12-06
ggctctcgccctctccgcaccagctccccgccgccgccgccgcgagctgatccaatggcgccgacgtcgaagctgtcgcagggcatcaagaaggcgtcgcggtcgcacacgtaccaccgccgcgggctgtgggccatcaaggccaagcacggcggcgccttccccaaggccgagaagcccgccgccgcagccgccgccgccgcgcccaagttctaccccgccgacgacgtcaagccccgccagcccagcacccgcaagcccaaccctaccaagctcaggtcgtccatcacgcctgggacagtgctgatcctgctcgccgggaggttcatggggaagcgcgtcgtgttcctcaagcagctcaaatccggcctgcttctcgtcaccggaccttttaagatcaatggagttccgatccgccgtgtgaaccagccctacgtcattgctacgtccacaaaggttgatatctctggtgttaatgtggagaagtttgatgacaagtacttctctagggacaagaagcagaaggcgaagaagaccgagggtgaactttttgagactgagaaggaggcaaccaagaacctgccggagttcaaaaaggaggaccagaaagttgtggatgccgagttgatcaaagctattgaagctgtcccggatctgaaaacttaccttggtgcgcggttttctctcagggacggcgacaagccccacgagatggttttctagattagttggcgctaggctctagttctgaagccactttgcctgttcaacctcagtgcgctcttgaattttgtatctgactggtgaaccattcgtttccattagtatctgtctgtcaaatcttacctgaagtcttatacactttgctgggttcaatttagtgatgttctgcatcatacattcatactatacacataagccattttgccactg

SEQ ID NO: 17454 - DNA, 1359 bp, Oryza sativa
  ref <308>: DATABASE ACCESSION NUMBER: AK067897
  ref <309>: DATABASE ENTRY DATE: 2001-12-06
gggtgctgtgggtaggccggcgccgccggccgacgggtggggaggagaccgacggggcgagacaggagaggaggtccggcggccggcggcggcggcgacggcgactacgcgagagcaggggagcaaggcggcggcggcggcgacgacgcggcgccgatgtgcacttggtctcggtgaagattgggaagtcgtcgtccccgtaggattcgtgcctcccgacgatgcgcctggcttgccgccgccgcggagatcgtcggcaccatgaagttcttcgcggcgcccgaggggcgagcgggcttgggcgccgtcgtcctcgtcgccgcgtcacgctgcccgctgttctccttcttcgcgctacttgttcttctcctattccagccgcaccaccagcttgccgcgtcccacgtcgccgtgaaccagcaggtgagccttgtgccggatgcggcggcggcgaaggcggccggggtcgggaacggcgcggtggtggacgtgggcgacgaggaggaggagggcagcgggtcgaggtggatgctgatagtggtgacgacgacgcggtcgggcggccgggagcggcggcggcgcaacgccgcgctcgcccacgtcgagaagcactacttctccggcgtcgtccacttcgccgacgccgccggtgtctacgacgcccatttcttcgacaagatccgccagaccgactggccgctgccaagaaccgcctcaccgccgccgacgccttgctcccccgccgatgccttgctcccctcgctggccgccacgtcgccggttggggaaggacttgatggcgacgtcacggccggtgaggaggtcaacgccggcctccccgctccccttgcttgcctacctcatccctcgatggcggtccgcctccgtgcctgtggcttctgcaatggcggacgagagcaatggcggcggcgcgtcgccagtcgccagccgccgtcgtcgtgtcgcccgtcgccggccgccgacgccctcgtcctctccctcctcgccccaccgaaggcagcaacccaccgacgtcctccccagctgcctacccaaacagaagagtgagagagaggagaaagggagaggaggggagagagtgatgacgtggccagctgacatgtggggcccacgtgggtcccgcgctgactcagccgccatgtagataaataccgggttaaaaccaccgagggacattaggtgatcggttttatatagttaagtacctcgcatatctggttttacggttcgaagatattttttattccgattacaagttgagggaccctcggtttactttttccatctaaaaatcctttgttgaaaaaaaaagaaagaagaaatactataattttctgg

SEQ ID NO: 17455 - DNA, 829 bp, Oryza sativa
  ref <308>: DATABASE ACCESSION NUMBER: AK067898
  ref <309>: DATABASE ENTRY DATE: 2001-12-06
gttacttcttatgtgtttagtgaaggcaaaatgaacattgaacggctgaagcaacttgtcgatctggttgggaaacataggcttgttttggaccttagttgtagaaaaaaggatggaagatatgccatcgtgactgacagatggcagaaattcagtgatgtctttgtggatgagccaacattaaaacatcttgctgcctatgcagatgaatttttggttcatggtgttgatgtggaggggaaaaggttaggaattgatgaagaacttgtcgaactattgggacgttattcacctatacctgtaacttatgctgggggtgtgtctacaatggatgacctagagaggataaaaagagcaggcaacagtcgagttgatgttacggttgggagtgcccttgatatattcggaggagatttgccctacaaggacgtcgttctttggcacaaggaacaaaatatggttagccaaccatgatatatcagaggtataatgcttaacctgttccatcagctcgattgttatgcacagacctccagggtctagaagtaatgctaatgcattttctcaagtgttgtactgcgaataattcgatgggtcttctgtggtataagttcaagctgaagggttcgattttgttcggatctggaactaggctttacattgaggactggccgagctgtttatcaagcgactgcactatatgtttttgagattaaaacactgttaacatgatatgtaagcacatctactgagttagcccgtctgatggtgaaacataatgggggcctccactagtccacagctcattaatcatactcaacatttggcg

SEQ ID NO: 17456 - DNA, 2144 bp, Oryza sativa
  ref <308>: DATABASE ACCESSION NUMBER: AK067899
  ref <309>: DATABASE ENTRY DATE: 2001-12-06
gatcttcttcgacgcgtcgcgccggtgagcactcacactctcaccggcggcgggcggcggcgggatcgatggacgacgccggcgagatacacgcgctcgggggcagcctgcggcgggaggcgtcgtcggcgcggtcgggcgacgccgccgtgttcttctcgcggtcgtcgtcgagggatgaggacgacgaggaggcgctgcggtgggcggcgctggagaagctccccacctacgacagggcgcggacggcggtgctggccatgccggagggcgagctccgggaggtgaacgtgcagcgcctcggcccccaggagcggcacgcgctgctgcagcgcctcgcctgggtcggcgacgaccacgcccgcttcctctccaagttcaaggaccgcgtcgacagggttgggatcgagctgccgacgatcgaggtgcggtacgagaacctgaatgtggaagcggaggcgtacgttggtagcagaggtttgcccaccatcctcaacacctacgccaatgtgctggagggtctggcaaacactcttcacataacaccaaataggaagcagaaaatatcgatccttcacaatgtcagtgggataatcaagcctcacagaatgaccttgcttttgggtcctcctggcgctggaaaaaccacacttcttttggccttggctggaaatgtcccttcaggtctaaaggtatctggacaaataacatacaatggccataccatggatgaattcgagccccggagatcagcagcttatgttagtcaacatgatctacatatgggtgaattgacggttcgtgagacagtcaatttctctgcaaaatgtcaaggaattggccaccgttacgatctgctaatggaactatcaaggagagaaaaggaagaaaatattaaaccagatccagaagtagatatatacttgaaggctgctgcaacaggagagcagaaagccgaggtggtcacaaatcacatactaaaggtcttgggattggatatttgcgctgacacaatcgtaggcaacaatatgttgagaggcatatcaggggggcagaaaaagagagtaaccacagctgagatgattgtcaccccaggacgagcccttttcatggatgagatatcaactggacttgacagctccacaacatacaatattgtggactccatccggcagaccatccacattgttggtggaacagcagtcattgctttgttacaacctgcaccagagacatatgaattgtttgatgatataatcctcctctcagacggtcaggtcgtctacaatggtcctcgtgaacatgtgctagaattctttgaatcagttggcttcaaatgtcctgagagaaaaggcgtgcagaattcttcttccgttcagccagttgtgtctgttgaacgcactgtgttctacagggaacgagcagctcacatgtattcacctttgccatacgccttgggacaggttgcaattgaacttccatacatccttgttcagtccttaatatatggtgttctagtgtatgcaatgattggatttgagtggacagctgccaagttcttttggtacctgtttttcatgtatttcactttatcatactacacattttatggcatgatgtcggtgggtctgactccaagctataacgtggcctctgttgtttccactgcattctatgccatatggaaccttttctcaggatttataataccaagaactcgaattccaatatggtggagatggtactattgggtctgccctgttgcgtggacactctacgggttggtaacttcacagttcggggatgtaactgacacgtttgataatggtgtccgtatatctgactttgtcgagagctactttggttaccatcgtgacttcttgtgggtggttgccgtgatggtggtctcatttgccgtcctcttcgccttccttttcgggctctcaatcaagatattcaacttccagaagagataaattgaggaaggcatacccgagttgtgtatagcatgtgaatactagcacatcgtaattgtacagcttgaaagcacatttgtatcaccataattgtacatcttaaagcacattgtgtatcctggaattcatggtactcagattaacaagttgtttcattgagttttttgc

SEQ ID NO: 17457 - DNA, 2225 bp, Oryza sativa
  ref <308>: DATABASE ACCESSION NUMBER: AK067900
  ref <309>: DATABASE ENTRY DATE: 2001-12-06
gaatccctcatttcctctccccttcctacgcgccgccgccgccgccaccgcgactcctcgcattcgtccccaccacatccgagccagcggccgcccgcccgccgtcgctacctcctcctcgagccagcggccggcaccaccaccttcccacggagccagcgaccggcgctatgttctcacggagccgggcgcggtgccatcttctcgcggagtcactggcccgcaccgccgctaccttcttctcctcatagagccagggatgtcgacaccatcgccgtctgtgtccgcttcttcgcacagctacgccagcttgcggccactactacaccaggatttgggtgtgggtggagcaagtgtgccagccactgcaccgccgtccactcccatgagaaagtcagctccatcaagatgaacgaacatccagccacttgcgcgctcctccatttgctgccgtatgaggatgaggcaggcagctccagttaggtcactactctgctgaaaaaagaaaactgagtcctggtaccgaatctagcatttgcttcttttcctttcagatctggattttaattcactggtctgccttttgttatttttaattattttgttctattgattagtctcatcaatctttactctacaaatgatgatttacatggtcattattccatccagaagaaatgcacagactgttttacaaggcaaacatattgaagggttgttctatctcgaccaaagtttctcagattattttgcctgctgctgcattgtaatactcataagctatattaccatcatcgaatcctcatccggatacgcagctgtgtttttgttgtatagtgtccaatgaatctctgagcaaccctgttatactggaataaaattaaggtacacaactttgttattgtttcgttaaatacttgcagatttcagagttcatcacaagctttcatttctttactatatataatcttgcagttgcagacaggacacatgactttgatcatggtttagcatcagctgtctgggaatctttgaaattcctaaagctaaatatataggacactcgtgtcctatatatgctagcagttgaaatgcttcacaaacatagtctacaagtatctgttgttgattagcgcagtgaatattgtcgtagccacaaaactgcacaacgattttacttggttttagttttcttattgcttttgcttatataagagttacgccatattacaaatagtaactgttagctttaaatctttttgtttacctaatgattcaactggaggaaaagttcaagctagctactgcagataatcagttttgctttaattaccttgatcagtctgtaagtgataatcagttttgctttggttatgtttaatgccttcattattaactttggttggaagttcaagcgtcagttaaagtttcatctgttggtttattcacattatcatgccatataatcctgtgacaaggcttacatttctgaagctttgtcctaacatatctgcaattctgtatgggtgccgtgttgttcaagagatgcgttcttttctaccttagtaccaacagacttccgcttcatggttcacttcacaaatctttctccacatgttgtttatttatcttaaacgagcaggatggaatgcttcataggctgcttcaaggaatgggacgtaaaaaatgtgaccagcaatcctatagttctggttctacatatatgtgatcactgtaaatacacagctaacttgcttcatgttgctcactgatatttgtttttctggtcacttatggatgcttatattatttgtttctcactggtatatctttcaggatagttcattttataataatttgtcattcaaattttatttcatacagataggcaagccctctattttccagattgatagggggggggggaacatcgaaaagatatgcacctcttccttctttgtacagctgaagtggtgccttatgacagctcatgttagcacaccaaccatacgcaatttcatctaatgaacacacaattgttcatactttgctatatagtggacagttacacctcaaatccctcctagaataaatcgaatgaaacagcaacataccagtctgtactatgacatacaaaactatctgcagtatggccctttaggtctgtatagctctgtcattattgtaaactatgcattttgtacatgtgcttaagattactagct

SEQ ID NO: 17458 - DNA, 2672 bp, Oryza sativa
  ref <308>: DATABASE ACCESSION NUMBER: AK067901
  ref <309>: DATABASE ENTRY DATE: 2001-12-06
ggccgcgctcccttcgttcgtgcgcttcctcggtcgccggcgatggcgatggcgatggcgccggcggtggtctcgggcgagaggctcgtcgtgttcctcttcgtcgcccgcgtcgcgctcgcggcgccggcccagctcgccgccccgctcgcggtcctcgccgcggccgccctcgccgtcgagctcgccgtggatggctccgcctccgcgtcctcatcgccgctccgccggttcaggaccaggccgggtgcttcatcaggcatacttcttggtgccactactctgcctagtgtcatgctttcacggttaattcaactttatagggtcttactagcagatcctaatggacgtgaagaatatgcataccttgaaatgcagtactgggcagtatctgttagctgccttggcatgttatcattttttgtttggcatctacggcagtctcccagcaatggaaattctatagcttcgaaatacggcttgttgctcatcattttatatcccctggcatacttgttccaccttttactgaagactgatggaggtctgctggtgatgagtaatttggtgtatttgctgtgtcatggagtggctgctgtgatcttaatccagcatattctagagaagttcccttcatgttcatcttttggtttgtacctgaagtctaagatgtagttagatctttatttttttgtttatatctgactgcatatgtttagactttagagctatccatacgattgctagttatcctaccagttttccatgcaggcatagtgcattatatctacactgttcattttttaaaatttaaattcagctaatttgtgtggttcctattggccgatgcaatgtatatgtctccttttcatcatgacttgaagctattgcttttttttaacttatctttacattttctgtgaacttaggggaggccattttggtctcaagtggtcttgttctttactgtggtgatatgctggctcatactctttcaaagatggagttctccgtatcatcagaagcatttattcgcgcacctggaactcgaagcgagataggcacagttattcagggggttttgcttggtctttttcttctccccttgttatacaaaagctcccttcaagttttggcttactgtagaaaactggagagtcaaagaacacaaacagttgaggaatgcacacagaagagaattgactgtggtgtattttatgtttcattgttggtagcactattgttgttagtgccatcatggacgcgtcttattcaaggttttgaagtgcatccatttgtttgggtttttaactatattttcaccgattcacgtgaacggcttgctttatgcgcatactggatatttgtgatatatgtatcaattagaaggttctacagtatatcaaaacaaagcaaaacggagaggattcttttgcgcaagtattaccatctcgttgctgtcctaattttctctcctgcagtaatatttcagcctgatttcttggacttagcatttggtgcagcatttgccgttttcttaatattggagatggttcgagtttgggaaatataccctcttgggcatattgtgcatcagttcatgagtgccttcactgatcatcgcgattcggaaattctaattgttagtcatttctcactcttgctgggatgtgcacttcctaaatggatgtcatcaggattcaatgaccgacctcttacaccatttgctggaattctcagcttgggtattggtgataccatggcatcaatgataggttataagtatggtgtcctaagatggagcaagacaggaaagaaaacaattgagggcacagcagcaggcataacttctgtattagcagcctgctcaatcctgctgtcactcttagcttcaagtggatacatactttcacagcattggatatcacttttggtagctgtgacattgagcggtttattggaagcatatacagcccaactcgacaacgctttcataccccttgtcttctatagcctcctatgtctataggagcaaccaattgtacatcaaactaccttgaggccctattcttaccattactaatatctagtgactagtgcagtacagtataggtatagcccttcgaattttttttttaaatcctcttattggtcgcattctctgtattcctggaccgagaaattgtgtccattactaaaaagttgagtttaggtttaggaaataaagatgaaaatatgaaaggttgtttagtgaatccttcagtagagagcatctttggtatgatagacttctgagcctatctggaggcatcaatgtatcatggaaggtatgttgtctttcagaaccagaacttcttctgcaggtggtgagacctatttcaccccacaactccacaagcagttgggcaagaatagcaagctgagagtaaagccatatgctgcaaggagcctgaaatacggagacttggttcagaattaatgtatatggtaccttatttccatggacatgcgaagtgtaattagttgtagtagctaatctcctgtaagttttgcgtcatcactgtacggagtaaaagatcactactcagattgcaaccgcgcattgatgtaaattttgttcttgacctgagaaaaaatgaaatcgaagtaagcaaagctgcaaattaatgtcc

SEQ ID NO: 17459 - DNA, 3031 bp, Oryza sativa
  ref <308>: DATABASE ACCESSION NUMBER: AK067902
  ref <309>: DATABASE ENTRY DATE: 2001-12-06
ggtctctttcgccatttcggattccccacccgacgagtctccgaccacttcccacaccggcgcctccacgccgagatctccttccctctccaccgccggcgaccgccgcggcgcggcgaggccctcggggtctagggttttgtactcagatgcgtcccctcctcgccttcgcggcggtatgcgcccttctcgtggctgccgcagcgccggcggccgcggaggaggagaaggcgaacaagttccggcagcgcgaggccaccgacgacatgcttggatacccccaccttgatgaagatgctttattgaagaccaagtgtccaaaacatgtagagctgagatggcagactgaagttagttccagcatttatgcaactccgttgatcgctgatatcaacagcgatggaaagttggaagtagtggtgccatcatttgttcattacctggaagttcttgaaggctctgatggggacaaattgccaggatggcctgcatttcaccagtcaaatgttcattcaagtccacttctatatgatattgacaaggacgggacacgggaaatagttttggcaacttacaatggtgtagtgaatttcttcagggtatcaggttatatgatgatggacaagctagaagtacctcgtaggaaggtacacaaagactggtatgttgggctgaatacagatcccgttgaccgctcccatccagatgttcatgacagctcaattgcaaagaaagctgcttctgaagaatctcacccaaatattcaggacaagccagttgtgaatgaatcttctaaggaatcccagtcacggagcacaaatgactcaacaacacgaggagttgattccatgaaacatgcgtctaaggaagagccagttgaaagtaaacctaattctacccgaggacaggagaatatggatgtgttaaacaatctaaacagcacagatgctgggaacaactctagtttaagtactacaacagagaatgcatcacatgttcagagaaggttgcttcaaacagatgagaaaagtaatcaagcaggaagctcagaaactgatgcaagtgataccggaacagcaaaagcagctactgttgaaaatagcgagcctctagaggctgatgctgatgcatcatttaatttgtttcgggatgtagaagatctgcctgatgagtacaattacgattatggtgactacgttgatgaaaccatgtggggagacgaggactggaaagaacaacaacatgaaaaggcagaagattatgtgagcatagatgctcacatcttgtccaccccagtgattgcagatattgacagagatggcatacaagaaatggtgatttctgtatcttacttctttgaccacgagtattatgataaaccagaacatctaaaggagttaggagggattgacattggcaaatatattgcaagcagtatagttgtttttaaccttgacacaagacaagtcaaatggactgcagaacttgatttgagtacagatagtggaaattttactgcccatgcatattcttcgccgaccgtggttgatttggatggtgatggaaatttggatattcttgttggaacttcctttggcttgttttatgttatcgatcatcgtggtaaggttaggaacaagttcccacttgagatggcggagattcatgcaccagtcattgcagcagatcaatgatgatgggaaaatcgagatggtcactgctgatgtccatggcaatgtagcagcatggactgcagagggagaagaaatctgggaggttcatcttaagagtcttatcccacagcgccctactgttggtgatgttaatggagatggtcgcactgaagttgtggtcccaaccgtgtcaggaaacatatatgttcttagtggaaaggatggctcaaaaattcagcctttcccatatagaacgcatggaaggatcatgagtcctgttctattgcttgacatgagcaaacatgatgaaaagtctaaaggcctcacccttgctactacatcctttgatggttacttgtatttgattgagggctcaagtggctgtgcagatgttgttgacattggagagacctcgtacagtatggttttggctgataatgttgatggtggagatgacctcgatcttattgttactaccatgaatggcaatgtcttctgcttctccactccctctccgcaccatccacttaaggaatggagatcatcaaaccagggaagaaacaatgctgcatatcgttacaaccgtgaaggtatttatgttaaacacggttccagaacattccgtgacgaagagggcaagcatttctgggtagagtttgagattgtggacaagtacagggttccttatgggaaccaagctccttataacgtgacggttactctacttgtccctgggaattatcaaggagaaaggcgcattgtggttaatgcagcttataatgaaccaggcaagcagcggatgaagcttcccacagttcctgtgagaaccacaggaactgtgcttgtggaaatggttgacaaaaacgggttctacttctctgacgagttctcgctcaccttccacatgcattattacaagcttctgaaatggctcgtgcttcttccaatgcttgggatgtttagcgttcttgtcatcctgcggccacaagaaggcgctccgttgccatcattttcaaggaatattgattagtgatttgcacagtgaaacgtcaggtcctcatagaagcagataagcagaacaagatattagcaggatatccaatcacccatgaaggagcttgtccacatcatactgcatcggggagctcaatctgcacagaaaaaacccctcacgatgctgcatcccatcagttagctagttcgggaagtacagcttttagtcatgcaaaaagaattttgtcacacttgagattgttttctaacttatgatatttacacaaggaactggcagctgtctgatcctggtttaacatcttgagaattttagccccagatatgctatcaatctttcttgcacc

SEQ ID NO: 17460 - DNA, 3619 bp, Oryza sativa
  ref <308>: DATABASE ACCESSION NUMBER: AK067903
  ref <309>: DATABASE ENTRY DATE: 2001-12-06
ggtctttgcggcgcctctccagtctccccctcccctcccctctcccgacgacccgaccggcgacgccgctcctcctccgccgcccctctccgccgctccccctccccctcccccggcggggcgcggccgttcaagtccaacctcggccacatgctccgcctccgcctcgccttcgagaccttcctcatgagtaggctcctccacttcaccaccgtccacagtctcgttcccgctccacgcgcgcgccgccgagtaggcttatgaactaaatgacgaggtgaatgcacggataaggtgtgataactttctgaaccaagaactaatccaggactacatgctattgataatcattctttttggagctttagtgatctttaaatgaaataatccaagtttagccgaaccataattttctatcgcatgatcttagatagaaagattaaaaagaaaatttgcttgattgtcctaccatgaaaattaatttagatagaaggttatgattacaatatgcattttatactagcttaagaattgatttttcatacaatattggtgattgaataattgcttttacaaagagatggcatgaggcatgtcattttttattttgtggttacctaatgtttttctgcatgaacatatacagaatgatgcctggttggttgagcatcttgaaaatatggatctcaatcgtatattttttagttttaaaatttcaaaatcaattcaggtgcactgtgctaccagctagcttcagattggcaagttcaacatgtgtttttagttagtttgttaatggaggttttgttattgtcatatttaatcaattatacctatgctcatcaaagtaggatatatatggtcttcgtatctatagaatctatagtttttgggaggggcatctcaggtgctacaggcgaaaagtacccaggagtcttcaggtccgtccgatgcgatatccaggcaatcctatccgcctccgctctacagtgcaacagtaccagttgtggtgccatcgccgtgtggtcttctgctatgggccccacaactccatgggtctcttccgctcccttcagcttctccccttccctctccgccgccgcactcccagtctctcatcctcttcctttccctcagagcgcgccgaaatcgccaccgcctgggtgaatcggcgcttgctgggcgggtgaatcggcgcttgctggtgtctgcaggcctctccttccatgttgtcctcggcgaaatcgctggctgccgaagttctcaccgcatcgtctcccccaaaattgccatccaccaacttagctgggctgccggcaaggcggcacccaggtcattacccggcgtggatgctatagcccctgtacgtccatcggtccatcaccattgcttcattcttgccttctctgtgtctgcttcaagggctaaaggctaatgcttctttttttaatatactttttactgtgtcggcatggtttagatcagaaaattatgcattttttattaggggttctttacattaattatgtgatcctctttcttttccagccctgcagatcaccatgtttgtacaatttatagttggactaagagagtattctggtaattaacttctggggcaagtaatctggtatttaacttctaggctaatgcttatgttttttttactgctctgctcgatttgaaattgttaactttttattagtggttctttaaaataattgaggaatcctctgtgttttgcagccctgcagatcatcgtattgttggaattttttttttggggggcttaccaggttctcaggtaattatgcttcttctcctttgtgtgtgtgtgtgtgtatacacaaaattgttttgtccagctttctgatagcttatgtttttacgtactgaaaacctgctccctaacatggatttgtagttttgatttttttcccttttttatatgacacgggcaagagatgcgtatgggtgtcgtgttgttcaagagatgcatattctttcctgctggcctcaaaattttatttatctgagtgttccttatatatcttaaacgagtagggtgaagtgctttatgagcttcttcgaggaatgggaggtcagaaaggtgaatagcaatcctatcgttttgattctatgtgatcactccacatacacatttaacttaattcacactatatattctcaccgatattgtttttctggttgctcctggatgctcatattacgtattccttaccgatatagctttcatgatggtccattttatactaatttagcatttcagttttattacatacaaataaacgagccttctattttgcagattaataggggaaacataaaatacacctcttcctgctttgccacacgtatagaactacaagtatgcatatctatgtgcatgtgtcaattttgtgctgcctacaaaatccagtctagaagttgaaggcttactctacgtgccccatacactaaaatgattcattttatatgttaacaaattggtctgtgcagctccatgaagacaaaccatagaaatttagcaataaaatcatatttcatgtccatggtctcttctagcatgcatggtaatatttttttttcttgataaactattgttgtgttattacttactgaattctgaaatcaaggcttcatgcatatggtagcaagctgtatatggtgttattttgaacaaaatatgattttatttacttgattgctgaaaatacattgcagagatattaggcaagtcaggcaacgtaaccctcctgtctaatgtagtattctgtttctaccaaatcatgcatccgcagggcgtttgccaactttactgtacgctctttgttttatcatgctttcggttcacgtgtcctttggtgagtctttcctacatattttagccctttggtaatttgcacctttagattactagctacctatacatgtttttagtactgtattatgatacgacatgtagattcattctacaaataccctaaaatattttttcctcctgaacagattgtcaggtgtattgtgaatggcagtttatttccgaacagagaaatcatgtttcctcaggttaaaagaaaaaaaaaagagaacatgtttctggaagttcattttatttgattatcaccaactcttcacactgttaaattctttgactccaatcatagatataatatctgaactggatactctatgtattgtctattattgtgcatgtattcctcatactaaaagtttttatcatttcacaattcctattatctaatgaattcctactattcaccatatcatttttaaattattacaccatgtaatccttgctattgaagttactgaagtacatgtccttttgcagaggaatttgacattggcatcatgccaagccctgttgctgttttccgtcctatgtcctgtcctgaggttgtagaatgatagtcgagatacatgaggatatctcaagatttactgactaaacttaaataactttttcgcacttcagaaatggtatattacttcatagtataaatttttatacaaagatttgtgtctcgatatgtaattttcttttggtacttaaacaaaatattattgccatggc

SEQ ID NO: 17461 - DNA, 1832 bp, Oryza sativa
  ref <308>: DATABASE ACCESSION NUMBER: AK067904
  ref <309>: DATABASE ENTRY DATE: 2001-12-06
tagctaggatcactggttggtggctactggccatcaatttggtatcctcactttgaattgttttcattgtcccctactctcctctcccatcgcgtcgtcctccccgggcgactcgagagacgacgctgccgccgcccccttcctcttcaacgcctcctccctcacctcgccgccgcctgagcgggcgctggcaaagccgtgcgctcgcaaggacggtggcggcggggccttgtctcacctcccctttgcgcccaacggctggggacgccgcttagagtggtggtggcggtgcccagatccgcgccgtggccggccggatctgggggagcgatagccggtggcagggaatgaaggtggcggcggtggttgacacggcggcgtgggagttggcggctggggacaccgctcggagcgacggaggcggtgcccagatccacgccatggccggccggatctgggggagcggcagccggcagcggggaatgaaggtggcggtgatggacgacgtggcggcgcgggagttggaaacggcggttggtggtgactgcggctgccgacggcggcagtgacggcggcggttggtggcgaggcggcggctgctatggtgactgtagtggcggctgctgaggcagcggctgctgtgaggcggctggcgagctgtggcggtggccggatggctgctgtggtggcagctggcgaggcaacggcagcggtggtggcggcggtgtctggcggcagcgacggcggcggcggctagtgacggtggcggatgtggcgatggggaaggcattgggcgacgacaaagtaggaggagtccagaggggtgagaacgcggtgtcgatgaccggaaatggacgatgatggctgtgaaaggacgatggtggcggcaacggtggtggaaggaggcatggcggcctcgaacggctagtcgtgggcatggcagacggctgcatctggtcggcgcagcagcgtttggaggaggggtcggagatcggcttggcatagagaggcgcaactgatggcagcggaggccggctcggcgcgagaggcgcgggcggtggagatggaggccggcttggcacgagagacacggccgatggagggaggctggattggcgcgaggcgcgtccggtggaggaggccggcttggtgcgagaggcgcgactggcggtggaggaggcgtcctcggtgcgaggaggagctgccggtggatgtggcgtagtcttcggcgcacgaaggctggccggctgggggcgccggtacagtggtcccacttggcggctgaggttgagtggtggtggagcatcagtgcgtcagccgtggattcgtaggtggtgagcaacaggtgaaaacccagcccggccttggccggaccgacaacgatggttaattctccctcctgagggcgttgtcgtgctgtctcatccctcaagggtggttgccgggcgaaagccagtcttggcttctttgagccccgacggacggtgacggcggttttctatcgcttctcttcttgaagacgtcgttttggcatcccctagccgaagcctctcgatcgattggtgcaagcacactctaggagttggctttgcgttggttgtgagggtgttcttttaggtgatctcgtctgcgttcctttgtcggtctagcggtgatcagtcatgcttagcggcggccggtccggtgttagccttctcccggtcttgtgtgttggcgctgtcagtgtgtgggtggtggtatattttttcctttttcctggttatgaccctccagggttatagtcctgtaatattttcctgctctatcaatcgtattgtctcgtgcgagtcgtt

SEQ ID NO: 17462 - DNA, 1991 bp, Oryza sativa
  ref <308>: DATABASE ACCESSION NUMBER: AK067905
  ref <309>: DATABASE ENTRY DATE: 2001-12-06
gagtggaatgcatttcatcgagcaccttgtgtgcgtgcctccatagccattgcttgaagccggagccggtgctgacgaccgcgggagctgtggcttcgggatgcctctgctgctgctgctaccttggatcaactccgggtgccgttgtgacctgaggacctgcggtcgtacacctgcgcgctcgccgccgtcgtccacctctgcttcactgccgtctccccaccacggcatcgaacatcgccgtttcgctgcctctcggacgaactgcatatgttgctgtacaaatcaagcctctccagatgccgtggaacgtttgatatttgtactccaaatcgaattcgaagccgccaataatgccacaccaacacggcaacgcctccacttctatacggagatcgtcgtcgatcggcaaaccgaggtgaagccgacgaaatggagagcgaggtgtgttggctgctatgcgcagcgctcgccgccgcgatggcttgctactacctcaccggcacgatgcgccgccgatcgcggcggctgcctcctggcccgacgccgctcccggtgatcggcaacgtgctcagcctgcgcggcaacatgcaccacgctctggcgcgcctcgccggcgagcacggccccgtgatggcgctgaagctgggcctcgtcaccaccgtggtcgtctcgtcggccggcgcggcgagggaggcgttcaccaagcacgaccggcgcctcgcggcgcgcgcggtgccggacactacccgcgcgcgcgggttcgccagccggtccatgatatggctgccgagctccgacccgcgctggaagacgctgcgcggcgtggcggccacccacgtcttctccccgcggagcctcgccgcggcgcgcggcgtccgggagcgcaaggtgcgggacatcgtcggccacctcgccgggcacgccggggaggtggtcgacgtcggcaaggtcgtgtacggtggcgtgctcaacctccgccggctcgacctgcagggatggcgtcgctgggcggagaagcgctacggcaaggtgttcggcatcttcgacagcgtaatcaacagccgcttggccgacgcctcgaccggaaagcacgccgacgccggcgcaggcgacttcctggactccctcctcgacctcatgtccgccggcacgatcgctcgcgacgacgtgacaagcataatgtacgacttgttcggcgccgggaccgacacgatcgccatcacggtggagtgggcgatggcggaactgctccgcaacccgagcgtaatggccaaggcgcgcgccgagatgaaccacgtcctcgccggcaaggtgaaagccacggagatggaggagaacgacgtagagaagctgccgtacctccaggccgtggtgaaggaggtgatgcgcctgcacccggcggcgccgatcctcgtgccgcaccgggcggaggaggacgacgcggagatcgggggctacgccgtgcccaagggctcgacggtaatcttcaacgtgtgggcgatcatgcgtgatccggtggcgtgggagaggcccgaggagttcatgccagagaggttcttggacatggcggaggaggtggatttcaggggaaaagaccacaagttcatgccgttcgggaccggaaggaggctgtgcccggggttgtcgatggcaaagcgcgtcgtgccattcattttggcgtcgctgcttcacgcgttcgagtggaggctccctgctggtgtgacagcggaggctttggatcttagcgagaagtttactactgtcaatgttcttgttactccaattaaggccatccccatacttgcctctgatcaaatttaagtgaaattgttgcaacttaatttgaaggcagcgctagctatgcatattggtgttaatatgttaaatttgggatatcaccatgtacatacacatacaccggcgagaataccgcatatcagttcttgtattatggagataaattctcaaatagggataaggtcttgagc

SEQ ID NO: 17463 - DNA, 1454 bp, Oryza sativa
  ref <308>: DATABASE ACCESSION NUMBER: AK067906
  ref <309>: DATABASE ENTRY DATE: 2001-12-06
gagtgcttgccaattcggagaaggcatcgagctgaagccacagggcgatcgatggaggtgaggtgaggaggaagaagaagacgagatggagttggagtgcacttcacgccacatgagggagatgctataaaatcccttctcccttttcaatttcacgccaacacccaaccccctctctctctctatctctctcctctctctctctctagctctagctctagctcgtcgccgccatgaacgttccaagcaaatgcatggctcctgcaaagtaaaaaaagaagaagaagcagcagctgcagcttctcttcagtatcgatctttaactgtatcgaactagcttagcttagcttagctctctgccattaacttgtgcttcactgagcttgagctagctagcttcttggctgtgtgactgagtagctctagctcctcgtcgtcgtcgtcgtcgtcgtcgtcgtcggcgtcggtggtggtgtgaattgatagaattgatacgatggagagggcggctgcggcggcgccggtggtggtgaggcatggaggagtggtgttgccgccggggttcaggttccacccgacggacgaggagctcgtggtgcagtacctccgccgcaaggcgttcggcctgccgctccccgccgccgtcatccccgacctccacaacctcttcaagctcgatccctgggacattcctggtgcgagcagcgacggggacaagtacttcttcgccgtgcggccacctgcggcgagggggaggaggcagcatgtgacggcgagcggtgggtgctggaagccggcgggcgggcgggacaagccggtggtggtggcccggtgcggcgggagccacctcgtcggcgtcaagaagggcatggtgttcgtcccacggcaagggaggaaggcaccggcggcggcggcggcggccgccggcggtggctgctgggtcatgcacgagtacagcctcgccctgccgatgcacaagaagggttgcttggctgaggctgaagaatgggtagtgtgccggatatttcagaggagcagcagcggcagccggtcgccgaggaggcctgacaacgacgtgaggcgaacgatgccggccgtcgccgagctcggccggtcgccgtcgccatcgtcgtcgtcgtcgcaatccagctgcgtcacaagcagctccgaccagggagaggtcagcagcggctagctagctgaagaagaatgcaggcagcagcagcaagcagctaagctgcctctcaaagagaggcttgagtgttagcctagctaagcatatatatttatagccggccaaaccctctgaaagtgatctgcatcaatgcatgcccccctttaatttcttcttcctccttaattattttttcccaaccatgtaatgtaatgtaatttaatgtaatgcagtgtaatgtaacgggaaggaagcactgaattaatcaaattaaattagc

SEQ ID NO: 17464 - DNA, 1929 bp, Oryza sativa
  ref <308>: DATABASE ACCESSION NUMBER: AK067907
  ref <309>: DATABASE ENTRY DATE: 2001-12-06
gacgtgcaaccgctcgcgaaaagccagtgcgacacagcggcggcggcgagatcgtctgcgtcttcttcgccgtcgtcgtggtctccgttctgcttcgtttttttaccggtctccatggacaacaacgccgaggcagcgaatgacggcgccggcgccggcgagcggcggcggctgccggacttccagcagtcggtgcggctcaagtacgtgaagctggggtaccactacctcatcaccaacggcgtgtacctcctcctgacgccgctcatcgccctcgtcgccgtccacctctccacgctcaccgccggcgacgtcgccggcctctggtcgcacctccgcttcaacctcgtctccgtcgtcgcctgcaccaccctcctcgtcttcctctccaccgtccgcttcctcacccgcccgcgccccgtctacctcgtcgacttcgcctgctacaagccgccgccggagcgccggtgcagccgggacgccttcatgcggtgctccaggctcgccggatgcttcaccgccgccagcctcgacttccagcgcaggatcgtcgagcgctcgggcctcggcgacgacacctacctccccgccgccgtgctccgggagccgcccaacccgagcatggcggaggcgcggcgcgaggccgaggccgtcatgttcggcgccgtcgacgacctcctcgccaagaccggcgtgagcgccaaggagatcggcgtcctcgtcgtcaactgcagcctcttcaacccgacgccgtcgctgtccgccatggtggtgaaccactacaagctccgcggcaacatcgtcagctacaacctcggcggcatgggctgcagcgccggcctcctcgccatcgatctcgccaaggacctcctccaggtgcaccgaaactcgtacgcgctcgtcatcagcatggagaacatcacgctcaactggtactccggcaacgaccggtcgatgctggtgtccaactgcctcttccggatgggcggcgcggcgatcctgctgtcgaacaggtggtcggagaggcgccggtccaagtacgagctggtgcacacggtgcggacgcacaagggcggcgacgacaagtgcttcggttgcgtcacccaggaggaggacggcgagggcaatgtcggcgtcgcgctgtccaaggacctcatggcggtcgccggcgacgcgctgaagacgaacatcacgacgctgggtcccctcgtcctgccgctgtcggagcagctcctgttcatggcgacgctggtcgccaagaagctgctcaagatgaagaacgtcaagccctacatccccgacttcaagctggcgttcgagcacttctgcgtgcacgccggcggcagggcggtgctggacgagatcgagaagaacttgtcgctgggggagtggcagatggagccgtcacggatgacgctgtacaggtttgggaacacgtcgagcagctcgctgtggtacgagctggcgtacagcgaggcgaaggggagggtgaggaggagggacagggtgtggcagatcgcgttcgggtccgggttcaagtgcaacagcgcggtgtggagggcgctccggtcggtggacccggaggaggaggcgctgaagaagaacccgtggatggatgagatcgatcggttccccgtggttgttcccagggtgtccaggatttcaaccgactgagcttgaatagattaatttggtgctcctttggaattggcacttttgttaggtggatgcaccaaggtgattacggattgttgggttttgtggtacttgcaaattgtttttgatcttttaatctattgttagggtaggaacaggagtgtgttgttgtgtctgtcttgtggttgtacgttcaccacttcagcttgggtgtgtgatcagtcctccaaattttctgattatggaccaaatttggcgaattttgattggacg

SEQ ID NO: 17465 - DNA, 1795 bp, Oryza sativa
  ref <308>: DATABASE ACCESSION NUMBER: AK067908
  ref <309>: DATABASE ENTRY DATE: 2001-12-06
gtgaggtaagctagctagtactaacgacctcgcacgctgctctcgcaagctctctcggccatggcggtcggcacagttcccgatagccaggatcttccacgccgctatggtggaagggtcaccaccttcgtcgtgctctcctgcatcaccgcgggcatgggaggcgtcatcttcggctatgacatcggcgtctctggtggtgtgacctcgatggacggattcctgagcatgttcttcccggaggtataccggcggatgaaggggactagcgtcagcaactactgcaagttcgacagcgagctgctcaccgccttcacgtcatcgctctacatcgccggcctcctcaccaccttcctggcttcgtcagtcaccgctaggtgcggccgccggccgtcgatggtcatcgcggggagcgcgatcctcgccggctcagcgatcggaggaaccgcggtgaatgtctccatggtgatcttgggcagggtgctgctcggcgtcgggctgggcttcggcaatcaggccgtgccgctgtacctgtcggaaatggctcctccgctgcaccgaggagcgttcagcaacggcttccagctctgcgtcggcatcggcgccgtcactgcccgcctcaccaacttcttcacgcagaagatcaggcaaggctggggatggcgcgtctcgctcgccgtcgccgccgtccccggcgggttgctcaccctcggcgcgctcttcctcccggagacgcccaacagcctactgcagcaaggcagagacaagcgcagagttagggtgcttctcaccaggatccgaggtgtcagcgacatggaggacgagccggaggacattgtggccgccaatagcgacaaggcgaacagcagccgcggcctgcagatgatcgtcacccagcggcagtaccgtccccagctcgtcatggccatcatgatacccttcttccaacaggtgaccggcatcaacgcgatttcgttctacgcgccggtgctgctgcgcacgatcggaatgggggagagcgcgtcgctgctgtcggtggtggtgacgggcttggtcggcacgtcgtcgacgttcgtctccatgttcctcgtcgaccggtacggccggaggacgctcttcctcgtcggcggcgcccagatgctggtgtcacagctcatgatcggaggcatcatggccacccagctgggcgaccacgggcaggtgagcaagacgtgcgcgctggtgctcatcttcctcatcgccgtctacgtggccgggttcgcgtggtcgtggggcccgctcgggtggctggtgccgagcgaggtgttcccgctggaggtgaggtcggccgggcagagcatcacggtggcggtgaacttcctgatgacgacggcggtggcgcagttgttcctggccacgctgtgccgcatgagggccggcatcttcttcttcttcgcggcgtggctggtggccatgaccgccttcgtctacctcctgctgccggagaccaagggcctacccatcgagcaggtccggaggctgtgggcgcagcactggttctggaggaggttcgtcgacaccgcctccaacggggagcaagctaagctagactgctagcgccagtaactttgacaactctgcacaatcgatcacagttaactagtcaatagttactactccctccgttttaggctacgatatgtttcaaagtcaaaatgttttaagggtctgtttaggggagcttttggttctgagaagcagcttgttagtagacaggtttcccaacttttgtcttttagttcattttctatattct

SEQ ID NO: 17466 - DNA, 3906 bp, Oryza sativa
  ref <308>: DATABASE ACCESSION NUMBER: AK099025
  ref <309>: DATABASE ENTRY DATE: 2002-08-28
gttcttccaaccccacacaaagcggcgcctccgcacccgtgtgtaaagaaaaaaaaatcggaggcgaaaacctctcaaaccctaatcccctcgtcccccccatggcggagtcggacgcggcggcgccgccgccggaggtagtcgcccccgtggaggagcagacggcccccgcggtcggcgcatccacgctggaagaggccgagcccgccgcggccgcggccccggccgccgagggcgagggcgagcacaagaaagctcgaggaggtcgacgccgcccccgacgcgaacggcggcggcgaggacgccaagcggccccgcgtggaaggcgacggcgaaggtgtcgtgcagagcaacgagtcctccgcgaaggtcgatgagccggtagctacagagaacagtgacgctgcccctgctgaggcatctgttgatgctgtgaatggcaaggttcctcctaccgaggattcgcagatgggctctggggagaagcctgcagcagaagcagcagtgactgaagccccgccgcaagaaggtggtggcgcaccaggacaggagacgtctcggataatcaacgtgcccaataacaaggtcggagtcctaataggaaaatctggggaaacaatcagaaacttgcaaatgaactcgggcgcgaagatccaaatcacaaaggatgctgaggcagatgcaaatgccccaactcgttctgttgaactagttggaacccttgagagtattgacaaggccgagcggctgattaagaatgttatagctgaggctgatgctggtggttcgcctgctctgatcgctagaggttttgggtctggacagtcaggctctgagcagtttgagatgctagcccctgataataaggtcggtttaattatcggaaaaggcggcgagaccattaaaaccctccaaactaggtctggtgctcgtattcagttgattccccaacatcctccggaaggtgttacattgacagaaagaactgtacgtattactgggaataagaagcagatagaagcggcaaaagatatgattaagcaagctatgagtcaggtaatgtgattctgtgtttcgctttcaactgttccttcatgctgtaaataactagtgatattagatgatgctgtgatcacccaatgattgtgcaattcaatcatgctgtgaagaactgggcgatgctatatgatgatgagatgctaaattcctactttatgcgtttccattctattcatgctgtgattattttttcattgaaactgaatttctgttacctgctctggaatcatggtgtgtattatcgaacctattgtctctagcatgaccttactatcttcgtattatatgattggtataatccaatatgttttcctgttctccctgataatagaggtcttagaaatatagaaggtgttttttggttcttgttgagtaaacctgtgatttctttcaatcagcttaattaaatctgtgccctcttatggtttgtgtagatgttattttattgataccttctagaactggttccagcatttgttcatttcatttttaatagttttcatctccgcatcttataaacttgaagtaaatttcttttacacaaaaacgcttcaatgcaaatgtattttgttgaatgaaacacaattttactgcgtcaatggggtgctggatttttcctcgcttattaaatcttaagtgtataaactaatgtcttttctacaatgggccttgtatgaagtaccgatcttgaaatatagcagtgcctaattggactggaaggtaagttcttcttaattggtgataagttttagtgtctttgttgctaagtcaatgagatgccacatccttgagagtattatgtatggttatattaatacttaatttatacagaataatttgtctataatatttcatgagttataatctcctcgtggtcaattattttttgtgggaatatttgtcatcttccatataattcagtatcttgccttgctgccttttcaatggcaaaatttattccatgtccatgaattttaaggtttttgcattgtcttaaattacaaatgatgcatatgtttagtttcccatgaaaatgttgttcattcatggattaacaatatggaacatggtgtgcatgatcatcaatgttaactatgaatgaagttagaataaatgatttgactctgcaatggatagcttttgaggatttgtgagatatattcacgttgacataaaaagatagtttagtctcggtggcttgatagttcttcatagttcgtctagaagcagaacttaccttcgtgtatgatagtgtggttggacttcagtacttgatcgttaaaaccttggtgctgtcacatgatcaatgaacaattactgtggtactagtttcaatctttagtcggctagtcttttgagttttggtaactgcttactgctagatgagatctgattatgtttcctacataagaagtcagaactgactcatcaaggttcctctcgcttccagtttccatgatttattttgtttgaaggtgccaatttggagttggttgggtatcctaatgcagatacagctaggctttcatcatgggctccacatccttcatccattacatgcacagaagagggatattgaccattatcccttgcccttgcatggtttgtgtagttggtaactggtaaggctgcttattgctgaaatggaaagaaaaaaaaacaatgtggcattgggagactgcaccaaatgtttcattgccatgacaaggatactgcatcaccatgtctaggtttgctgaactaaattgttgccactaatttgcaatagctgaaaaagcagcaagttttctcgcatcacatacgtcagttatttgatgtgttagctttccaactagaatattcaagttggctgacagcctatattgttggagttaaatcatatatgtgagctatgcatgcaattttgctatgtttcttttttttgaattgctgcatgtaatatcaccatggttatgtgatgatgtcataacgtgcaactgtaatcccatttacttcttacttacccattggctctgctaaaggtgatggttctgttgatatatgcattcatcacattgatattttgtgtttgtctattgttcagatcccctggtccttttaaaaattcttgtttagatgtctgaaggaggttgtgaaatgccagtattaattagaatccttttatctaacaatgtttgtgaatgcttaagcataaattatgtttttagtgaatcatggtgccatagcttatatgcaggcttattttgttattgttggtatgctgcaagtatgaagtgaaacactggtcatcctttttaattatcttacaaaaatgcctttattcttctgtgttatatttgtaatttgtaattgtactatttagtattttgtttttgtcatttagtgttcttgttttgtttctaacgttccttcttaaacagacattttcaagacatggggctcaatctggtggatatggtcagcaaaactaccgccctcagggtcatggtgcagcttctcagtggggcccacgttctcaaccccagcctggatatggatatccaccaagagggcctccacctcagaacatgccatactcccaaccttatggtggctacccgcagcagccaccaccaagaggtggcatgggctgggatcagaggcagggccctccaccccatgcttcccaccatggtggcggttacgactactataaacagggttctcaaccatatgaaggccagccaccaaattaccctcctgggcctggaaactacaatagttatgggccatcacagggcccaaattatggacaacctcagtatccgcagtctgcacctccacagaactatgggccgggttatggtg

SEQ ID NO: 17467 - DNA, 1580 bp, Oryza sativa
  ref <308>: DATABASE ACCESSION NUMBER: AK067909
  ref <309>: DATABASE ENTRY DATE: 2001-12-06
ttgggacacaagccctataatagccaattaacccccgtctctctcctctcacagtctcacccacatgcgcgccattgcctcctcctgccgacacacgcagacagcagcagcaatggcgcccggcagccggtgcagccggcggcagcagctgctggtcgccgtcgccgtggtgctgcttttggcggcggcgccgacggggtgctcggcggcgaggagcaagaagtcgtacgaggccatcttcagcttcggcgactcgctgtccgacgccgggaacctcatcgccgacggcatccccaagtcgctcaccaccgcccgcgccccctacgggatgaccttcttcggccgccccaccggccgctgctccaacggccgcctcgtcgtcgacttcctcgcggagcacttcgggctgccgctgccgccggcgtcgaaggcgcacggcgcggacttcagcaagggcgccaacttcgccatcaccggcgcgacggcgctggagtactccttcttcaagcagcacggcatcgaccagcgcatctggaacaccggctccatcaacacccagatcggatggctccaggacatgaagccttccctctgcaagtcggaccaagagtgcaaggactacttcggcaagtcactgttcgtggtgggggagtttgggggaaatgactacaatgcccctctcttctccggcgtcgccttctccgaggtcaagacctacgtccccctcgtcgccaaggccatcgccaacggtgtcgagaaattgattgaacttggtgcgaaagacttgctggtaccaggagttctcccaattggatgcttccccttgtacctgacactgtacaacaccagcagcaaagctgactacaatgcccgcaccgggtgcctccggagatacaaccgtctcgccttccatcacaacagggagctcaagcagcagcttgatgagcttcaaaagaagtacccagagacaaaaatcatgtatggtgactacttcaaggcggcaatgcagtttgtcgtcagccctggaaattttggtttcagctcgactatgcaggcttgctgtggtgctggaggccagggcaactacaacttcaacctgaagaagaagtgtggtgaggagggtgctagcgtgtgctccaacccgtcgtcgtacgtgagctgggacggcatccacatgaccgaagccgcctaccgctatgtcgccaatggctggctgaatgggccatatgctgagcccccaatcctcaagtgagaatttgaggggttttgactgtatgtaacacagctgttggtgcaaaaatatatatgaatgaagaaggtttcagtcactgaagaattaagttatatgggtaaaagttgtttagtttttttgttttcatttggaagaatgtgtaaactgtgccagtatagatatgttccaaaatgaatgttgaaactggtgccagtatagatatgttccaaattaaactgagaagatgtagtacagatgtaccatgtttgacatgttctctgattcttttcatttgtcaatgactctgggtaataatttatggtaataaagagatcaaatttgtgcatcg

SEQ ID NO: 17468 - DNA, 1543 bp, Oryza sativa
  ref <308>: DATABASE ACCESSION NUMBER: AK067910
  ref <309>: DATABASE ENTRY DATE: 2001-12-06
gacccgccaaacacacttgccagtctactctcgccggcgtcttcctctcctcgcctcgtctcgttcgtggccaaacgaagctcgcgcctcccggccactcgcagtcgaagcccagcaaccgccgccgcgccgaggccgagcaacagtgaggaggtagcttgcctgcaatgatggccgggaccctgcaggtcgccggtggctgcctggcgcccctcctccccagccgacgagcggcggcggcggtacgcccgccacgcgcgtccggggcgtcggcgtcggcggcggcggcggcggcggcggtggaggaggacggcaaggtgaggctgggtgggtcggacgtggcggtgaccaagctcggcatcggcgcctggtcctggggcgacaccacctactggaacgagttccagtgggacgataggaaattgaaggctgctaaaggagcatttgatgcgagtgtcgattgcggaataaccttctttgatactgcagaagtatatggtgcagggatatcaggagccataaattcagaaagtttactaggaagattcatcaaggaaaggcaacagaaagaacaggtcgaagtagccattgcgacaaagtttgcagcccttccgtggaggcttggccgaggaagtgttatttctgcactgaaggactcgttatcccgccttggcgtctcctcagttgagctctaccaacttcattggccagggatatggggaaatgaaggttaccttgatggtcttggagatgcttatgagcaaggtcttgtaaaagctgttggagtctcaaactacagcgaaaagcgtctacgggatgcttacgagcgcctcaagaagaggggagttccacttgcttcaaaccaagtaaactacagtttgatatacaggaaccctgaagaaaatggggtaaaagcggcttgtgatgagcttggtattactttgatcgcatattccccgatcgctcaaggtgttctgacaggaaaatacactccaaataatcccccaactgggccccgtggacgaatatacactcctgagttcctgaccaagctccaaccacttattaacaggattaaagagattggaggaagttatgagaagaccccaactcaggtggttctgaactggctgatctgccaaggcaacgttgtgccgatccccggagcgaagaacgcagagcaggccagggagttcgctggtgcgctcgggtggagcctgacggatcaggaggtggaagaactgcgttccatggcacgagagatcaagccggtcatcggattcccagtagagaagttgtaatttctagtgagtttttcttctactttgggtctccgagaacatcatttacataaatacacaatgatctagacatacatagataggaaccatgtgtagtctttggaactgaaaattaagatgtcttagaaaataaccaaaatttacagtctgagtagcgtacatgcatgtatgctcatcgaccatattacaactaagattggtaactggattatcttcaagaaaccaatgttttattttctccg

SEQ ID NO: 17469 - DNA, 4559 bp, Oryza sativa
  ref <308>: DATABASE ACCESSION NUMBER: AK067911
  ref <309>: DATABASE ENTRY DATE: 2001-12-06
gactgctctttcccctgctccaagtatttctctctcgttctgctctctgttcatcctcttccttccaaaatccccaaaatctctagcccgatcgtaacattaggtatcagagccaccaatcttggagtatctagagaaaccacgctatcattcgcgagctcaactcaaatcccaggagatggagcaacaattggcggaacttgtggaggtcatgtctgcgattcagaagcagaattcggcgattcaaacttcggttggatcgctggaggagatcaagcccctggtggtggagttagcgagttggaagccggcgatggacaaggcggtgacagagctgcatgaggagatgggggatctgcgccaacaagtggagcggatagcccgtaatccggtgctctccgtcaagccatcggagttgccggcgctgcttcctacaccgactcggcctcgggataccgctcccaaggaggaggaggtctctccaagtgtgggtggcgaaggtcacgggccgttaggccaccgcgttgcttcgattccacgggggaaggcgtgtgggaaggagtcctctccatcgtctctcccggccaaggatgggttgcgggcaaatattcatggtgctattcttttacaccgtcccacggacatggatactgctgtggatctcgcttgcctgtaggaggaagtactggaatctgctcgataggaggctatgacgagttaccgagctacggcccgttctgctacaccgtcgtttgcttccaagacatttggtggtggccgagctgatgaacggacactgccagtggaagataaggtagctgccctgagagcttatcgcaaagcaaagggattatgccatacatgtggggaacggtggagtcgcgatcacaagtgtggacctactgttcagttgcatattgtggaagagcttttggaattgttagctgattctgctgctgatggtatgcctgagattattgaaccaactactgacattgggtctgagtctgaacctcaaggcgaagtctgtcagatttctcgtgatgctatgattggtacgaaatctgtctgtacgcttcgattgcaaggacttattcagcagtaagaaattctcatgttagtgaactctggcagcacgcatagttttatgtctgaaaagctggctggcaagttgaactgtaagctgcgtgttgttcctgctattcaagtcaggattgcggatgggggtatactgcactgctcaagggagttgacaaattgcctttggtgggtgcagggtttctcctttcaatccaatttcaaggtgctgcctctgggaagttatgacataattctcggcatggattggttggttgaccatagcccaatgcagattgactagcgaagcaagattttgcaatttcagtatcaacaacagaatgtctgtctgaagggtgtggttgctaatactcagaaatgctctgaactttcggttgttcaggtgcagggcttaatgaatcatgatgcggttttgtagactgttgagttatgtcctctagaagattcagattcctctcttgaaataccagccgaaatttctcagctccttcatgagtcaatcttcatccctaccgttataacccagcccagaaggatgagattgaacggcaagtgaaggatatgctgcagcagggagttattcaaccaagttcaagtcccttctcttctccggtgctgttggtgcagaaaaaggacctcacttggcagttttgtgttgactgccgtcacctgaatgctgttacagttaaaaatcgctatccccttccaatcattgatgaattattggacgaattgtcaggtgctagtctgtttaccagcttggatctgcgcgcggggtatcatcagattagaatgcgagctgaagatgagtataagacggcgtttaaaacgcataatggtcattatgagtttcgggttatgtcctatggacttacaggagccccggccacttttcaagggttgatgaacatgatttttgcaccgttattgaggaagggagttttggtgttcattgatgatatattggtgtacagtcgtaatttgcaggaccatgtcatgctgttgcgtcaagtgttctagctattgacgactcaccagttaaaggtcaaacgatctaagtgttcgttcgctcaatccagccttacttatttgggtcatgtgatcagcgctgcgggtgtaactactgatccgaagaatgtcagggctgttcaagcttggacagtgccgcagaatgttaaggaagtccggagtttcttgggacttgccggatattatcacaagtttgtcaagtcttttgggatcatcagtcggcccttaactgatttgttaaaaaagtaggtggtcttcgtttggacttcagaacatcaagctgcatttgaagctcttaaggctgctttggtttctgccccagtgttggcgttgcccgatttttctgggacctttgtaattgagactgaagcttctgatttgggggtgggtgcggtgttaatgcaggatggacatcccttggctttccttagcaaatccctgggtccacgcaacagaggcctgtcaacttacgaaaaagagtgtctcgctatattgctggctgttgatcattggcgctcttatctgcagtttggtgagtttatcattcgtacggatcagcgcagcttgattcatcttgatgatcagcgtttggtgacatcttggcaacaacgagcattaaccaaattacttggcttatcttaccggctggtatacaagaaaggtcttgagaataaggcagctgatgtgttgtctcgttgcagatccaatgaggtgtatcaattgagtactgtgtcatcttgcgtgccctcttggttggaggaagttcagaagggttatgattctgatatttgcacttctcaattgctcgctaaagtgttgctctctcctagtcaatttccttcttattctctgaagaatggtattctctattatatgaggctcatttggctgggtgcaaactctgaattgcaacttaaaattctgtctgctttccattgctctgccgtgggtgggcattctggtatacaagttacttacagcagagtgcggcgcttgtttgcatggccgggtttgaagcaggccgttcgccagtttgtgtccaactgttcgatctgtaagcaagcaaaagctgaacgtgtgcgttaccccggtcttttgcaacctctacctgtgccggagcatgcctgggtaactgtttcacttgattttattgaagggttgccttcttcagcaggttttgactgcatactggtggtcgttgataaattcagtaagtatgcccatttcctggctttagtgcacccattcaccgcttttgatgttgctttggcttatctgaacaatgtttataaactttatggattgccacatcatatcatttcggacagagtccgtatttttaccagcgccttgtggacagagttatttcagttgacggatactcgtctgaagttaagtactgcttatcacctacagacggatgggcaaacggagcgtgtcaaccagtgtttggagacatttctccgctgttttgtgcatgcctgtccaaagaagtggttccgttggtgggctttagcagaattttggtataacactgcttatcattcagcgcttgagaggtctccatttgaggtactttatgggcatcctcctcgtcattttggggtgtcgagtacagctgaatgtgcagttccagatcttgacaagtggctgaaggaacgggcagtaatctccagtttgttgcgtcagcatcttttacgagctcagcaacgaatgaaatttcaggtcgacaagaagcgttctgaccgcgagttcgctacgggagattgggttttttgaaggctcaaccttatgcacagagttctcttaccgggcataccaatcacaaacttgcttttcgctatttcggaccttttcaggtactgaataaggtgggagcagtggcttatcgactacgattgccggatgattgctcgattcatcccgttgttcatgtctcccaacttcgacaagctgtggcaccaaccactgcgactgatgttcgtgctcttcctaccatggcaccagaggaggtggttcctgttcaagttctcgcccggcgagtttcgaagaaaggagctggagctgtggaacaagtcttggttcgttggacaggtcaatcatcaagtgaggctacctgggaagatgctgcggctttgcgtcttcgatttccggatgcgccggcttgggggcaagccgctttcgaagggggaaggaatgttacgggtgctgctactgtatctgaaccggtaagggagaataatcctgtgaagtctgggaaacgacctcaaagggagagaaggccgaatgtccgagtctctgggccggagtggtcttaggccagctgtatgccgtgcatgtatataagcacaggtagagagaggaaaggatatcaaatatttgagctgtaaacttgaaaccaaactctgtctctactgctctttcctctgctc

SEQ ID NO: 17470 - DNA, 1677 bp, Oryza sativa
  ref <308>: DATABASE ACCESSION NUMBER: AK067912
  ref <309>: DATABASE ENTRY DATE: 2001-12-06
gactgattataagcttgagctttacttagttccacaaaaaaaaaaactgttgacaaaaaaaactcagatcttcaagctgccagagcactgaaaaaggaagcaaagcaatggtcttggagcttctcacaatggctgctcaccgcgtggggcgatgcatgctcctgcaaccaccgcgcctcgccacctgcgtcctcttcctcctgctaccgctgctgctgccgtgctcggcgtcgtcgtcggtgatcacccacctcccgggcttccacggccgcttgccgttccaccttgagaccgggtatgttggtgtggacgaggagacgggcactgagctcttctactacttcgttgaatcggagaggagcccaagtacaggccctgtgatcctctggttgacaggcgggcctggctgctccggattcagcggtgtcgtctttgaagtaggacctatgaaatacgtgttggagccttataatggtagtttgccacgattggtttataatcagtattcatggacacagatggcaagcatcctcttcttggacactcctgttggttctggtttctcatacgctcatgatcctaaaggttataatgtcggggacatatcatcgtctttgcaagtcgtaacatttctgaagaagtggttcaatgatcacccacgctatctctcaaatcatttctatgttggaggaagctcatacgctggaaaggtgattccaattatcatgaagttcatttcagaaggaattgaacaaaggcagcagccattggttaatcttaagttacaggggtatatagttggcaaccccattacaggctcgaagattgatgataatttcaaaattccatattctcatggtgttgggatcatatctgatcaattatacgaggctgcagtagcaaactgcaatggagattatgtgaccacaacaaatgaattatgtgctaaggccctaaatgctattgataatctcatgtctgaagttgattatggaaatatcttggatgataaatgtgttcgtgctacaccaaaacccataaatgaagtttcaagaagtaggagtctgcaagaagattacattcggctaagtgagccgactgttcgacctactatcaattgtttttcataccgttactatctatcattcttgtggatgaacaacaatttgactagagaagctcttaagatcaagaagggaacagtcggcgaatggataagatgtaagacagggctaccctatgttcaagatgtcgcaagcagcatcaagtatcattttgacctcaccacaggaggttaccgggcacttgtgttcaggtgaaatcatcagaggaaaattcatttatctgcttcctgcaggcatggataagatccttgaacttctccatagttgatgagtggagagcatggcatgtggatggccaggctgcaggatttacaattttgtacgccaacaacttgacctttgccacagtaaagggtggtggccatacctctatagaaaccaatcctaaacaaggttttgccatgggcaaacgttggctagataataagcctctgtgatgttcacctgctttgacccaacctgtatactcgtgcaactggtattgtttgtatgaagaactactttatctcccatgttttccaacaacgaatagaagacaagataaatactccgc

SEQ ID NO: 17471 - DNA, 1295 bp, Oryza sativa
  ref <308>: DATABASE ACCESSION NUMBER: AK067913
  ref <309>: DATABASE ENTRY DATE: 2001-12-06
gcctcagatccgtgtgctcggctccttcctcccctcttttctccccgcttttcccatccaatcccggcggcggcggtggctcggtgacgagaggagtagcagtggtagtggtggctcaatgacgaggaggggcggcgagagctcggcgacagggaagggcggcgagagctcggttcctccctcccctcttctcctctccaatcccggcggcggctcggcgacaagtaaggacggcgggagctcggctccttccggcaactgatgggagaagacgccccttgtggagagctgctgccggtgctgccgtcgtcgtcagcgccgccgtcgcaaccaaggggacacggcttccttgctggagagctgctgccggtgttgccgtcgtcgtcctcccccgccgattacgagtgctacgtccactacaccgagtaaacctgtcgaatgggaggcaccatcataattatatgatccagcattatgaagtaaccatcaactgatctaagctgggagagtactgtaagctgtggcaccggggatggccaacctcattggctactgctgcgacagcgacgagcggcttctcatcgccgagttcatgcccaacgacaccctcgccaagcacctcttccactgagtttcctccctccctccagtcccctgcaatttaactccgggtctctatattcccctcccatttgatgatcctaccaacgattggatccttttggtcataatggatgttgctgtgtttcgtgtgctacctcttcagttctgtagttacgcagccaatggtgcagcgagcttggatttttatgatgaaatggctagcttcggtagctgatttagaattttgcagcggcaaaataaaaagtgatagctgaaggaaaatcttggattcatgatgaatcggaagcagcaaggaagcatatgtcctttgtcgtttgattggcctcaacactcaggtcaacctcaataaggtttttgtctattctcttaatgttaccttgctaattcaagatcttttgattcgtgtgacttggatatgactttgcttaggtcaatgtgtgaacgactatttggcatttggctggatttggtggtcagtgacttgtactagtgatgtattgacctggtcagtgaacctgtgatgtaattgaacatgttttggatggtgatttgtggatgtaattaactgacttgtcatgtaacttacttgaggataacatgtgatctttttttttctgaatttgtgatagcctgttttgtgaatttgtattaaatatgagctgaatgttgtc

SEQ ID NO: 17472 - DNA, 888 bp, Oryza sativa
  ref <308>: DATABASE ACCESSION NUMBER: AK067914
  ref <309>: DATABASE ENTRY DATE: 2001-12-06
gggcggccatgaaggacccgttcgaggcggcggtggaggagcaggagtcgccgccggagtcgccggcggcgaacgaggaggacgcggccggggcgcccgagggatacgacggcgccagcgggtcgcgcgggcctccgctgcggctgcctccttcgagggccgcgccatcgggctccggtggtgccgccgcggccgcggcgaggggtaaggtggtgcgggtccagaaggagcagcaggaggaggaggatgacgaggaggaccacatggaggtcgacctcgacaagctgccctccggcaccagcgaccccgacaagctcgccaagatgaatgccatactgtctcaatttacagaagaccagatgaaccggtatgagtcattccgcagatctggattccagaaatctaacatgaaaaagctattggcgagcattactggcagtcaaaagatttctctaccaacaacaattgtagtatcaggaattgcaaagatgtttgttggtgagcttgttgaaacagctagaatagttatgactgagaggaaagattctggaccagtaaggccttgccacatcagagaagcctacagaagattgaaacttgaagggaagatcccacggcggactgttcccaggctcttccgttagaattgaagcatctctgttgatcccagtcgacactgagatggtcctttctgcggtcagatgcgcggaaagagagaatgacatgagatgtatttcttcagctttgtgaaattgttactgtgatttctgtcgcagcaagggaaccagagcaaacagtacgtacaagctgaagtactacggtactactagccgtggaaaattctatgtataaagtattggccgtaggctgtgaattttcaggcttatg

SEQ ID NO: 17473 - DNA, 3264 bp, Oryza sativa
  ref <308>: DATABASE ACCESSION NUMBER: AK067915
  ref <309>: DATABASE ENTRY DATE: 2001-12-06
ggcctatcgtcttcttccccactggccgtctctccccgcaccaccattcgcgcacgaccgccgcggcggcagccaactccggcgagggccatgtccggcggcggatgcagcgtccgggcgatctggatcctcaccccgcacgacgccgtcgccttctccaggcgatttgcggtggtggagaagcggtggcgggtcgcgtgggaggcggagggcggggcgagggcggagatgatgccgctgccggctgactacgaggtcgccgccgccttcgccgaacgccggagaagggaaggcacggcgcgtggttctggaatccgtacgagcatgtcatctgctgggtcggattcgtgggttgatgatccaatcactcgccacattatatcactccatattgataaagaggaaggagaggggtttatgctgtggcctgtggttcttcagaagcggggtagctattatatccttgtgttgcctttggtggatcctcaatcatttaaagcatatgaaagcctcttgaaaaggtcggactgcgggagttctgccaaggagaagggcaatctttcttccattctgctcaaccttccatgcataacagggtaatggcattaatggttgcacatgttattggggacataattactggtgataccgctgagcctgaggtgatcgttagtactggcccctctgttggtgggctgttagattcattgacaggaagtataggtatttctgctcgaccaaaacctattgctgcacctgtcgcagccccgaccgcatcaatttcttcacctgttggtgctcctcagtcggagtctctgaaaggtggtatgaggccttttgacaaggatttactacggaatttcatccttggtgcgatgccttttggaacacctcaggatcttaattatgccaatgttacttcggtaagaacaactgggttttccgctgatcctctacctacagaccagaagcagcctgcctggaaaccttatctgtacaaagggagacaaaggactctcttctcaagcctagagactttaaatgctgcactatatgaccgtgatgatgtgcaagatttcctttcggtttctggacaagtgacatgtagggctgagctagaaggtttacctgatgtttctttgccattgtctgggttaaaagctgctcgtgtggaggtttcatcgttccatcactgtgtgcaagcttcagagcctaccaatgataagcaaactctaatatttcaaccaccactaggaaattttgttttgatgcactatcaagcttcatgcaacatggacccacctgttaaaggtttctaccagttgtctatggtgtctgagaatgaaggtgcttttctatttaagctgagattgatggagggttacaaatctccctttcttatggaattttgcatggttacaatgccgtttcctcgaagacgagttgcatcatatgatggaaatccatctgttgggacagtttcaatgacagaacattcaattgaatggagaatcgtttcaagcggtcggggcctcagtggaaggagcattgaggctaccttctctggtactgttagattccatcctataacaatccagcgagtaaattcatcatttcgatcagttccaagcactgcatttgttgaagatagtgttagtgaacaagacaatactaagaatggtgccaatttggatgactacctcatggaaaaaatgaataaggaccttcaagcagttaacttggaagagccattgtcctggcaagcttataattatgctaaggtttcttttaagattgttgggggcaccctttctggtctaacaattgatccaaaatctgtaagttattcattaactttcttgttccattctgatggtttatgctttgacctcaattaatcagttgaatagttatgcattaccatcccatggttgatcatttgatctgcaaatctgatgcacaaactatgtcgatattgagtgactgatgtttagtgttttcattgggtgaagaaaaatgtcagacaaatattaccaatttaccatgtcactgtcacacagggtgcattcagtcccttcccattgaaaaactcagtagctaggttgagatgttgtggtgcttgctcgagttttacctactgtgttatcagttatgaaaaggcagaatatttgtccatgtgtccatggatttaggaagcataccaggctgatggtatgttggtaacctctggtgccaacaattatgctaatgtttcattacttccctgcttaaagaggattactctaaaatttctccttccaatgtcttgaactcttgatcactattcttgaattcttcttttgtcactgtggtgatttggacatttggtataaagttaattgcattggctgtgttaaaaggaactcctattctttattcaaatatggaccatgatcataaatttgtactttccttttttgctactttaaagtttaacggccttctgcaggtaaccatttatccttctgtcaaagccccagttgaatactcaatgcaggcttcatctggagattacatactctggaacactttaggaaaatgtccttctgctgctttgcctaaataattatgaataccgatggatgttcatcaccggacatattcatgggcgcgtgttctttgccgtacagaacctacagtatggttccccaattgatctctactcacatcaccagacctatgctcaaagtttttgaattttgttcaggagttattgtttcaagggaaaaaaaggaacccaacaattctggatatatctatgtcagactctggtattctaaacttgagttcatgattgggtgcaataccgttttcgagaaaaaaattgattgggtgcaatattgaagccatgaccttattgggcaataaaattccatttcgtaggattactagcagcatgttgagataacttccatgtcaggaaatatggtactatatcagcaagaaaaaaccaactcattgtccacaaacatgagacttggcatgataaatctgtatgattactggtgattgagcccaaacaggtcccaattttctgggcctccttctctaggttgttagatagagatgtttcatctttatttattttgtcagtccttgacagaggaatgtcatgttgaaggtccattgaaccgagacattttcttttgctaatgtcatgcatgatgccattgagatagatgatgtaatattcggattgcattgaaaggaataacatgaccggcc

SEQ ID NO: 17474 - DNA, 1762 bp, Oryza sativa
  ref <308>: DATABASE ACCESSION NUMBER: AK067916
  ref <309>: DATABASE ENTRY DATE: 2001-12-06
gtttttccctccctttagctagtagtatagcttcctcacctcgccggccaccgctccatcgctgccgtgccggcgcgccaccgtgagatctctctcccccgacattctctcggagacacagagagagcagcagggacaaggaatcggacgaacagtttgtgtcagagagagagaatagacgagagctcggatgcaacgcaagagatcggattccatgcttgctccgccattgccattccgttcttggcaactttgatccctcgcttgctccggccatccacggcaaccaaccccaaccaggaaggtcaccagcgagaggaggatcggaggaggataagtagccgtgggtgcttgccgcctcgctgatggcccttgccgccgcgccgccatgccccgcaccgcaagaaaagctcgtgtcctcctgctgtcctcgccgccgccgccgccgtcgccgccggtgatgcttcggcgtggcggggtggtgttgttgttggtggtggtggtgctcgggctgctcgccgcgcggtgcgacgggaagaaggtgtcgtcgttcgtggggacgtacggggtgaactacggcaggatcgcggacaacctgccgccgccgacggaggtggtgaagctcctccgcatggcgcggatcaagaacgtgaagatctacgacgccgaccacaccgtcctcgacgcgttccgcgggtcggggctcaacctggtgatcgccgtgaccaacggcgaggtgaaggacatcgcggcgagccccgccaaggccatggactggctgaacgagaacgtccagccctactacccctccacccgcatcgtcggcatcaccgtcggcaacgaggtcctcggcggcgccgacgccggcctcgccgaggccctcatcggcgccgtcgtcaacatccacgacgcgctcaagatgctcggcctcgccaccaagatcgagctcaccacgccccactccgaggccgtgttcgccaactcctacccgccgtcggcgtgcgtgttccgcgacgacctcatggtgtacctcaagccgctgctggacttcttctccaagaccggcgcgccgttctacgtcaacgcctacccgttcctcgcctacatgagcgacccggcgcacatcgacgtcaactacgcgctgttcaagcccaacgccggcatctacgacgccaagacgaggctgcgctacgacaacatgttcgaggcgcaggtggacgcggcctacttcgcgctggaggcggcggggtacccggagatggaggtgagggtggcggagaccgggtgggcgtccgccggcgacgcgacggaggccggcgccgacccggcgaacgcgagggcgtacaacttcaacctcaggaagaggctgttcctgcgcaaggggacgccgtacaggccggggagggtggccaaggcgtacatcttcgcgctgttcaacgagaacctcaagccggggccgaccaccgagcgccattacggcctcttcaagcccgacggcagcgtctcgatcgatctggggttcaagggcctcgtcccttcgtcgtcgttgccatcgtcgtcaattatctcattcaagagagctcgagaaaggggatggatggcgcttgtacagtactcggctacacttctgtcatgtacattcatttttctagttttaagttagtgatctgattacaaccagattaattagttactaactgtcaatcgatccgtcatgcccatgtgaaaaaaaaatattcgttctttggatgcaaattccacg

SEQ ID NO: 17475 - DNA, 1287 bp, Oryza sativa
  ref <308>: DATABASE ACCESSION NUMBER: AK067917
  ref <309>: DATABASE ENTRY DATE: 2001-12-06
gactttgctttgcttccggtctccggtctcctcctccaaactccggtcggtctccggcgcggcgcagccgagcccccaccatacgacgcggggaggcagacgacggggcgccgctgctgctgcccggggagccaccgccggtcgccgccgcagcagcagcagcagcgtgttcagaggagaagggggcagcaggtaccttggggctctgccgcatgccgctgtgggggacaggctcgtccgcggcgtccgcggcggcggagggcagcgcggccggaggggatggggcggcccgctcgtcgtccggcggcgccgcggtgatccggtcgctgctccccacccgccgccgcctccgcctcgacccgccatccaagctcttcttcccttatgagcctgggaagcaagtccggagtgctgtcaagatcaagaacatcagcaagtctcatgtagcatttaagttccaaacaacagcaccgaagagttgcttcatgggcctccaggtggtatacttgctccaggagagagcatcatagctacagtgttcaagtttgtggagcatcctgagaataatgagaagccattagatcagaagtgcaaggttaagttcaagattgtcagtctgaaggtcaaaggacctatggagtatgtcccagaactgtttgatgagcagaaaaaccaggtagcagttgagcaaattctgcgtgttgtattcttggacgctgagcgtcaaaccccacaaatggacaagctcaagcgccagcttgctgaagcagaggcagcacttgaagcacgcaagaaacctccagaggacaccggcccccgcattgttggtgaaggccttgtaattgatgaatggaaggagcgaagagagagataccttgctcgtcagcagattgaaggggttgattcagcgtagacacggcaccatgaactgtaaaccattggttgcttgaacatatcgttttatcgtcgccacacatccttctgtccatggttttttcagtttttacaaaggttctgcttggaacaagagtgaggctttgtgtaattaggatttgagcttcatgctgcacttcattcctgggtctacatgtagatagccagtcactgcttgataataatattttctatgctagatcatgtacttggggttgtggacttagacgtgtggatgcgatacatttcttaggtgatgttcccatcaatattgaatgtaatgttgtctgaacgtgctcttcaaagtgataaaatgaaagctctcctatcatgttactctatttcttagatctg

SEQ ID NO: 17476 - DNA, 1322 bp, Oryza sativa
  ref <308>: DATABASE ACCESSION NUMBER: AK067918
  ref <309>: DATABASE ENTRY DATE: 2001-12-06
gatccgatagcgcgcgtccaacgagcgccactccagccatggcggtccacccgctgctccgccttctcctcctccggccaccgccaccgccgccgccgccgcctcccaactcaccacccttcgccaccacacgccgcgcttcctccgcctccgccgccgccgcagcggcgctcctcctcctcgcggcctcccctcggccgcgccccgcccgcgccgaccccggcggcggaggcggcgaggacatcgacgaggcccgcgttgtgcgcctcttccaggaggcgtcgccgtcggtggtgttcatcaaggacctcgtcgtcgggcggacgccgggacggggaggcgggcaagcggtggaggcggaggacggcgaggaggggggcgccacggtggaggggaccggctctgggttcgtctgggacaccgcgggccacattgtgacaaattaccatgtggttgcaaaattagctggggatggatctgcatttcatcgctgcaagtgtttcctttaggtgttattggaggattctagtgggaatagttatttgaaggaaggaaggctagtagggtgtgatccatcgtatgatcttgctgttctgaaggttgatgttgatggtgataagttgaggcctgctctgattggaacatcaaagggcttgcgagttgggcagagctgctttgccattggtaacccttatggatatgagcacaccctaactactggggtggttagtggattggggagggagataccatctcccaatgggaggccgattcgtggggctatacagacagatgctgctataaattctggtaactcaggtggcccactaattgactcatatggtcatgtaattggagtaaatacagctacattcacacgtaaaggaactgggatctcctccggggtaaacttcgccattcccatcgacactgttgtacagtcagtccctaacctcattgtgtatggaacatctgtgagcaataggttttgattcttctgtagtacattatccgctagtaaatgcaaggtctccctctgccatgttgattgctctgaaatatatatacttctgctgctactcggatcagtgcattcaaaagaacatctgcttaatggtgatcgtactagaaactttagagaacaaattaaaacgaagccggagccggagttcagtataaaccagtaaggaagaaactaacatatttttggacatgctctggtaattcctctgttgctgaactgatccaatatccatgaagcatttgctgctgaatgctggcttcaaggaaaggaattatcagatgagcctgattacactatt

SEQ ID NO: 17477 - DNA, 1638 bp, Oryza sativa
  ref <308>: DATABASE ACCESSION NUMBER: AK067919
  ref <309>: DATABASE ENTRY DATE: 2001-12-06
gattaacctctaaaccataaagtccccccgtctcatgtcgtctcatcactcacttataatcacccccatccacttaatcacgctctcaacgctgctgtgtcacgtcacgtcacgcgcggctccgtaataagaccaccaacctcctcctcctccctcccacgtttggagctctcgtctcgtctcgcggcctcgagccctcgaccaaccaaccacccgcttcttctctcccgtctcccgaaacctccgagagctcagaagaaaaaagaagaaaaaaaagagaaaaaaaactggtggaaactggaaggtttgcggcggaaacgagggggagggatggtggcgaggagggcgtaggcggggggtgggggtgaggcggatgatggcgtcgagggtgatggcgtcgtcgtcgccgtcgcacacggcatcggatctcgcgcggttcgcggcggggaggggtgggggcgggagcgcggggctggggtcgatgaacgtggaggagatcctccgcggcatctacgccgacatgccgacgccggcgctgcccctcgtcggcggtgacaggccgatgtcgccgctcccggcgccggatgtcgccgccgcgccgcggacggcggaggaggtctggaaggagataactggtgcgggcgtcgccgccgccgccggcggcgtggtgccccctgctgctgctgctgctgctgccccggccgtcgtcgctggcgctggcgctggcaccggcgcggagatgacgctggaggactttctggcgagggagggcgcggtgaaggaagacgaggctgtggtcaccgatccctcggcggccaaggggcaggtggtgatggggttcctgaacggggcagaggtcaccggaggcgtcaccggcggcaggagcaggaagaggcacctgatggatccgatggaccgcgccgcgatgcagcggcagaagcgaatgatcaaaaatcgcgagtcggcggcgaggtcacgggagaggaagcaggcctatattgctgagctcgagtcgctggtcacgcaactcgaggaggagaacgccaagatgttcaaagaacaggaggagcaacatcagaaacgacttaaagagctcaaggaaatggttgttccagtcatcattaggaaaacgtcagcacgagatcttagaagaacaaactcgatggagtggtagacgtgagccaagctcagttgccatccccatacagtttatgtagcatttgctcctgttttgtcaattcttctgttttatcggcagtagcctagttgcggtgaatacatgagtatttaggtgacacgaagcttaaatgtctggagtcatatgctacggaggggagagtgcgtacgagctacaaaagcaatcatatgtgtagggaggggagagtgcatatgagctataaaagccatgttccaatttgtcgcgggagtgtattctgtcccatttgttgtctgtttcattttcagtttaacaattaggtgtagtgaggaagaattacgagtactgagtagtactaaacagggtgactctaggtatgctgatatgatatctagttaggcattacttctgattctctgtttggtgccacgactcaaattgtctgtacatacacgttggatgtaaagtcacattatcaagtg

SEQ ID NO: 17478 - DNA, 1943 bp, Oryza sativa
  ref <308>: DATABASE ACCESSION NUMBER: AK067920
  ref <309>: DATABASE ENTRY DATE: 2001-12-06
gctggcgggagcaccagttggtcccgtggacggtgtttttgggtggaaggaggatatcactgcgcgcttcgagcaggtgatgcgccttccacacctaggaccgaccaacacccttcctccgtactctacagtcgggcctagcaaggcttggttgctccagttcactgcggaccttctgcaccctgacgctgatgattactcggtccgacgctcccttgaggcgtacctgttgtggttgttcgggtgggtgatgttcactagcacccacgggcacgctgtggacttccggctggtccactacgcacggtccatcgcggatgctcagccacaggacgtgccgcagtggagctggggttctgccgtgctagcagccacgtaccgtgccctctgtgaggcgtgcacgaagactgacgcgggagcgatcatcgctggctgccctatgttgcttcagctttgggcagccgagaggtttgccataggtcgaccagtggtggacagcgcaccctacggggttggtcgcagcgcgcagtggccagaggacggtcccacgatggggacttactggtgtcgacgtgggcgtcgttacgctcacgtccaggtgagacgtggttacccggacttcgtgttcgagtttgaccgtctccagccgagcgacgtcatctgggagccgtacacagaagaggccgtcgctgcgagagcaccgctaggactttcgtccttgtgcacacgcgaccaggcttactggctcaccatcctgccgatggtgttcgacattttcgttgagcctcactgcccgcagcgtgtgatgagacagttcggacttaggcaggtgtttccgggcaacgtgcagccgaccgtcctccctgccgaccactcgttgactcgacggggacagctagcaggcgcactttgggctccacgtgtacagcagtacgttgacgactgggtgttagctacagaggaggtgatcaacgagctcttcccacacacggaggagaactaccgtgactaccttcgttggtaccttcctcgcactcgtgcgcgtgtgaccttcactccagacgccccagagccgcacgttgccgctgtcacggacgcgtatcccacgcaccgtgaccgagactacttcgtggcggctgatgacgcacgggatatcagtgccgatatcaccgcagtccaagtgaggttgaacagaggtttgcacttgactgacgttgagcagagggtgaccttctcctgtcgcagcgccgtggacgtcgtacctccagctggtccggtacaaccacggcctcgcgcgcctaccgtcggagcaggacctcgacctacggcacctgtttcgcacggacctcgtttgccttcaagcgcccctagcttcggagcagtgcgacctacagcaccggtttcgcacggacctcgtctgccttcgagcgcgttcgcaggcacgaccggcgcttccgcgagctccgcaggggcgttcgccacctcttcgggcgcgttcgccagctcttcctctcacggagcgtcgatccctcgcccacacgcaggatttgcagccgggatcttcggtactagggcctcttcgtctcacgccggtaggactggtcctactagccagttctacgacgacgacttgcacggtgcacaccaccacgacgtactaggctcctctcagcttggaggagctccagaggcgcacactcaggagcagccagaggtcacacctgtacaggcaggacgggttggccgtgccgtacccccggaccgactcacgtactcccaggggcacattagggcgcagggtaggagggacaggggtaagaggcctcgtcagtagtgttctacctcttcagtccttatgtgaccgtttcttttgtcttacaaacttgtaaagcagtactacttttgctattactactgcagtactacttgtgtttgtctcgtct

SEQ ID NO: 17479 - DNA, 2115 bp, Oryza sativa
  ref <308>: DATABASE ACCESSION NUMBER: AK067921
  ref <309>: DATABASE ENTRY DATE: 2001-12-06
gtcatatccgaacgacgccggaaatagcaaaaaaaaaaagaaaagaaaaagaaaaagaaaactcgccgccgccgccgcggccgcgcccccacctcgatctcccgcgtcgccaccccgaacgccgcgccgccgatgctgccgccccgcctccgccgccctgccgccggcgacctctgctgacgagcatggccgccgcggcccccgccggcgcccagaaccgctgcgtcttcgtcgggaacattccttacgatgcgacggaggagcagctcgtgcagatttgcgaggaagtcggccctgtggtctcattcagattggttattgataaagaaacagggaagccaaagggttatgggttttgtgagtacaaggatgaggagactgctctaagtgcacgccggaaccttcaaggttatgaaattaatggccgtcagttacgtgttgattttgctgaaaatgggaggaatgctgacagaaacagagaaaagggtcgtggaggacctggaatggcatccagtgttgatactcagaaacaattagctgggactccggttgtaggcgatacaggtcttcatcagccagttggtcttccatcggctattcatgctgcatctgtgatggctggtattcttggaggatctcaaactgcaaatgttcaaaatggtttacctgtccagtatgggcttggaaatgaccctcttactcattatttggccagaatgtcaaagcaccagttgtatgaaatcatgtctgagttgaagtccctaactagtcaaaataaggatgttgccaacaaactgctgcaaggaattccacagctgtcaaaggccctatttcagtcacaaataatgcttggaatggtgacgccccagatgatgcagatggcaaagagccaacagccctctagctccttggcacaatcatcatctcacataagcgaaccatttccacagccagatgctatgatatcaagtgttccaagaccttctgcaagcttgccaaacccaaatgtcctgcaggacccttctgcacagctgcataattttcctcagtatccgcattcatctcagcctgcgggcacaatatttccacatggaagtcagtctggggtgggcatacatcctccaattgtatctcaactccttggtgcctcttccagtgttcctcctctaccccttgctacctcaggaagcctgatatcgcaggttcagcccccatttatgccacatcaccctaggccaccagctatgccagcgggtatgcaacaactaccattgactcatccacatgttccccaggtacctgctatacctgatatagcacagaaggaaatgaggtttcctgagcaagcaaatcgttcgacggagtttgctcatcatccaaagttgcgaaaattggaggatggaacatccacacctggaattgtaaacaacaatccagctgtttatcctgctccatcccaaggaatgctccctggtggaccatcagggagctataattctgctgctgttagcttccagcagccagagaacgaagtgcctcagctcacacccgatgttgagtcggctcttctgcagcaagtcctacaactgacacctgagcagcttagttcgttgccagtagagcaacaacagcaggtgattcagcttcaaaagatgctatcggctggtaaataacccccatctgaatcagcataccaaattgttgatcaagctatacagagttgtggaaaaaatggtacatttgtgaagaagaaactgggcgcatatgtcaacggttgattttgccaagccacaccaccacacttgtaactttgaaaattgttggcatttgggggccattagttttgctaaggagcattctttggagataaaatgtgatgggaaaaggcctcttattgtccatcacttatgtatcattatagaaaaaaagaataatctgtatccatttttctcatgtaatctgtagtgcaagaacaattttgtctttagaactctcttaaaagtagtccagagctgtttagtttgctgtgtaatctcccagcatcttactttctctgtagctgtttcttctctcccggactacatgttttgaagttagttgctcagatattcgatt

SEQ ID NO: 17480 - DNA, 1570 bp, Oryza sativa
  ref <308>: DATABASE ACCESSION NUMBER: AK067922
  ref <309>: DATABASE ENTRY DATE: 2001-12-06
gcattatacctttatccccttcatttctgttccatttctcatccatcgcgcgtcgtctccacctttgttgcttgtgccaccaagctatctcctcctctcctctctactagtgcttctgcttgctcgatcagcagtgagcttcaagctagctagcaagcatggtggagactagtacatcccttgtgaaattagagcaagatggcagcttgttcttgcctccaggcttcagattccatcccacagatgcggaggtaatcttgagctacctcctgcagaaattcctcaaccctagcttcacctccttgccaatcggcgaggtcgacctcaacaagtgcgagccatgggatctcccaagcaaggcgaagatgggggagaaagaatggtacttcttcagccacaaggacatgaaatacccgacggggatgcgaaccaaccgagccaccaaggagggatactggaaggccaccggcaaggacagggagatcttcaacctgcagcctaccagctatggaggcagcagcaacaacaagaataataagcagctggttgggatgaagaagacgcttgtgttctacatggggagagctcccaagggcaccaagaccaactgggtgatgcacgagttccgtctccacgccaacctccacaacgacaacccgaaccttcgtctcaacctcaaggatgagtgggttgtgtgcaaggtattccacaagaagggagacgatcgcgaagccatcaacaagcagcaggcacaggctgcagctgttgatcagtactctgccggaacacccaacaacggcagctccgtcgaagccggcgacgacgacgacgacttgttccagctcgactccatcatcgaccccagcatctacttcagcaactcatcagctgccaacatcttgtcggcgccgcccaacatgtccaattccgtcgtcgctgccaactacggtgcaagtacgacgacgactggtactgctagtgctggtagcttccagcagcagccaaactactgcagcttgatcaacaaaagcatcagcagcagcaatgtctcctcttggaataatatgcctccacctcctcctgtagctgaaggaggagtccatggaattggaagcagctacagcttgcagcaccaggcagcaatggtgaaagccctacgagatgtcattcgtctcccaaatcctcttggcatgccgcagtacaagttagatgatgcttatctatgggactcatcgtaatagctagtgctgctgctgctgctgcttaattacgtgctgagaatttttggtgctcgatcggctagctacggcactactgaattgagcatgtgcctggatactttgcatggtcgtttggtcatcgaattattaggaatatactatatagctatacattcgtgcaattttgttgattgctttgttgtttagttttggtcttctgtacaaagatcatgacattttgcttcgtgagtttcttgctggtaatgctgattgatagatgttctcttgcggcacatatttttggaacttgctatataatactctagcctttaatttggtggcatttgtgg

SEQ ID NO: 17481 - DNA, 1531 bp, Oryza sativa
  ref <308>: DATABASE ACCESSION NUMBER: AK067923
  ref <309>: DATABASE ENTRY DATE: 2001-12-06
gagcggcatgactttccgcgtagtttctcttcttcttgcagagagagattatcctctttccccttccaccgccactgcgccgcaattcgccttcgctgcgggcatctgaagccgaagcaggacaggtacgcgctccgcacgtcgccgcagtggctcggcccgcagatcgaggtcatccgcgccgccaccaagtccatcgagcgcgaggtcaactccgtgaacgacaacccggtgatcgacgtccaccgcggcaaggcgctccacggcggcaacttccagggcacccccatcggtgtgtccatggacaacgcccgtctcgccatcgccaacatcggcaagctcatgttcgcgcagttctccgagctcgtgaacgagttctacaacaacgggctgacctccaacctggccggcagccgcaacccgagcttggactacgggttcaagggcaccgagatcgccatggcctcctactgctctgagctccagtacctcgccaaccccatcaccaaccatgtccagagcgcggagcagcacaaccaggacgtgaactcgctgggtctcgtctcggccaggaagaccctggaggcggtggacatcctcaagctcatgacctccacctacatcgtcgccctgtgccaggccgtcgaccttcgccacctcgaggagaacatcaagagctccgtcaagaactgcgtcacccaggtggccaagaaggtgctcaccatgaaccccaccggcgacctctccagcgcgcgcttcagcgagaagaacctcctcaccgccatcgaccgcgaggccgtgttcagctatgccgacgacccgtgcagcgccaactacccgctcatgcagaagctccgcgccgtgctcgtcgagcacgccctcaccagcggcgacgccgagcccgaggcctccgtgttctccaagatcaccaagttcgaggaggagctccgctctgcgctgccccgggagatcgaggccgcccgcgtcgccgtcgccaacggcaccgcccccgtcgccaaccggatcgtcgagagccggtcgttcccgctctaccgcttcgtccgcgaggagctcggctgcgtattcctcaccggcgagaagctcaagtcccccggcggggagtgcaacaaggtgttcctcggcatcagccagggcaagctcatcgaccccatgctcgactgcctcaaggagtggaacggcgagccccttcccatcaactaagccaagatccaatcgccattgccattgccatacacccatcatcgaggaggagaggagactaaaaataaaagaaaacgaaccgcttcgtgtatcttcagacaaaaaagaccctgtattttcttcgttcgttgccgtttggtttatagtgatctcgtgttctttgtgttagctgctctgctcagcttgccagccatggcggcaaagcaagcggcttttctaagatattgtcgctaaactgtattttggggtgaaagtattgctactcgattccatccttaaaaagttgtggtaatagaaatgttttgatcct

SEQ ID NO: 17482 - DNA, 769 bp, Oryza sativa
  ref <308>: DATABASE ACCESSION NUMBER: AK067924
  ref <309>: DATABASE ENTRY DATE: 2001-12-06
agggggcactcagccagtaggcagcagctgcaacaatggcggatcaccggaagatcaccagtgatgaggaggaggcggcggtgaagccgacgaggagcttccggtacgaggactacagcaccaggagggtgttcctgcggagctaccctctccagtgggactgggcgtcgccggcgccgggggagaaggagaagcagcagcagcagcagcaggtgcagggcgtcgtcgccggcggcgacggggaggaggatgacgatgagtacggcggaggaggaggagacgagcgcggcgggaggaggtggcggcggcaggtggcggtggcggtggtggagtggggggaggagaagctgctcctgctccggcgggtcaagaagaggctggcgctctacctcatcggctgccactacgccggccaccgcgccgcgctgccgttcaagtcctcctccgcctcctgcaccgccgccatgctcgcctcctcccgctgatcgatcgatcggccgcgccatggcggacatgcccatacccaccagctagctttgcaatcatcggtcggtcgatctacacaggttaatttcgccatagctttcgaatctccacgtacgctgctctgtttatctgcttcgaggatatgcctgaaaattcatcggtagaaacaacgaacatccgaacatggcctgtctgtacgtgtatgttagtacaggtaattaattaatgtaataagaagttcagagcttgtaatgggtgctggttgtgtacatgtaaattcttc

SEQ ID NO: 17483 - DNA, 2737 bp, Oryza sativa
  ref <308>: DATABASE ACCESSION NUMBER: AK067925
  ref <309>: DATABASE ENTRY DATE: 2001-12-06
gaagtgcaggtaaagcttgcgtgttctatccaatctttcttctttcgatggttgcttgtagagcgatagttgcttgtaaactgccatccgattcgtcatcctggctgttgacctgtgttattccagtgatctatgaaacgatcgatctcgtaaaacttaagtttctttctttctttctctgtttgcttagttctgaaattacttgctcctgcatgctccatttcttagaggagtgcaattgcagcactactatgcaaaaagcttgtgccctcttttggagctgttctcaacaattggtcccatcatccttgtcatactgatccttaggagctcatatccaagttgtccacttgtggttttggatgatctcatcagaatcggctactaattagtactccaggtttgacttggtctggcctatgtatatctctggtacggactgtttctattgggaacaagtcgcgtcttgcacatggtatggagcaggtgttcctttcatttgcgaataaacctacatgtctatgtactgaaaatgtcaatttttgttaggttggtcatgatattcccagggacaagatcatggttttgtttatagggctattctactactgaagaagttttataaccagccactctgtatttttagttagcttaatattttcttgcaaaattgtgatcttgtagaacacagtggaaatggagttcttcactgagtatggagaagcaagccagtaccagatccaggaagtcattggcaaaggaagttatggagtagttgctgctgcagtagatacccgcacgggtgagcgggttgcaatcaagaagatcaatgatgtgtttgagcatgtatcagacgctacgcgcatattgcgtgagatcaagctccttcgtctgctccgtcacccagacatagttgagatcaaacacattatgcttcccccttctcgaagggagttccaagatatttatgttgtttttgagctcatggaatcagatctccatcaagtcatcagagcgaacgatgacctcaccccggagcactaccagtttttcctgtaccaacttctccgtgctctcaagtacatccatgcagctaatgtatttcatcgcgatctaaagcccaagaatatactggcaaactcagactgcaaattgaaaatatgtgatttcggacttgcccgagcatcattcaatgatgccccttcagcaatattttggacggattatgttgcaacgaggtggtaccgagcacctgaattatgtggctcatttttctccaaatacactcctgcaattgatatttggagtattgggtgcatatttgctgaacttctcactgggagaccactatttcctgggaagaatgttgtgcaccaattagatattataacagatcttcttggaactccatcatcagaaaccttatccaggattcgaaatgagaaggccaggagatacttgagcaccatgcggaaaaaacatgctgtccccttctctcagaagttccgcaatactgaccccttggctcttcgtctgctagagcgtttactggcatttgatcctaaagatcggtcttcagctgaagaagctttggctgatccgtacttcgcaagtcttgctaatgtggaacgtgagccctcaagacatccaatctcaaaacttgagtttgaattcgagagacggaagctgacaaaagatgatgttagagaattaatttatcgagagattttggagtatcacccacagatgctgcaagagtatatgaaaggtggagagcagattagcttcctctatccaagtggggttgatcgcttcaaacgacagtttgcacaccttgaggagaactacagcaaaggagaaagaggttctccactgcagaggaagcatgcttctttaccgagggagagagtaggtgtatcaaaggatggttataaccaacaaaacaccaatgaccaagagaggagtgcagattccgttgcccgcactacagtaagccctccaatgtcacaagatgcacaacaacatggatctgctggtcaaaatggtgtgacatccacagacttgagttcgaggagctatctgaagagtgcaagcattagtgcttccaagtgtgtcgctgtcaaggacaataaagaaccagaggatgattacatctctgaagaaatggaagggtcggtcgatggattgtctgaacaagtctccaggatgcactcctagtgcacaacgatgacgatgatcagtgcaagattctgtgaggcgcaccagatgctgataatttccaagcagaatgctgcactgcaagtttggactttggacaatgcaagtatgcaacagccagcccgagatgattggcatcttcttatgctcatccatgttcacatattcttcttgccattgtgctgtctgtcactacaggacccctgcatggattaatgtattatccctctgatgtaacactagattagtccatctgtccatggaggaatgaatagcaagcagccagcttgtgcatcatgtgggcatgttcattttccagtgagatctagtcatatccatgctttttttgtaatggtatatgaaacagtttatcagtgagactctggtccattcctctttgaagaactgctgagacagtgatccattcctctttgaagaactgttcattttcagtacattaagcctagtaaagttcagatgtttgagttcggtgcttaataatcatgtcacacgaattttc

SEQ ID NO: 17484 - DNA, 1703 bp, Oryza sativa
  ref <308>: DATABASE ACCESSION NUMBER: AK067926
  ref <309>: DATABASE ENTRY DATE: 2001-12-06
ggcctcggccgcacccgcactccaaccagcgcgagcggcgtcctcctcctccgtcggcgtcggcggcggcggcgacggccatggacttcgggtacgtcggcgtggggcaggggagctcgtcgtcgtcgtcgtcggcgtcgtgccgagcggcggacgtggcggcgtggggatcctccacccagcagcagcagaagcggcagcggtgccagggttcttctgatgaccaagttggattgagcacaagtaattctttgcaaatgtcagaaccagagcctcgagattttgataatggagaaaatgaggaagaagattactatctggacgaggacgattgcatttatgatgatggcgatggatatgattatgaatttgatggcggtgactacttcaaccaacgtcttgctgataaatttgatgatttggatttgcctccaggcgtggaggctactgtaccttggcttcagaaaattataactaacgaagagcaaagcagttccaaattgacagttgaagatgaaagcgcaaataaaagtgcaaataaatctcagttgttcaaacagtttgacactgttaaaaatttctctgatcatcattatgcagcaacatcaggggatgtgacaaagagagactgggtgaagaggattcagcatgactggaaacttttggagaaagatctaccagcatctatttatgtccgtgttgctgaagatagaatggaccttcttagggctgctattatcggacctaagggaacaccgtaccacgatgggctcttcttctttgatattcaatttagtaactcttaccctgctaatcctccatcagtatactaccactctggcggactacggattaacccaaacttatacaataatggaaaagtatgccttagtcttcttggtacctgggcaggtagtggttgtgagacgtggaatccatctcagtcgaccatgctacaagtgctcgtctccattcaagctctcattttgaatgagaagccctacttcaatgagccaggatatgcatcctacgccaatagtgtatctggagagcggattgctatggagtataacgacaacacatttctgcactcatgcaggacgatgctctactcacttcggcggcctccagagcacttcgcagaccttgttaccagccacttcagggagcgcgggcacaccatcctggcagcatgcaggtactacatggaaggccacaaggtcggatcggtggtccccgaagagaaggagccggagtacggcgacgcgggagcatccaccagcagcgccagcgcccgcgccgccgccgccgctctgaagccgcggccggacaaggtggattccgtcagtagacgccccacgttcaacgacaacctcaagacgctgttcgaggagctcctgatggagttcaacgtgaagggcgccgacacggccaagttcctcgccgagaaggtgaagaagagctctggtgcaacaactactgcgcctgtaggaggcgcccgttatgcagcagaagtggtggatgagtggatggattagtctgctttgcctaactgcagagaagttaatatctttctctctcttttttatttcgtagtacataattagcttatggttgctaggactggactgggctgaacctgttgaccaagatgatgaattaaatagatatatgcctatccatctcaaggctcttaagacatc

SEQ ID NO: 17485 - DNA, 2616 bp, Oryza sativa
  ref <308>: DATABASE ACCESSION NUMBER: AK067927
  ref <309>: DATABASE ENTRY DATE: 2001-12-06
gaaccttcctcctccctgtgcgggaacagtggctaccaaaagcggcagaagccgcggcaaggcaaggcccccggccccgccacgccacggtggtggagcccggagccccccctccttctccctcctcctctcgtcgcttccgccttggctcgtcttgtgcctacgcgagagccagagattgggggggaaggttgcattcattgatgccgccgcggcgccgctgctgcttttaacgcgctcgtcgtcggcgtcgtcggctgccctccaccgcaatcaaggccaatttggcgcgcggcgaggaggaggagggaggaggagatggggattgacctgaacacggtggaggaggaagcggaggagggggcggcgtcgagctgcgcgcggacgcggcgacggacgaggtgtacgcgcggctcgcgttggtggcggagggcgagatgttgcagcggaacttccgcgagggtggaggtgaagatggtgcaggggagatggagggttgtgatgcagaaaagaagccccggatgccacacatgttctgcaaaactctcacagcatctgatacaagcacccatggaggtttctctgttcctcgccgggctgcagaggactgtttcccacctttggactataagacagttagaccttctcaagagctgattgccgtggacttacatggcacacaatggaagttcaggcatatttatagaggccagcctcgtaggcatcttctaacgattggatggagctcatttgtcaataggaaaaaactagtctcaggggatgctgtcttgtttcttagaggtgatgatggccgactaagattgggtgtaaggagagcagttcaacttagaaatgaggccctctttgaacctgtcaacagcagcgattcaaagctacgcattctatcttctgttgccagttccttggaaaataaaagtgttttccacatttgtttcaacccaaggagtggtgcgtcagaattcattgtaccgtattggagattattgaagagcctgaaccatccattttccattggaatgaggttcagagtttgctatgagagtgaagatgctaatgagaggtccgctggattaatttcaggcattagtgaagttgaccccataagatggcctggatcaagatggaaatgcctactggtaagatgggatgatagtacagatagcagccaccaaaacagagtttctccatgggagatcgagagagttggtggcagtgtctcggttacccattccttgtcatctgggtctaagcgaaccaaattgcactttcctcaaggcagtttggatactccatttcttaatggaaatggtcacccggactccatgggaactgaaaatttccacagggtcttgcaaggtcaagaatttaggggttctaggtcccatggtgttgtatgctctgaatcacctggtgtaccaaactttcaatctcctgacaataggagattttctgctgatatgcggggctacatgatgccagcaagtgggcccccacagcggaacacagagtttacttatcagcccataggcttcagtgagtctcttggattcccagaggtcttgcaaggtcaagaaatgtcacaagtagttcctttgttccgaggagctacttttggcgctcgtacacagaatgacagagttgtctctgctaattctgtgcatagatcagctgcacagagtggattgctagcttcaactctagggcatcccatctcgcagtttactctgtcatcgtcaaaggtatcttctccctcgtcggttctgatgtttaaccaagcgacagctccaaatcatgaaacagtaagcggaaccaacaacaaaggtatgcatgtcagccagtttgcttcccaggagatgctctcagaaactgtaacctggcccggcacacaacgtcaaacgccgagcgaaatcacgagcaaccagttcgccctggcgagaatcccagctcctccaagcggagctgaatccggattgcccaagagggatgccgggagaagcagctgcagactgtttggcttctccctgacaggcaacatgctgggagaagatggagaaggcctagatgatggagccattgaagctggttgcgaaaacccgcccgtgctggagctgtttgggcacagccattctactcccggtgctcttcatgccctgtgtgctgctgctcccctgggaatgtgatgctgctgcagtactgatggtttgctctggggaaatggtcgttgcatcaagctacctagctgaaacgaactgaataatgtgttagctacttcctagatttcttcggcacattcttgtaaggattgcagcggcgccatttgtatgttggtgccacatgatgcatgtaagactgtaactgtaccttgaaatttcggctgtttgtccgtagcttatgacatgaagactatgcagaagcagatcctcgaacttaactacacgtagcatgctgtatgactatacgagtcaactgcacgtgcagttaagttggagtatcctgatggtgttgttttgacagttgtgaagctaggccgctagggtgttacttttcagctacttcaccgaattattattgcaaattatttattttatgtctatc

SEQ ID NO: 17486 - DNA, 2333 bp, Oryza sativa
  ref <308>: DATABASE ACCESSION NUMBER: AK067928
  ref <309>: DATABASE ENTRY DATE: 2001-12-06
gggtgggagggaggagtcgatctggttgtggttcccctcctctcctctctttcttcttcttctccaaatccaatttctccagagagcagaatctctctcaatccaatccatccccgaccccgatcccaaaccctagctagcacgtactccagtagactgcgatgggcgcgccgccgaccagggaatccgaagcccgcgacgaggaggcggaggtgtcccgatcgggtgagcaaggcggcggtgaggcctctacgacgcagcagcagcagcagccggtgcctctgcgccaccagctgctcggcgcctgccgcgccgacgaacgcctcaggcccctcctcactctcaacctctcatgcggcgccgccgaggaccgcttcatctcccacctctcgcagcacttcgaggcgtccgaggtcggcttgctctacaggtgtctctgcgttcccctcgtcgctcttcgcgtcggcaaggtcgaccgccatggtcctctcctctgcccaacgcccatcaggtaatttgggcgtgtgtcataatctctgatatatgaggaaagagaagaggaaagctgagccttggtcttcttccttcatcgagcatgtgcattatctttgctggtgatgatggtcattcggagcaactagctctcctgaacaatgaccatgaagtttcagaagtttgtgttgaagaaatttcagctgataatacaggacgatctttcctcatcaggatttcagaatctaaagttttttactattggtgtgctgagaagtcaaagaaacacgggatggaccttcttgcaaagatgaaaaatctactgcagggaaggccaacactctctgatctcacaggcatctcagattcacgactggatgcttttgccactcatctacacgcttatcttgttgcatcaagtattggagatgttaaatcgctgggatcacttaatgacttcctgggcgcttcaagcccacaagatcaatatttacagccctcatcagttgtttccaagtcttcacgcttctgcacctctgcagctaatgcagcaaaagcaagttctgtctaccaaactagtctgagtcccagatgtggtgcttttaaagatggagtgccaaggatgtcgtgtgcaaagattgctggaagagacaagctgaagcgacgtggggactggctgagctcatcaactggtcctgatgacgcaaatcttttgacaccgaagattgttagctctgattctgccagtgagaagtgtggtggggactgttctgaaaacagtgctaattcacctcctctagacttgcctctttcatttcccttgttgccatctctgtttcctcttgcgactcaatatccacttcctaaggattctacagagcaaccatttaagccttactattgctggtgcccaccatgcccatcttctctgcagtacagtgtaacccctctgcatatgccagttacatctgtagaaccactgcccttgccgcctttgagttctctgctatcaaatgatcagccgccgacttcaacagtttctgcaaagatggatacaactgatctcccgtcacttaatcttccatcgatactgcgtgatcctttacttcacctgccgcttcctacttcaccacttgtatccttgcatggttcacaagttccaacattcacaccattgatgtctgaccccattgtgcatgtcccggtcattgatgtgtgttcctctggccaggcttacctggtgagttgcgggccttctatgtctgcgactgttaccctgctccctagcttgaagcccctgattccagaaacagaatctttggttgagagaagcgctagggaaacactaatgaggcttatagcctcaacaccatctgcaagtaatccccagctggtgaacattctccctgcagtccttactgacgtgcctgaaatgaatgtgaggaaacatcttggtgtccatccaggcgacaggctaagctcatcttgtagcgtcgatgtgattggacctgggtttgccgtcacagaggatgatgcatctgttggagatggggctcacgcaacttttgcggaatatgatgatatcggcgatcagcagcattttcagagcatgtaggtggtaggttgtcgacaaggtactcgttggttgtccagaatattttgaaaggcagttgtatctatatggtaatagcttagcgttgggtttacttttgtgacgctctgcgtactgcctatttgctgtgatgatttagctgctcagtcaaaaacctcattaggttggtcaatgtaattagctgtttgtagtgtattcattcataaaactaaaagcaaactacccagct

SEQ ID NO: 17487 - DNA, 1222 bp, Oryza sativa
  ref <308>: DATABASE ACCESSION NUMBER: AK067929
  ref <309>: DATABASE ENTRY DATE: 2001-12-06
ggatttcctcgccgtcctccgtgacaaccagaccctcatcctcgtcgtagaaaccggaagcagcaagaccacttaggtattgaatgtgcacctttgcctgtacatctccacgttgaactgtaaatgtattttaggttagtcgttattggaaccttcgcgaagacggtgaatcctggtccggtgtctggtttgccccggattcgggaggagtttccgtcgaggtcgagggatttctggggcacaaccaatatctcccgtctccaaggagctcaacacccacgcgcaagaagcatcaatgaccagctctggaccttgatgattgcactaggcttcaatgcagtagtgagcgtgagggtgtcaaacgagatcaggtactaatatggtccttcacatgttattgattcatggagagctttcaagtgagtctgtaaggtgcgcaggatagatgttggtccgggatatcaatgttcctcttccattgctacaggatccatggctttgcagatgcttttgtagcatttgtgggatgatgaaggccttcatttgtacaaattcacataagttgatggcatttcttcattttgcatagtacaaacactactgttatgtgcaaatgaggccatatgaacagttcataaccatgagccttcaattcataataaccagcaaggtaataattaaatttgctctaacatttctgcattttctttcagtaaccgatgtttatcaatgatactcccttcctgtgactcttagcaattagcatgttaccaacaggaagtgtggctttcctatcttttacgcaggttgcactgttgcactaaaccataggactgcatttctgttctcatctgtttgtgttgtttgttcatctctcttgaaaagaggtcacaaatttataataatgcagatctaatcaacaagggagtaaactaccatgagtcttccaagttctctctgaagaaaataacacatttatctgcagtaacaccgtttgtattttgagcacaaattatattcaaattattttagcaattgtttaatttctttgggatatataaattactaatttttaaaaaggatgaatggcatgtgtgcatccccgctgtttatccattgaacggtcataatacatagttgactttatgtaaagatacttaacattgttattggctcatcatttagattcctgcaatcttaatagttccctttgtctgcctct

SEQ ID NO: 17488 - DNA, 1483 bp, Oryza sativa
  ref <308>: DATABASE ACCESSION NUMBER: AK067930
  ref <309>: DATABASE ENTRY DATE: 2001-12-06
gtcattagcggaaaccggcgaactgccaacatcccctgcccccatctggtagctatctcgtcctccgtcctcacccgccgccgccgcgaccgcgagctaaaccacggcaccgccggcgacctcgtggacctcgcctgtcgccacatcatcgctgccgtcgcctactcgcctcccctccccgaccccgacccgatccgctccgctccccatttgtttattccggcgcgtgagctaatcaccgcgaggtccaccgccgccgataacacccaagccaagcgcggtcgcttccgcgtcttgatttcctcctcctcctcctcctcccactcgcgtgcgtacctccgccttattatatagcgctggcctgggcggggcggaagagccaaatggtggcgctgcttcgctcgtgccgccgcctgatcccgcacctgtccgcctgcgccgccgccgcgccgtcgtcgtcatcgtcgtgcgctcctcgggctaggccgatctcgcggggactgcggctgctgccggtggtgctcgcaatggcggggtacagcagcggctccgccgcggaggggaggaggctgctgttcaggcagctgttcgagaaggagagctccacctacacctacctcctcgccgacgtcggggaccccgagaaacccgccgtgttgattgaccctgtggacagaacagttgatagagatctcaatcttatcaaggagttgggcttgaagctagtctatgctatgaatacccatgtgcatgctgatcatgtcactggaacaggattaataaagactaagttacctggagtaaagtccgtgattgcaaaagtaagcaaagcaaaagcagaccattttattgagcatggggacaaaatatacttcggtaacctcttccttgaggtacgatctactcctggccatactgctggctgtgtgacttatgtaacaggtgaaggcgatgatcaaccttcaccaagaatggcttttactggtgatgccttgcttatacgtgcatgtggaaggacagactttcagggaggaagttctgatgagctgtatgagtcggtgcattcgcagattttcacattgccaaaggataccctgctttatcctggccatgactacaaaggtttcacagtaagtactgttgaagaggaggttgcgtataatgctcgactaacaaaggataaggaaacattcaagaaaattatggacaacttgaacttggcctatccaaagatgatcgatgtagccgtgcccgcgaatttgctctgcggtattcaggatcctccaccatccaaggtctgagctgttccggctgaagctttcaagctgttgtgaactcacggtcaactcgagaagctcgcagctatgttgtacattaaataatctgttgttaatttgtaaggcactacttgggaacatttccgcttcatgagatcaacggtaataataataaacagaggctagcttgcctcttgtcttgtgct

SEQ ID NO: 17489 - DNA, 1823 bp, Oryza sativa
  ref <308>: DATABASE ACCESSION NUMBER: AK067931
  ref <309>: DATABASE ENTRY DATE: 2001-12-06
gtctccccccattgccgccgccgcctgcgacggccgcgagctcatcccgagacgacgtctctagctagcatcgagcgttctttctctcctcgggctctcgttgttgagataaggcaaatcaagagagcaaaattttggtggtacatgtggtgattctatgtcgacaaggcgtcatcttgcagtatttaccactgcaagcctcccatggatgacaggaacggccatcaacccgttgttccgggcggcctatcttgcaaaggatggggatagggaggtcaccttggtaatcccctggctttctctgagggaccaagaattggtttacccgaataagattgtgttcggttcgcctttggagcatgaggcctatgttcgtcgctggattgaggagaggatcagtttcagaccttccttcagcatcaaattctaccctgcgaagttctctaaagaactgagaagtattctacctgttggagatatcacagaatgtattccagatgaagtggctgatgttgctgttctggaagaacctgaacatctcaattggtaccaccatgggcgcaaatggaaaaataagttcaggcgagtgataggtgtggttcacacaaattatatagcatatgtgaaaagagaaaagaatggacaagcgattgcctgtttcatgaagtacatgaacacctgggttacccggatttattgccacaagattatcagattgtcaggtgccacccaagatcttcccagatctgttgtgtgcaatgtccatggcgtgaatccaaaatttcttgaggtaggtaaactaaagttgaagcagctgcggaatggggaaatagccttcacaaaaggggcatactatattgggaagatggtgtggagtaaaggatacagggaacttcttgacctgctgtccaaatatcagagcaagttggtgggtttggaagtagatttatatggtagcggagaagattccgacgaagttcgaaaatctgcagaacttctgagtttggccgtgaaggttcacccaggacgtgatcatgcagatcccctgttccatgactataaagtattcatcaaccctagcacaacagatgtggtctgtacaacaactgccgaggcccttgccaatgggaaagattgtcatatgtgccaatcacccttcaaacgagttcttcaagcagttccctaattgccgcacctatgacagtggcgaggaatttgtactaacgctggatgctctagcagagcagcctgctccactgactgacatgcagagtcatgacctatcttgggaggccgcgaccgagagattcatggaagccgcggagctgaaccttcctatctcagcagagccaagaatccatcaaacatccaaggtctctctccctgcttttatgaggactcgtaaactgaaacagagcttggaggatgcatcagtttacctgcatcaagcactctcaggacttgaagtcacccgtcgcgccttcggtgctgttccgaagacgctgcaacctgatgagcagctgtgcaacgatctaggtttggctcccgccaagaaaaagaggttgaaattgaagctgatgacctgatgatgtaacttctcttgagcccctgattgcatcgtgtcatttccttttctgcacattatatccgaggagtatgtatgaatcctaatggaggatcagtgcattttccattagtatgtttacttagttcaggatgtaaattacactacaaatgtaattggactattggagactttggagtactagtactactaacctagtggctttattgaaaatttaaaactgtgatgtgattctgcc

SEQ ID NO: 17490 - DNA, 1299 bp, Oryza sativa
  ref <308>: DATABASE ACCESSION NUMBER: AK067932
  ref <309>: DATABASE ENTRY DATE: 2001-12-06
gggtcgaaagctctaactctagctttgatccatgcatatctatccatcctttctttgatcggtcgcaacgcccagaaactgatcgacgatgcagcagcagcagcatccggcgccgggcgcggagttcgtggcggaccgggacgcggcgcgggcggaggtggagcgtgcactgggcgggtacagcttccgcgacggcggcgcgctgctgctggaggacgccctgacgcacagcgtgcaccccagggacgaggccggcgggcgggccaggcaccagcggctcgagttcctcggcgacgctgcgctcggcctcgccttcgccaccatcttctaccgggacgacccgggcctcgaccagggggacctcacggtgctccgctccgccaacgtctccacccagaagctcgcccgcgtcgccgtccgccggcgcctctatccgctgctccggcgctacaactgcgcccctcaagaccacgaagtcagccgttttaccaagtcagttgaaggcccatatagtggtgaccccattgagggtccaagggtgcttgctgatattgttgaggccattgttggtgccgtctatcttgattccaagcttgatcttgaagtactccagaaggttgcgaagttgctgtgtgagccaattatcaccaaaaaggcattactagaagatcctgagtccatgttgaatgagctagggggagaacatagggaagatttggaaatcaaaatattggcgtggaggaaggtggcaaacgtagtcgatgatggccgggagcaagcgatcacaactagtggacttggcaacggctcagaggatgaggttggaaagcttagaacaataagaatagaagaagcttaacgagcagcacagcaagttacagtaaattggcgaccaggaaccaatcagtgaactagcagcccatatatagtggctggatctgaacttttgtgggtcaggtatggaacatattcatgtattgcgcaggcacttctatgctatgctagctctgaacattgatgcctggaggtttgtttcatggcatgttcactgctagatagtagtagctgtgaaatcaatgtatggctattgaaattgatgcagacctggtactattgatgtctggtaccctggttatcaggccaagcgtgtcctaatcttgtcgagcgatgaacactatagtgtattttgtcttatgtacaatggaggtttgtcatactgaatctgtgtttgtactcaaccaatgtatatgtagaataccatgtaaagtaatattattaaagaatgtgtgatgtttgttc

SEQ ID NO: 17491 - DNA, 1242 bp, Oryza sativa
  misc_feature (498)..(498): "n"=any one base of a, t, c, or g
  ref <308>: DATABASE ACCESSION NUMBER: AK067933
  ref <309>: DATABASE ENTRY DATE: 2001-12-06
gaccccctcctggcttagcttcccttctcactcgcacgcgccgccgccacagagctcagcttagctcgaagctactccgtctcgaggtagctagctagctaagccttcatccatggcgtcaggagaagcagagccactgcagtacacgaccaccgtgctccgagtgtcgatccactgcgagggttgcaagaagaaggtcaagaaggtgctccagaacatcgaaggcgtgtacaaggtgacaatcgacgcggcgaagcagaagctcgacgaggtcgccgccgcgccgccaccagctgctgctccggcgccggccggggagcgcgggaagggcgcggagaagaaggcgaaggaggcggcgaaggaagctgggactgagggctcggagaagaagccggagaaggagaagaaagccgaggcgaagaagccggccaaggccgacgccgccaagaaggagggcgaggtgcccgagaaggagaagggctcgcctgagcctaacanagaatcggccgccgccgccgccgacaaggaggagggcggcgaggagtccggcgggaagaaggggcagaagaagaagaacacgcagaatgacggctgccgcgaggcggacgccgcggcgccggagaagccagctgccaaggcgcaccggccgcacccgcgccgtcgatgcccgctccggcgccaacgctgtcgtcgcgggagcgccctcacggcgggttcccgtactactcgccgaagccggtgatgagctacaatgtggcgcacccgagcgcgagcgtgtcctcgtactacgcgcccacgccggtaatgtccatgcagccgacgcccatgccgccgccgccgcagatgtcgtacggctactcgccgtacccgcccatgatgatgccgccgccgccgccgccggagtacctgtacggcccgccgggcatgcggtcgtcgccgccgcaggagtcttacagcaacatgttcaacgaggagaacccgagctcgtgtagcgtcatgtaatgccgccgccggcgacgatcgccggcgccggacacgggaccgatcgagctgtagttgacggggaggcttctcaatagaagcctctcctctcgtgtggttgctagctagagtggagtactgttaattagatggtcaaacctcttcttgaccagacttttttttctcttcccattttaaaatgctcttagtgcatcatgtaatgagatgagtattttagtacccttaatatcttcttttgtt

SEQ ID NO: 17492 - DNA, 2515 bp, Oryza sativa
  ref <308>: DATABASE ACCESSION NUMBER: AK067934
  ref <309>: DATABASE ENTRY DATE: 2001-12-06
tgtgggatttctctgcacaaaaacacaatccagttcgaaccaaccaaccagcagccctgcccctgcttctcttctttctcttgcccatggccgctgctgctgccttcttctgcgccctgctgttcatctccgtgcagcacggcgttctcggtggctacacgaggaatgatttccctgctgatttcgtctttggagccgccacctcggcgtaccagtatgagggcgctgccgcagaggatggcaggggcgctagcatctgggacacgttcactcatgcagggaaaatgaaggacaaaagtacaggcgatgttgcctcagatgggtaccacaaatacaagggtgatgtcaagctcatgactgaaactggcctagaggcatataggttttccatctcctggtcaaggcttatcccaagtacagccatttctactcaaaatttaactcttgttaacaaagaagtagttccttgttgcttagttgtgatatgcaggtggaaggggagctgtcaaccaacaggggctcaagtactacaataacattatagatgagctaacaaaacgaggaattcaagtccatgtcatgctttaccatctggatctcccgcaagctttggaagatgagtatgctggatggttaagccctagaattgtggaggattttactgcttatgcggatgtgtgcttcagggaatttggtgatagagtttcgcactggactattttggctgaacctaatgtcgctgcacttggaggttatgacacaggagaattcgctccaggacgttgctctgatccttttggagtgaccaaatgtacagtggggaattccagtgtggaaccatatgtagcagctcacaatatgatactaacacatgcagctgttgttagactgtacagagaaaaatatcaaactctgcaaaaggggattgttggtataaacgttctttccttgtggagttatccattaacagactccactgcggatctgcaagcagctcaaagatacaaggatttcacgtacggatggatactgcacccattggtatttggagattacccacaagtaatgaagaaagctatcggttctcgtcttccatccttcagcaaagtccaaactgaactagtcaagggtactctagatttcattggagtaaatcactacttttctctctatgtgagcgatctccctttggcaaaaggagttcgagacttcattgctgatcgatcagtaagctgcagagcttctaaaacggatccatcgtcggggcaggtaagttaatttggtcatcagtaaggttattgagatacattgttgccttttgactttaggttaaggtttattgcaaggggtaaggtttatgataaacaggaaaggtggtaggttaaggtttattgcaaggggtaaggtttattgcacaaacaatggtggcgtcacattctaggagaagatgctacataggatttttctttttgtgacgtggaaaagatatagaagtatgccgtctgttgattaagtctaatatacggcttaatgctatatatatatatttttaaaagagggcaaaaactttgcctcgtatatatggatagaatagggtgaaaaaaatacagattgatatttacatggcttcatcaaaacgaggccagagattaatgctatataattattatacatgtcatctatagggtgaaataattgattatacagatctattatagaaaactaaacatcattgtatcggttgtatatatatgtcatctaaatctgacatgaaaaaaattagacagtaacggtctaaaaccactatttatgctcttatccattattcttttaaagataaagcgagggacaaaaataaagtaaattcgaatatcattactaagacactcttggaattatgtggttcgtcctgttggcagtgactcatcactcatatatctcctctctttattggctgcagcaagccccaacgcggtctatgggtgatccacacggattacaactaatgctacagcacctgaaagagtcctatggtgacttgccaatttatgtccaggagaatgggaaggcatctagcaatgacagtctcgacgacactgacagggtggattacataaagggctacatagagggcgtcctggatgcgaccaggaacggggttaatgcgagaggctacttcgcttggttcttcgtggacatgttcgagctcttgctccggataccagacgcgatacggcctctaccgcgtggatttcgacgacgcggcgctgccgcggcgagcgaagcgttctgctcgctggtaccgtgacttcctcaagagcaagcggcaaccgctgcagattgctcagcagtgaggtttcacgcaacggtctcgctgtcgctgcgatctttgaggaggatgcactagtggtggcaaggggatatggttttaattatgaggtcttgtgtttaatcgtcaacacgtttataatttctttttaaaagttgtttggagaaacgtctccctccaaatctc

SEQ ID NO: 17493 - DNA, 2216 bp, Oryza sativa
  ref <308>: DATABASE ACCESSION NUMBER: AK067935
  ref <309>: DATABASE ENTRY DATE: 2001-12-06
gatttccttttcttccgtttactcgtcgcggtcgcaggggcggggcagcgttgccgcgttcgatataaaccctccccggcagattcgcgatcggtttccgactcctctctcgcgccgagcccgagctaagctgcgcgccattgtagctagctttgatcggcgtcggcttgttggggggaaggggcttgtgtggatctcgcggcggattcaccgagcgattcgcctttttttccgtttgacccgattcggttcggttcgatttcgattcccatccttttggtcgcgggttctgggatctcctccgcccgcgcggcgtgcggcgtccgatcctgcgccgctgccccggcggccctcccatctcggttcgaattcgagctgaagaagaactgatagtagcaagaggtgtcccccctcaattctagctctgaattgcaggaaaagctggtaaaatcttagggtaatgggagtcaagcgttcacagtgaagatttaatagatgaaggcacaccaattgtggcagttacctatcaaggatatgaagtctgctcctctccctcgcggacgaacttctccgaaaaaacatttgtgcatacttgttgtagctttcgtctccattgtaacactgtgggcttatctctatccaccccagcattatacgtctcctatgagagattggttacctgcagagcctgtcagggaattgacggatcaagagagagcctcacaagttgttttcaaacagatcctatcaacacctcctgttaagtcgaagagatcaaaagttgctttcatgttcttaactcctggtacattgccatttgaaagattatgggagaaattttttgagggtcatgagggaagatataccatatatgttcatgcctcaagggagaaaccagaacatgccagtcccttatttattgatcgagacatacgcagtgaaaaggtggtatggggtaagatttccatggttgatgcagagagaaggttgttggcaaatgcactggaagacgttgacaatcagcattttgtgttactctctgacagctgtgtacctttgcacaattttgattatgtgtataactacctgataggaacaaatatcagttttattgattcgtaagtcagtttcttttccaattattttgaggatttatctcaacttccgtttatgtattcacatgttaactcttacactgacttaaacatgggatgacattgtaagcaaagtttcttatattccattttcatatatactgtcagtgacgagtaactttatagtcattattaatactgcttacgctctcctttatttccttggtcagcttttatgatcctggaccacatggaaattttagatattctaaacatatgttacctgaagttagagagagtgacttcaggaagggttcacagtggttctcagtcaagcgtcagcatgcattgatgataattgcggacagtctttactatactaagttcaagcttcattgtaagcctgggatggaagatggtcgcaactgctatgctgacgagcattatttgccaacactattccatatgatagatccaaatggaattgccaactggtctgtgactcatgttgactggtctgaagggaagtggcatccgaaagcttatcgggcaaatgatgttacatacgagcttctgaagaatataacatcaattgacatgagctaccatatcaccagcgatagcaagaaagtggttacgcagaggccttgcttatggaatggagtgaagagaccgtgttacttgtttgcgagaaagttctaccctgaatccataaaccgcctcatgaactcattctcaaattacacccgtttttgagttctgcagagttgcatgggtaccctacactaaaaaaattcctccatactagtggatatataggagatattctgttacaggaatctttgtaaattggaagagaacagcagatttattaacaatagctggtataggaatagggagaggagaaggcatacgccgcagcattagggtggttcagatctccacggtcaggccattgccactcctgaatacaaatttctttaggttcaccttgttttttgctagcctatttctcttgatttctagctgcagattctgtcatgtacatgaagcttattgtataactaggggagaagtcattattgaggcccatttttattgatttatccataaagctttgcc

SEQ ID NO: 17494 - DNA, 1581 bp, Oryza sativa
  ref <308>: DATABASE ACCESSION NUMBER: AK099026
  ref <309>: DATABASE ENTRY DATE: 2002-08-28
gatatttcatcagttcctcgtaagaacagagaactcgagaggttgcgcttcagtgccgcgaagaaaggacgagctattccaccctcccggtcggtgcgtttgcgatgaagaagacggtggttctctaccccggcctcgccgtcggccacctgaaccccatgatggagctcgccgacgtcttcctggaccacggctacgccgtcgccgtggcgctcatcgacccgtcggtcatggagaacgaagccaacctcgccgccgccgtcgcccgcgccgtctcctccaagagctccaccatctccttccacacgctcccgggcatcccggaccctccctcgctcgccttcaacgatcagttcttcaagaactacttcgacctcgtgcgacgccacaacgagcacctccacgacttcctccgctccgtgcggggcctccatgccgtggtcatcgacgcatcgtgcgcccatgcccatgaagccgcgaggaagctgggagtccctgtcttgatgttctacccgtccaacgccggccacctcgccgttaacttgcaggctcctctgcttgttgacgggttcaagaagcatctgggaggagatagtactagtcctgtcgagttcttgggtgttcgacccatgtcggcttctcacttggctggcctttttgggccgattagcgaggtgaacaaggatttcgaggccatgatttttgccggtgcgcgcatgaaggcggagttcgacggaatcctgatcaacacgtccgtgtcgctggaggagcgggcgctgcgagctctcgccgacccgcgctgctgccccgacggcgtggtaatcccgccggtgtacgccgtggggccactggtcgacaaagccgccgccgccgccggtgatgagagcagccgacatcagtgcctcgtgtggctcgactgacaacccgaccgcagcgtcatgttcctctgcttcgggagcatcgccgacgcatgtgaacagtccgaccagcagctgaaggagatcgccgccggcctggacaagtccggccaccgcttcctgtgggtggttcgggcaaccagcacccaacacctcgacgcgctcctaccggaggtgttcttcgcaagaaccagcggccgcggcctcgtcgtcaacagctgggtgccccagccgagcatcctccgccaccgcgccaccgccgcgttcgtgacgcactgcgggtggaactcggtgctagaggggatcaccgcgggggtgccgatgctctgctggccgctgtacgcggagcagaggatgaacaaggtgctcatggtggaggacatgggcgtcggcgtggagatggagggatggctggaagggctggtgaccgccgaggaggtggagacgaaggtgaggctggtcatggagtccgagcatggaaggaaggttagagagcgtgtcgaggcgcacagagatggcgtggccatggcctggaaagatggtggctcgtcgcgtgtcgcgtttgcccgtctcatgtctgaattactcaacgtgtaaggttgaaaatagtatggaatttcccaattgtatcttactactccgttcaaaaatataataatttttc

SEQ ID NO: 17495 - DNA, 2139 bp, Oryza sativa
  ref <308>: DATABASE ACCESSION NUMBER: AK067936
  ref <309>: DATABASE ENTRY DATE: 2001-12-06
ggccgtcgcctcggcatagactcccctccccgtctcttcttcgcgagctcgccccgccttctgcgccgagcaccgcctatcttcgccggcgtcctcccgctgcatcagaggtctatctggtggtcgcttgaatcgggaggtttttgttggattggattggattcggagagatggaggatgtggagaacaagctaaaggactatgagattgtgagggaaggcgaggcggagatcatcatcaacaagaaaatagcagcaaatgaagtgttctacaatcccgtgcaggtccacaatagagatatgtcagttgctcttttaaggactttcattgccaagcgtgaggaagaacataaggcaatgatggataagagggacaaggcgcataacaaagtgagccagagtaaatcatctggtccaaatggagagaatgggtcaacaggacagcatgatgaaatggatgttgatgctgaaaaggaaacaaataaagttgcggatgaaacagaagatctgtcaacagaagcaacaaagacaccttcgcgggaagtagccagagagcttaaggcaccagttgttcttgaggctttggctgcttctgggttgagatctatccgttatgctcgtgaaatagacgtgttagaaaaggtggtcgctctggacattgataaagcttgtattgaagcttgcaagcggaatataaagtttaatggtgcttctgctatgagtaagatcgagcctcatttgactgatgctcgagtttatatgctcacacatccaaaagagtttgatgtggttgatattgacccctatggagcaccttctattttccttgattcggctgtacaggctgttgctgatggtgggctattaatgtgcactgccactgatatggcggttctatgtgggccaaatggtgaagtttgccactccaagtatggttcctatccaaccaaagggaagtataaccatgaaatggctttgcgaatcctccttgccagtattgagagtcatgcaaatcgatacaaacgatatattgtgcctgttctctctgtgtcttggatttctacatccgtgtttttgtccgagtacttacttctgcaaacgaagtaaagaagactcctcaaaagctttcttatgtatatcaatgtgttggttgcgattcatttcatcttcagtgtcttggtaggaccataactaagaacaacagtgtgaagaatgcgcctgccattgggcctgttgttcctcaagagtgcagtgcctgtgggaagaaatttactataggagggccaatatggtctgctcctatacatgaccaagagtgggtagtgtctactttgacagaagttaagtcaatgaaggatagatatcctgcatatgataagataacttcagttctgactaccatatcagaggagttacatgacatcccattgttcttcagtctccacaacatatgtgctaatgttaaatgcacatctccatctgcagtattgttccgatctgcagtcctaaatgcgggttatcggatttctagcacacatgtgaatccacttggactaaaaactgatgccccttgggatgttatttgggacatcatgcgctgctgggtgaagaatcatcctgtaaaggaacaaccacatgactctgtagggacagcgatcctttcaaaatcacccaagcttgaagcaaatttctctagagcggctgctgccctcagcagggctcaagcaaagaaggtcaagcggttccttccgaacccagaacgtcattggggtcccaaaatcagagctggtcggaagattacaagtaaacatgcttctctgttaggtccagacgttgtcaaccgtgttatcaacggtgctgccagcaccgaagatgaaaaggtggccgagccaaataatccaacgacagaaaccggaggagatgcaacgaatgaagaggatgaaccttcaacaaagcgccaaaaaaacggcgatgttggattggcaaccgaaccttaattgtcactgaacctgagcacgtttcgctttcaccactcaattcttccatgtttgtaatgcttcacttttcttgagggtgtgactgatgggtatatctatcagctgtgttgctaaacggtttttagcaatgaattttgatcgcg

SEQ ID NO: 17496 - DNA, 2888 bp, Oryza sativa
  ref <308>: DATABASE ACCESSION NUMBER: AK067937
  ref <309>: DATABASE ENTRY DATE: 2001-12-06
gtctagctcattgctgcaggagaggggtttactcggttgaggattttcttgttctcacagcacttagacgatgaggccgcagcagcggctgtccattacaatggagatgagagagagacagagaggaggtatgttgatgcacttaatagcctcggcgatgttagaacaccttcctctcctgtatccgtggagcagctctttggtattggaggcaacgagtctggaattcctgatattgctggtctgcggcatttgaatgttcctcgcccttcacatagccaaaggtatggggagatggattctccttggagccctgcatatatctctccagggcactatggagtgcatgatcctcgagattttcccatttcaccaaggtttcaagttggagcagaagattttgatgagaggattcctgatgactttgtaaggcattcgccaaaatatcggcattatgaggttcattcaccacagcatgtggataatttggtctggcttcctccaggcgctgtaattcagcaaaacgcaggcttcccaggtaacttgggtcgccctggcaatttcttggatggaagcagtatgtatgatcactgccgttcaccattccataagggtcaaggtgatcctcgatatgtggatcctcgttggaggcctattcaacattttgaccaaacgagcatgacaaatgagtattctggtcaccctactaattcatgtccagattgcaaccgccctggtgagcgttttgtattaaaccaagatgttagactggaaaatggtgtttatgtcaaagagcagactggtggtcaccctcctcccatgttttataacgaatcgcattctcatgatagagcttggcatgcacatgcaaaccaaagccatcagcgatatgaagatccaaggttgcatatgcctggtagtgctagagcgatggaaccatacattgttgacaacagctcagttacatctctcagtcgatctagccatgaaagtccgcactattttcatggcagtagtgagcatgtcagtgatacatatcataaccaacaagttggagtcggtgggccatatgtccagacaccaggatttgaagaatctacaggtcagcattatagccactcttcaacatatggtgcagaccccttttaccaaatgcagcagaatctgccaccacttcaatctttgaggagaagagcaaatagtcctgtccatacaggttcaccctatgaatcaccacacctgccaattccaaatggcaactttgtcagaaatacaggtgatgttagtccacggattccaggtatgcctgcatatgatagaatcccaaacccatggccctcacccaatggaagcataccatatcgagttgttggacatgatatccctgctgttgtagaaaaccggtcaaatccaaacagtggccagtatgttcagcctttatttgcccccgaatcagtccaaaatcaaccaggagctccactgatggagattcatcctgaaagagcatgcggtggatctgttctatcatcacaagttgatggcagagtagctgcattacccctcactgatcagttgtccaggatggatatcaatccattgaagaaacttgaaggtccagagcatgagaagtttacccgaaatgcgaatgaaacaacttctttgcatgctatgaatgatccaagtgccttgacccaccatatcggagttgtacctgaagttgatcccaaacagaggaagcctgtcgaatatgaaactgtcacaagtaaagtgcatgaaggaggggctacagcactgcaggaatgtggggatatttcagaggatagattgaatttccttccagagctggctgcatctgttaagaaggctgcattagaagattctgaagagaaagagaaggctcaacaagatgctggtcccactcttttgccgacttgtgatgaggaaggcaatggaaagaagttggaggagacacctgctggtaatactggtacagatcaggattctgatgtgcatggaagtggtgagcagcagaaaagttctggaattgaggctacaaccgctgaagcagaagctttatcaaaaggactacagactataaaaaatgatgacttggaggaaattagggagctaggttcaggtacttatggtgcagtttaccatggtaaatggagaggatgtgatgttgctattattgggggcatcgtgaacaattccctacgtcctcagatcccctcatggtgtgatcctgaatggaaatcactgatggaaaactgttgggccagtgaaccagcagatagaccatccttcacagaaatatctcaaaggttgaggaagatggctgcagcaatgaatgtgaagtaaaggttcacaagccatgcaaagtttcctacgtccagttcccttgatacaggaggaaggcaaactcagaacaagattctatggagtaactatgatatggatgtctttgcagcattccagtttatcctagttcaattgttaatctaatgagttacacggaggaaaaaaatttcatcacggaagttccagagcaagtttaatggattttcgatcctggaatcatcagctgtcgtttgccttcctcggggaacagtatgctatataccttatcctctggacgggaactatagaaatagaaatgtaatgtaaataagcttcggcttgcttcttccggctggcacatgttagatgtgcacagtagtagacactgttcaaagttggacacagttatctttttgcacaaaattgtgtcctaaggaaagaggggacaactcgaacagagatatccttattcagattgtaaatagctcacgaataagatttctatgtcacttgcaacatggttcttccctgtatagatcatcagtggc

SEQ ID NO: 17497 - DNA, 2021 bp, Oryza sativa
  ref <308>: DATABASE ACCESSION NUMBER: AK067938
  ref <309>: DATABASE ENTRY DATE: 2001-12-06
ggtgtggcgtcgcttcccctatccccgctctctactttatccagggcctttcccctgcttacctccaccccaccatcccccgccgccgccgccgccgccccagattcctctcggcggagacctcagcctcagccctcaggggcgcggccggtttagggtttccccccgccgcagaactgggtgccgaggctcccgcgccgccgccgctgccgccgccaccgacgacgagggaggaggagaggcttagccctctcccgcagcgaccgcgaggtgtttaaggtatatgagggaggaacaaggctgcagagggcttgcagtggttgcttaacttggggaacttgcgatcacctcagttaactctctgtgggtggccgggtgcctggaggccgtgtggtgtcacccagacaacattgcatgataatcgtcttccttgtaggatgtcttgttgcttgggtgtgtcaaacttgctgtaacaagctttgggtggtcgggaagctttttttttcttactttcttacatcatctttctgtctttaactggtatacctaggtccacagttaagttgactgaaaaatctatatatattttttcctgttaccaattgtctttgagctaccaaccaaaccaaattattgtacatttcaggtgcagcctgtttttcattgacatgggacatacattagtgtagaggcaatattagagtcatatattggtaaaaagatttacaacctccattttatgatcagatgacctgcagaatggcagcaggcaagcaaaagaaacgtataataaggtctactaactcagatcaaaacaggacatggaagaagtcaaaagttgagtcttctaattgccatataagtttgaagtctcaaattgctcttaaatgggatgactatcaaaagagagtggttccccaaaaggaacaagttgggattttgtggtcagacttggcaccattcatagattccagacagaagcatgattcagggctggctgatgttacatatattcctccagagacattttccttggagaacttgagaagtgtgctgtcctataaggtttgggatacatgtctgacagaagctgacagaaagtttctcatacagtttcttccaactgagattgatgcagaagaaaatgttcatttattgcttaaaggccaaaattatcactttggaaatccttccctcagctggtcctcctctctttgctatggtgatactcacccagatgccttacttaataaggagaagcaaattagagctgacgagaaggcatatcgtgttaacctgaataactaccattccaacatggttgagtccttgaagaaatggaagaagagatggctaagttctgatgatccagaaataatgttcagggataataaccttgctaaacacaagcaaggagatacgcgaccaaaagttaccagtagtgaaatgcccttgaaggttgcacagagtagtgatgtttcgaagtttatgtcatatattgagatcagcagaacacagcacaaccttgttaagagcatgaagcagtctggtgatggcattaaaaccaagcatcttactcgtgtaattggtaaccttgataaattccatgtaaaaccatatggaacattaatagatgatgaacagaggagactgcgtgaacattggttgaacatatcctgcaatgatatacctgctgctttcgaggtccttaagaacaatagggtgacaacagagaaactgagaaatttacttggtcttgagctaggcgaaaagaatgtatctatcatgagaaaggttcgctgtgactaatcctttcaattcttgtttgaaagtcttttgattttccagatcaaggtattttacttgaatgtatgaaaaatatagtggatgatatcactttgttcctactactatgtgtcttgtatttttcatgtatcatatcatacacagcagcaaagttactattcgacatgatgttcattctaaaactctgttaccatgtgtataaaatactgatttgt

SEQ ID NO: 17498 - DNA, 2570 bp, Oryza sativa
  ref <308>: DATABASE ACCESSION NUMBER: AK067939
  ref <309>: DATABASE ENTRY DATE: 2001-12-06
gggggagggaaagaggagaggagggattgattttctttctcctcctcttcttgttcttcttcttgttgttccactcttattgttcatcatcctcctcctcatagctgaccaaatctctgctgtgacagcaatctctgctgcttggttctgcctcccatgaggagcacaccatcagtgtgattacaaagcaaggaaccctcctaccgcgtcgctgagctgatgaaggagctctgacgactcggatgcattcttctgccatcaatcaattgatccaacaaggcaactcgatcggaatttgagtttggtgaactctgtaattgattccctgcaagtatccatgcctttgcagcaatcttgctaattgagttgtcaaagctgcatacatggctacttactactcgagccctggcaatgaaagggactcgcaagctatgtacccagcggattcaggcaattcatcatatcctgtgccatcagcaataggaaacatgttatatcctggcaatgggtcttctgggccatacacggaattcagtggcattatccagcatcagcagaatttcatggagctgcctggccatccaactgcgatctctcaagattcatcgtcacgggaacctaacatggtcgcgtcgtacatggatcagcgctcttttggacctgccaaagatatgagaaatgagatgttgatgcatctgatggatggagcacataatgctggtgctgatctcatccacaatgacactcatagcagcgcgcagattgagtttggcctattgaacaaccacaattcgatgagcgttgcaccagcaccaggccaaggattgtctctgagcctcaacacgcatatcctggcgccttcgtatccatactggtctgcgaaaacagagttgctaacaccacactcttaccatggtgatgacaacagaatgaagaatatgcaatctgaggcctcacaggcaatcagaaactcaaagtatctgaaagcagcacaagaattgcttgatgaggtcgtcagtgtttggaagagtataaagcagaaggctcagaaagaccaggctgaagcaggaaaatcagataacaaagaagccgaggggggttcgaaaggtgagggggtatcttccaacccacaggagtctactgccaatgctgcaccagagatttctgctgctgagaaacaagagctccagaataagatggcaaaacttatggccatgttggatgaggtggaccgaaagtacaaacactattatcatcaaatgcaaattgtagtctcatcttttgatatggttgctgggtctggagctgccaagccttatactgcagtggcccttcagacaatctcaaaacatttcagatgtctgaaagatgctatcaacgatcagatcaatgttatccggaagaaacttggagaggaggagagttcatctggcaaagagggaaaattaacgcgcctccgttatattgaccagcaattaagacaacagcgcgctttccagcagtatggtttgttacagcaaaatgcttggaggccacagaggggactgcccgaaaactcagtttcaattcttcgtgcttggctttttgaacacttccttcacccgtatccaaaagattcagaaaagctgatgctagcgagacaaactggcttaacaagaagtcagatttcaaattggttcataaatgcccgtgtccgcctgtggaaaccgatgatcgaagacatgtataaagaagagattggggaggcggatctcgactcgaactcctcctccgacaacgtaccaaggagcaaggacaaaatagcaacatctgaagataaggaagatctgaaaagctctatgagccagacttatcaaccaagccaattaggtgaatccaaagccaacatcgggatgatgagccttggtggggcaccagccggcttccacaacgaaggcaaccaggatgacagcttcatgaacctaatgctgaaggaccaaaggccgggcgaagccgaaggcagcctcctccatgatgccgtcgcccatcattccgatgagaacgctcggttcatggcttaccatttgtcggggctcggaagatacgggaacagcaatgtgtcattgacacttggcttacagcatcctgacaacaggctttcggtacagaacactcatcagccaggtttcgccggtgctggagaagaaatttacaactccaccgcttctctcggtgtcgctgcagcttcctcttcggactacgaatccacgaaccaaatagatcaaaggcaacggagcagctgcaggattgaagctgcagtgtggctgccccaggcccagggactgggctcatgcattttttttgtacgagtaaatgcgccctgttgctgtcatgtgggcccgggaactatggcttctctgtgggttcgatgaccccaaacccaaaggcttttaacaaccaccacttgtcaattattgaggaaccggctgagctggctttgtgaattgttaaggcgacctcacctcctgcagttaggactttgatcattgtggtttgtttaaattgtatatatggttggttggtatggattg

SEQ ID NO: 17499 - DNA, 852 bp, Oryza sativa
  ref <308>: DATABASE ACCESSION NUMBER: AK067940
  ref <309>: DATABASE ENTRY DATE: 2001-12-06
tggtggccggtgactgggaacggcggcgccgctcctgttgtggtttgctagcgatggctggaggcggcactcgctcggtgccggtggctgccacatgtgctccgggccgccgcaccccttctcacttgtgtctccttctgcgtctcatctatcagctagggttccgcggtgtggtcatccgggtggctgaggagaacggcggcgcagcttgcgcgtggccgtcttccgcaggctggctccgcacttcctctcgctgtgctagcagcagatgggcccatctgccgattcagagggcggtgtactgttggcctgcgccctgcacgtctcaggagggccacgggttcgccaccatgaattcgtcggttcagattagcatttcagctcatccaaccaagcagccatatcctccgactgcacccaccagatggttggaattgaactatgaaaggaccaaggcgaaagtttttcatgaattggtgtttatctatttagtagattctggatatcagttccattactcaggggcaaatctgaggattttcatagcaccggataaaattatcgcaccattggataagcttccaagcaaagaatttgactaagagcaaataacctttatcggaactgtaacccacaatccagccacaccacctacctgcaagcaatttccgtcgttactgcatccaaatcgtcaaccgtttatgtttctgtccaagggaaatcagccgccgacgacctatccaatttcaagtcaactcaaactcacactattttctacatgaataaaatccctcacatagatgtcttcttcatagaacaagacttcaaaaataatgagatttagtattcctg

SEQ ID NO: 17500 - DNA, 1179 bp, Oryza sativa
  ref <308>: DATABASE ACCESSION NUMBER: AK067941
  ref <309>: DATABASE ENTRY DATE: 2001-12-06
ggaggagaaagagcgggagcgggagcggaagcggaaggcgaaggcgtgacgtcacccaccggggagggaggagatggagctggtctcctcgtcgcgctccgtccttcctcggtgcggcggcggcggcgttgcaggtgtagctgctgctccgttcaggacggcgtccgccagctcgaggcgcaaggggacgagcggattcgtgtgtgctttgggttgcgatggtgaggggaagaagagcgtggcggaggggacggtcagaaggagggcggccctcgctttgctgctggcttcgccggcgatgtcggtggcgttctcggctcacgggaagaccaaaagcaggaacccttacgacgagaggcggctgcttcagcagaacaagaagatccaggaagccaaccgggctcctgacgattttccgaatttcatcagggaaggtttcgaagtcaaagtagtgacatctgacaactacataacgcgagactctgggctactgtatgaggacatcaaagttggtacgggcaactctccaaaggatggtcagcaggttatatttcactatgtgggctacaatgagtcagggcgcaggatagatagcacctacattcagggttcacctgccaaaattcggttagggaacaaaacactggttccaggttttgaagaagggatacgggacatgaaaccaggtggtaagagaagaattattatacctccagagcttggtcctcctgttgggccgtcaacattcttcagtgcgaagcagttcgaggtattcgacatcgaactcctcgctgttcaggactgccaacggagaacaatagccttttactccgatgtagtgtgcagctgagcaaaagatgatcatcaaatctccaattggtgtgtgctggtaaagatgatcatcaaatctccaattggtgtgtgctggtaaatgtaaggaaaagatttttgtttctggccaggcttcagagttcttcagagttgctcctactgtaaatgtaaggatgtagcaatgacattaatgtgatgattgaaggaacaagtgaagtagtacgtcttaattattggcaatggtgatgttcgttctgccattctttgtcatgaatctcatgatgttggggggcatgtgtaccttctgctgcttttgacaagctgagagtgtaccttgatgtttaagct

SEQ ID NO: 17501 - DNA, 989 bp, Oryza sativa
  ref <308>: DATABASE ACCESSION NUMBER: AK099027
  ref <309>: DATABASE ENTRY DATE: 2002-08-28
tcccgccgcgcgcgcgcgcacccgagctcccgctccctcccctccgatggcggcggcggcgcgctccctcgcgctgctctcgaccgcctccgcgtccctcggcctcggcgtcgcgcgctcctccgcccgccctcggtccccgtttgggcggggcctcgccctccgcggcctgtcgtcgtcctcgtcctccttcgccgccaccgccgcggtgatggggaaggccggcaccgcggaagccgccgacgccgggatggacgccgtccagcagcggctcatgttcgaggacgagtgtattttagtggacgaacaggacaacgtcattggccatgattccaagtataactgccatctcatggaaaagataaattctggtcatgtcctccacagagcgttcagtgtttttcttttcaactccaaatatgaattgttacttcagcaaaggtctgctacaaaagtgacatttccacttgtctggacaaacacttgctgtagccaccctctataccgcgagtccgagctcattgaagataaaagcctaggggtcagaaatgcagcacagcggaagctattcgatgaactgggaatacaagctgaagaactacctgttgaccaattcattcctcttgggaggatgctttacaaggctccatctgatggaaaatggggcgaacatgaactggactacctcctattcatggttcgtgatgtggagctcagcccgaatcctgaagaagtggccgacgtcaagtacgtgaatcgtgatgagctgaaggagttgctcaagaaggcagatgctggtgaaggcggcattaagctgtccccttggtttaggctggttgttgacaacttcctcatgagatggtgggatcatgttgagcaagggactctggaggaggccatcgacatgaaaacaattcataagttgtagagtataaatcgttgggcaacgtccttagaaaataaagaattgttgctttaaccttttcacg

SEQ ID NO: 17502 - DNA, 814 bp, Oryza sativa
  ref <308>: DATABASE ACCESSION NUMBER: AK067942
  ref <309>: DATABASE ENTRY DATE: 2001-12-06
gaactccaacggatcactcaccttgcctcgccctcgccctcgccaccatccaacgacgtcgactcgtcgccggcgacgactccggccgcgcacatacgcctggtaatacgtactacgcgggaaccaaatcttacgcacgcgcgcacgaacgcccatggggctccttgaccagctctgggacgagacggtggccggcccgcgcccggactccggcctcggcaagctccgcaactactacgcccaagggggacagctggaggaggcttcgccggaaacccaagacggccaccgacgccgcgccggaggccgccgccgccgtcgggccgagaagccccaccgtctacgactgggtggtcatcagttcgttggaccgatgaactatagcgcgatccagcgtggtgaaaaagttctgaaaaatctgaaaaaacaaaataaccaatcgagcagaggaatatctatgacaaaggaagctagctagctgacgtgcctgaggcttcacgcatccgttgtgtctcatgaatctgtgtctgtgtcttgaatccgtgtgtctgtgtgtgaggtggtcgctggcgatgcgtgcagtgttttttttttcctatgtaactatgcgcctacgccgatagatcactgaaatatcaaatactagtagtgatagtgttagtggagtcataggcgatctagctagagagatgtctgaaatggtatgaggatgtaatgagagtgttcgctctgtatcctcctctgtaattaagcactatggaagtaagaaaaaaaatggaaagccatgcctttgctgctttctttcagctcgtgt

SEQ ID NO: 17503 - DNA, 2124 bp, Oryza sativa
  ref <308>: DATABASE ACCESSION NUMBER: AK099028
  ref <309>: DATABASE ENTRY DATE: 2002-08-28
tgtttgcaaaaccacccattctccttgaatcttgcctccaaaaactcttgccacttagcattcacaatgctcaccacatcatcacatagcaggcaccaccatgcatttgagaggagccccaaccacagcatgatgaagaacatagcagacaggaacaagcatgatcttcttcagagtgccatgaaccatgcagcaagcaagtacatgcagaggatctaccctctggggatccagaggagcagctccaacctcacactctcatcactctccctgtcacagaactccaatgattcttcactcagcagctcaaactctagctgggagcccaaggtgcccctgctgtatggtggcacatttagcccctggggtgatgtgcttgtgtccctggagaggaggagggaagaagatgatgacaaggttagtgatcatgatgttgaggggggagaagaggattttgattgcagtgagcctgggagcttgcataggtgcagctggatcaccaagaacagtggtaagaaatggttattactactacttgctatatgtttttctttcttctgtgctaattttcatgcagtcatgcagatatgttttttggttttgtatttcatttggtggacagattctgatgaacaatcatctcagcctacttaacaacagtaggcagttaaaaagaatatgtacttgtcacctaaggcaagcatcagtttattgttaggaaaagtgaaggatgtcggataagtgaacatgcaagataaaaaaacaaattagttaattagtgttggaccaacttatgagtgcaattagtaattaagtatgattcttcttttaaaaaaaagtaggtaacattaccctcagcagaacacaagtttgggactttggatatagcaaaagtcgacatcgacatcactggctgatgaagctctgattttgactaagtttcagtcatcacttgatgatgccttcacgaaaaatattcagttgacaatttcatcagaaagggacttctctccatattcttgtagtagcttttctttttggcacctgcttgcagtttgttgagcaaacataaatccaaaaggggagaaaagaagtacaagagctgaaaactgatcactaactgaaagtctgaaacccgtcaattgtgcagatgaggcgtacgttcagtttcacgacgagtgctggggtgtcccagtgtacaacgacaagtatgtactgcgtataaaataccattatttactgtccatttctacttaatttctgtatcttgatctatctttattgcaatttgcagccgtctgttcgagctgcttacgttgtcaggcatgctcatcgaccacaactggactgagatactcaagagaagagacatgtacagggaagcgttcgcggacttcgatcccagcacggtggcgaagatggacgagaacgacgtcgcggagatcagcggcaacaaggagctcaagctggccgagtgcagggtccggtgcatcatcgagaacgccaaatgcattcagaaggcgagtacagcatggccacgatgaatcgttcataaaacttgccaagttttacttcaaaacattaaagaaaatgttaaaacaaatatgacatatattaaacaagggagaacaaacactccatcaatctcgaagaatcaatttcctataaagacatttgtctagatttgtaactaaaaatatgtcttttgggatagaattaattttctatagcctgcaattgatcttcttggatagatggcgtatgtcacaagattttaaagtttttgaaaatggactctaaaaatattaagcatacgcggatgagtataggtggcgaaggagtttgggtcgttcagcggatacatatgggggcacgtgaaccaccggccgacggtggggaggtacaagcaccacaagtacatcccgttccggacgcccaagtcagaggcggtgagcaaggacctcgtccgccgcggcttccgcctcgttggccccgtcatcgtctactccttcatgcaggcctccggcatcgtcatcgaccacctcgtcgactgcttccgcttccctgaatgcctccacctcgccgaccgctcctggggcattaccaacgtcgctgcctaatggc

SEQ ID NO: 17504 - DNA, 2620 bp, Oryza sativa
  ref <308>: DATABASE ACCESSION NUMBER: AK099029
  ref <309>: DATABASE ENTRY DATE: 2002-08-28
gctctctctctctttctctctcgcagtcaccgcaggtggagagggtggaggagacgggtagggggggaggaagccgaggaggcgacgcgactagctgctgctgctgctgctcctgctccactccgccctaggtcaggtagtgcaataagggtttctcgggatgcctgaggaagacccagcatcggcaatggaggagaccgctgtagcgaatggaggagcagctgatgatgttgctgctcctgataaggacaatgacattaaagaaaaagctggcaagggcaacgaggtagcagtagagaataagaatgctgaagagcagaataaaggaggctcagagaatggtaccaagggtccatctgatggagatgttgagatggcggaggctgagactgcaaaggagagtgatgtgaagcagttggacactgaggatgcgaaaaaggatggtgcgcaggatgcagatgcaaatgaagaaaagaataccaaggacacagaaggtgaagatgtcaagatggctgaggctgaggccgaggcaggaaatgccgatgtcaaggatacagcagagaaggaagataaagatgagaacaccaatacggagaagcaggaattgaaagatgcaaaagaaagtggttctgagaagcaggaggaattgaaggagcaagataaaagtggttctgaaaagcaggaggaattgaaggagcaagataaaagtggtttagctgagtacgaggaaaagaaagcagaagaagagagtggtgctgagaagcaaggggaagaggaagcagaggaaaaggggctctgctgataatgacaacgaggaaggagacaaaaatgcaaatatcagtgatgaacatctgaaaaaagatggtgggaaggatggaaacaaagatgaagcagaagaagaggaggtcagtgaagcagacaagaaggtagaagagaataaggaggaaacaccgaagaacaagaaggcaagaagtgcaagggatagaagccaaggtaaggataagaaacaggatgggtccaaatccagggaagtgaagagcttactgaacaccgccagcccttatggtactgatcgccctcagcgtgagaggaaaacagtggagaggttggttgaagtgattgaaaaggagcccaacaggaacttcgtagttgagaagggtcgtggtactccgttgaaggatataccaagtgtggcgcacagaatatcaaggaaaaaacctgctgatcttaagtttcttcacaatgttctttttggcaggaaaggcaagagctgttgattttaaaggtcatatactccagttctctggtttcgtgtggcatgaaagtgatgaaaagcagagggcgaaggctaaggagaagcttgacaaatgtgtgaaatacatgttgttggaactctgttggatccttgctattccgactccaaaagcaaacatcagaaaggaagatattgtggcaaagctgttgatttcattgctgaacctcatgctatggctgactccgggcactcggatgatcaggggtcgaatcctcggaaacgcaacagaggaagcacacccaagagttctagcacgaaatttgatgatgatgacgacataactccaagtaaaaagcggaataaagctctggaatatgatactgatgaagatgaggatgatgcggatcccatgaagtcagatagtgaggaagatgactatgattctgagaaagagaaggcaaagaagaactcctcagatgcaaaagataccgctagtaaaaagaaggctgcaacagggagcagccacaagacaggtactccaaggacagtgagcaagagttcaagcaaaacaccatcttcaaaagtttccaaggaaaaggagagccctgaggacagtgcaaaagtcttctataggaagaagaaatctgtcacaccaaagcgtccttcaagctctgaaaaggagataaaagacaagaagtcatcaggtaaaaaggtgacaaagggtaaaggagaatcagcagaagtaggtctacccagtaaggacgagctgaggaaaaccataactgaaatccttaaaaaagttgatttcaacacggctactttcagtgacattcttaaaaagcttgaggatcgctacaagattgacctgacaccacgaaagtcagctatcaaaatcatgatccaagaggagctaaccaggctgtcgaaagaagacgacgatgaggatgaggacgaggatggaaatgaagacgctgagaagaaaaaaccacaacatcaagccaaggaggtggtggcctgagctgagcattggtgaaacctcgtaggtttagcacccgctgttaattattatccgctgttaattattattttgtacctgcatgtatgccgaaccttgtgcttgcatcatgggcagcccccatgttaattattgttaatccgtgtccacagatagccaaaaaccatatccctgtttggtaatgtcaaaaacaaggttcgcttaggcagccctacacctgtagctgacttgggaggcaatttcttaggtaactgttgatgtccaaaaactctgcaatgggatgtggcagagcatcatgtaatgaatcatgttcgtcataggtttgaataacaagtggacgtattaggctg

SEQ ID NO: 17505 - DNA, 865 bp, Oryza sativa
  ref <308>: DATABASE ACCESSION NUMBER: AK067943
  ref <309>: DATABASE ENTRY DATE: 2001-12-06
gagttttctcctctgattttccaccacaagatctctagtttctttgatttcttgatcagacgacgatgggagggagcaaggatgagcagcaagacagggggctcttctccaacctgatgcacggcgtcgccggcggcggcggcggccatggctatccgtaccctcctcagcaggggtactacccgccgccgcccaccgcgtatcctcctcctcctccggcggggtacggcggcggctatggctaccctcctgcaggttaccccggctcgtccgcgccattccaacacggtaaccatggcggaggaaacatggggatgctagctgcaggtgcagccgctgccgcggcggcgtacggcgcgcacaagctttcccacggtcatggccatggaggctacggctacggtggccaccacggcggcctcttcggcggtcaccatggccaccacggcggcttgtttggaggccatcacggacaccacggcggcggcctcttcggcggccaccacggccaccatggcggcttgtttggcggtcaccacggcttcggtggccaccacggacaccatggccaccattgatggtgatcaccatatcgtgttgcacggcgtgttcaatcagtgcgagtgataagatgatcatgagttggtttgattatactactataaactcgatatgtgtatatagttttttctacttagtttgctactctagattgtatctgagacactgatatgagtgataatatggtttgatgattagtaaccgactgtcaatcagtgtttgatccctgtttttactgtgctgatacccccacgttttttatcggagagtgggttctaatttcttgaaggaatgttcctggtgt

SEQ ID NO: 17506 - DNA, 4243 bp, Oryza sativa
  ref <308>: DATABASE ACCESSION NUMBER: AK067944
  ref <309>: DATABASE ENTRY DATE: 2001-12-06
gcatctcgcctcgtgcaatctctccaccccaaaccctaaccgcctctcccccgcgccgtcgccatggacgccatcgacgcggagctcgcgcgggcgcaggaggagcgcaagaagatggaggaggccctggccgccggcgcgcccatggccgtctcctccgtcaccttcgacaccgatctctacggcggcggcggctccgaccccaaccgcttcgccggctacgacacctccatccccgcctccgaggacgactccgaggcggccgtcaaccccgccgcccgccgcctcgcctcctacaccggccacgccgtcgccgccgccgacatcccccgcgccgccgaggacgacggcctccccaagaagtcgcagcgcatcatcgaccgcgaggatgactatcgccgccgccggctggcccgcatcatctcgccggagcgccacatcccttcgccgccggtgaggccaccccggacccttccgtgcggacctatgctgatgccatgcgcgagaatgacctgcagaagcagaaggagcagctgctgcgtgatatagctcagaagaagaaggaagaggagaaggccaaggagaagaaggccttgcctgagcagcagccagtcggcgcagcaatagatgggatcagtcgcaagatggtgatgcttctgctgcttctggatccaagaaggcgaagacctcctccgattgggatgctcctgatgcaactcctgggattgggcgctgggatgccacccctggtcgtgtcggggatgcgacgccgtcggtgagaaggaatcggtgggatgagacaccaactcctgggaggatggccgatgccggatgcaacacctgcagctggtggcattactccaggtgccacaccttctggagcttgggatgctactcctaagctgcctggtgggcttgtcacgccaacacccaagaagcagagatcgagatgggatgagactcctgctagtatgggtagtgctacacctggaggcactggtgctgcgacgcctgcaggttacactcctggtccgacgccatttggtggtgacaaccttgcgacgccaacaccccggccagattgcttctcgtggtccaatgactccagagcagtaccagctcttgcggtgggagcgggacattgaggagcggaacaggcctcttacggatgaggagcttgatactatgttccctcaggaagggtacaagattcttgaacctcctgcttcataccagcccatacgcacaccagcaagaaagctgctcgttacaccgacaccattgggtacaccattgtatgctattcctgaggagaatcgtgggcagcagtttgatgtgccctaggagttgcctggtgggttgcccttcatgaagccagaggattaccagtactttggaacattgctgaatgaggaggagggggagcagctatctccagaagagcagaaggagaggaagatcatgaagctcctgctcaaggtgaagaatggcacacccccacagcggaagacagcacttcgacagctgacagacaaagcaagggaatttggtgctggcccattgttcaacaagattctacccttgctcatgcagccaacacttgaggaccaggagcgtcatcttctagtgaaggtcattgacagggtactgtataagctggatgagctagtccgtccatttgtgcacaagattcttgtggtcatcgaaccacttctgattgatgaggactactacgctcgtgttgagggccgggagatcatctcaaatcttagcaaagctgctggtcttgctactatgattgccgccatgagaccagatattgataacattgatgagtatgtgagaaataccactgctagagcatttagtgtggtggcttctgctttgggtatccctgctctcctgccattcttaaaggctgtctgtcagagtaagaagtcttggcaagctcggcacactggtatcaagattgttcagcagattgctattcttatgggctgcgctgttctgccacatctcgagtccgtagtcgagatcattgagcatggtcttagtgacgagaaccagaaagtgaggacaatcactgccctttctcttgctgcacttgctgaggctgctgcaccatatggtatagaaagttttgatactgttttgaagcctctgtggaagggtatcagatctaaccgtggaaaggttcttgctgccttcttgaaagcaattggttttatcatccctcttatggatgcgctgtatgccagttactacacaaaggaggtcatgcaaatcctgattagggagttccagtcaccagatgaagagatgaaaaagattgtcctgaaggttgttaaacagtgtgtcagtacagagggtgtagaggctgattatatctggaatgacatccttcctgaatttttccatcacttctgggttaggagaatggctctggaccgcaggaactataagcagcttgtggaaacaacggtagagatggcaaacaaggttggagttgctgatattgttgggaggattgttgaggatctgaaagatgaaagcgaaccttacaggagaatggtaatggaaacagttgagaaggtagtggctaatttgggtgcttcagatattgatgctcgtttggaggagctgcttattgatggcatcttgtatgctttccaagagcaggcaagtgacgatgcaaatgtcatgcttaatggttttggggctgttgtcaatgcactgggacagggggtcaagccttaccttcctcagatttgtggtaccattaagtggcggttgaacaacaagagtgcaaaagttaggcagcaaggctgctgatctgatctcaaggatagccattgtaatgaaacattgccaggaggagcagcttatgggtcacttgggtgttgtgctgtatgagtatttgggagaggagtaccctgaggtgttgggttcaattcttggagcactgaaagctattgtgaatgtcattggcatgactaagatgacaccgctgatcaagaatcttcttcctcgactgactcctattttgaagaacaggcatgaaaaggtccaggagaactgcattgatctagttggtaggattgctgatcgtggagcagaatttgtgcctgctagggagtggatgaggatttgttttgagcttcttgaaatgttgaaggctcacaagaagggtattagaagagccaccgtgaacacatttggttatattgcgaaggctattgggctgcaggatgtgttggctactctgttgaattacttgaaggtgcaggaacggcaaaaccgtgtctgcacgactgtcgcgattgccattgttgctgaaacctgctcaccttttacagttctgcctgccctgatgaatgagtaccgagtcccagaactcaatgttcagaatggtgtcctgaagtctctctctttcctctttgagtatattggtgagatgggcaaggattacatatatgctgttactcccttggttgacgatgctctaatggacagagatcttgttcactggcaaactgctgcctctgctgtgaagcacatggctcttggtgccaaacatatttgagacatctccccatgtcatcaatgctgtcatggaggcgattgaggggatgagagttgctcttggtccagctgtgatcttgaattactgccttcaaggccttttccatccagcaaggaaagtatgtgaagtatattggaaaatctacaactcaactatatattgctgcacaagatgcgcttgttgctgcttatcctgcactggatgacgatggggataatatctacagccgtccagagctggcgatgtttgtctgttcaatggtattttgacccggtttgctgaggagttcccttagattaaaagatcccaaggagatgatatctgtcctgcatgtcacactttgttgccgttgcatgatcctctccgctctgaagagaaaatgatcaacatagtattactgctgtcccaataactgtattattagcaaaaaaatgttataaagctactatcgaggttgtgaacttgtcttattattagagtctgtattagtaatgttattactatgcctggaacgtggtattagtattactaccctgctctgagttgatggatcaatggatggatggttagatcgtatagtgtctgttttcttcccggactgttagttgttactttagaaaatgttttaaattgtattgcgtatgttgtggtttgtgatcc

SEQ ID NO: 17507 - DNA, 1047 bp, Oryza sativa
  ref <308>: DATABASE ACCESSION NUMBER: AK067945
  ref <309>: DATABASE ENTRY DATE: 2001-12-06
ggattttcccgaccttctctcgtgtttttttttcgtgttcccctccttatctccgactccccaccccccccccccccccgggcggcggcggagctccggcgagccgagggatccgggaaattcgtcgatccggcaccgtgccggggaggttaggtagtcggggatggcggagattggagaacggcggcggctacggcggccgctcgctcggagagtccgccatggttccgctggcgcgttgatcccccggcagctcggcactaagaatggtcgccacggacgcgcgcgccatgtcctccccggcgccatgggctctgcatcggtggctatgactatgtcaaaggatttgaagggtagctgcacgtattagttggatcttagtgcgtatgttgctctgctgggattgatccattttttcagtccattccatcaattggtggagtgcagttcagggatgccggctgcaagctttgctctgaggtccttcctgagaatcttgccagaaggactcttcggaattgaatccgcgaagaaaactttgttgagcctcttgtagaaaacaacctgtgatgttgttcaaaacaatctggattatgatgcttataacggtgaaacattgatccttcaatccgtacaatgaatgcaaccggcacttcacccgcaatttcgtctatcatcctgcaagaattcaataagaatttagtcctctgatgtgatggaacatgctgaccttctgttcatctaagcatggatcaacttacggtacaacggcagcatccttgatatcagggtgtgtgatgagaagagcttcaagttccgcaggagccaaccgcccttgtcgatggtgttcttcgtggactccgggtcattcagataacctgcaaatcacaggcacgatcactggcatgaaatggctgcattcagagtttcagacattcatgtgcacttgttcactcgtataagccagagcatataccagtgcagtctccattacagttttcagtaagataaaaaaaaaagagtctaagtagataaatttttcgatgg

SEQ ID NO: 17508 - DNA, 3453 bp, Oryza sativa
  ref <308>: DATABASE ACCESSION NUMBER: AK067946
  ref <309>: DATABASE ENTRY DATE: 2001-12-06
ggttcttgcggaaaatcaattaaaaattcctcgcgtgcgaggaagacgccatcgcgagaggcggaagcgagcgaggaggagaggagggcggaatctcgcgatccccaatccgtggaggggcgctccgattcgccgattcggcgagagatcccgccgatcggggagctcccggggtgggattcgagctgcgggatttgggggcgctgagcttgagctcgggggaggcggggggtgggcccagggctgcgagcggcggcggcggcggcggaggcggggggtttggttgtgggttgtggggttgggggtggatgctgtcggtgaggaggcggcaggaggatgcacgcggcgtagggctccggggcggcgccgcagcgggcggcatggaggacgacgcggagctcgaggagggggaggcctgcggggacgagacggccttcgtcgaccccgacgtcgcgctctcttacattgatgaaaaaatccaagatgtacttggccattttcagaaggactttgaaggagctgtatctgcagaaaatctaggatcgaagtttggtgggtatggttcattcttgcctacttaccagcgttctccgctgccccaaactagaagtccacctaaggcggcaaatgttagctcaagatctccttatcaccagcctacagagagcatgtcccagaacactttggctgtggcagctccatctgtttcaaaacataatggttccatggtgccactttctgatgattcaagtaagaaggaagtacatcaaagcacaaaagttgaaagagcctctagcacccaagattcattgaatgggctatctaagtctactgaccacaatagatttaaagttcggatcaaagttggttcggacaatggtttggcaagaaacaatgcagctatttacagtggtttgggtcttgatatttcttcaccttcatccatagaggatagccctgatggctgtgggagcctctctccagaatttaacaatgtgccaattgaatctcccaggaccattcttcagatcatgacatgcttttcagttcctggagggttcttgttatcccctctgcgagatgatcttgttcaactgacacaaaaggttgtgcctacatcaaagaaatgggaaacaaatgcaaacacagaaaatgtacaagaaagatatgaagggtatgcggctaaaagggtgaaatctgatgctaagaaaaagaaagctgtagatacgaagaggtcaaaaagcagaaatgatgtcagcgcagttatgaaaaatgagattgatatagaaacacctgctggtcaaaagatcgtattggaagctctcaacataccattgctgtctaatcccagaaccatggaggcaaaggacgggagccagtttgaagaggatcctatgcgagacaccttggtggaaaataaagatgcccgattgaaagaacggaccatcaacagtgacttaatggcaatcaaatatgaaaatgtcaaagccgaggcagcggaatgtttagagaacagtggtcctggcagttcaggaatggatttttcagcagtcaagggggaagtgaaattcaaggcagaaaaagcagagatccatgtagaagacaggaatactactagtgaaaaggacttccaatcggatagaaaacaagaaagaaaaataaaaacagagagtaagtgcaatgccacaggagttaactttgaaggtaacaaggttatgaatgaaagaacacctgttgtcggcaggagcataggaaaggtttctagtaaagaaacattacttaatgatattaatgaagaaaatgtctccaagagtgagtccagaagaagtcagaaagagcaaaacatgaatgcttcatcatcttctgatttcctggaagatgacaggggtgtcctttcttctggtgcagttaaggagaggaaaaatgattcgcaatccaaatctagccatccaggaaggaaacccaaagcaaaatcacatagagatgttagggagcacttacctgaaggatcttatggaggcaaggatgatacattggagaatggaagtgggctgggagagttacggccaaaaaaaatttggaagaatgatagtgagagggattctgatatgcctgggacatcaaaaagggaaatttcatctagtttgaagaatgataggcacacacctgctgaggagcagaggatgcatgtacctccatctgttagtgcacctactgcaaatgcagctcctatgcttcctgcccccgtcgtgatagaggaacattgggtatgctgtgacatatgccagaaatggcgtctcctgccatataagatgaatccttctctgctaccaaagaagtggaaatgtagcatgctacagtggctaccagggatgaatagatgtgaagttagtgaagatgagactaccaatgctctgaatgcactatatgtcagtccagcccctggcaatggcgttgcttcggttggacattctcatgttgcttcttcagggctaacaacatcaaacactttgaatgtaaatggacatgttgaacaaagtaggaaaaggaagaatactctgagtgacggaaatgtttcctttgatgtttctcagcaaatgcaaggttcggtttatccactgagcaaccaacatgctcctattagaagtaaaagtgctgctgatagtatccagtttcctgttgagagagattctaaatcagttgaccatttcgttgagaagaaaaggtccaagagcaagaatcatggtagctcttctgatggaggccatctcgtggaaagatccaagaagcattcaaaagtaaaaagcaagagagagatggatcatgatgaatacagaacttctaagaaaattaagaaagaggagcggcgccagcgccagtctggcatagattctaaccctggatatgatttagctagtggagacgttcctgatgaggccaaagctttgccttcaaaatcgatggccttacagggttcgagtgaaaggagtgatgttcctccatcaaagtataaaagtgtttctaagtataattcttcagaaaaatctaagagatctaaggatggggatgtttttcttcctgaagacaagaacaaggaacattcttacccctctgatgcacaaaaaccagatttgtctagtaagaagaggatagtgaaggaatgggaggagagtcagcacaattcaacacctccggtgagtaaaatgtctattgtaaaccaaagctcttcttccaaagaaacctgcaaggatcagaacttaaaggaaacaaagtcaaagttaacaaagtctgaagaaccgtttgccatgacagattcaaaatcaataaaagttgcacattctaatcaaacttcacgcaatctaaataatgagctatttgaggacagcacaccttttgctgttaaaagtggtatgtctgaaccacctgaaaatcgatcttctgaacaagctttgg

SEQ ID NO: 17509 - DNA, 2015 bp, Oryza sativa
  ref <308>: DATABASE ACCESSION NUMBER: AK067947
  ref <309>: DATABASE ENTRY DATE: 2001-12-06
tggtcccgtgttgttccactcatcacacctctccctcctcccctctcatggccgccgcctccgaaccctagctctctctctctctctctctctctctctctctctctcgcgccccacccagatctgcgccggcgacggcaaggatggaaggcggcggggctcagcgccaccaccgcgggcggcgccgaggtgcggcggggtccgccgcgcgaacgccccggggctggtgctgctccttcgctggcgtcccgcagagccccgacctccgccccttccctccctccctcgcgccgccggccacggcggcgtcttcctccccggcgccgggtggtggtgccgggaggaataagctgccgcccaagtccccctcgatctcgtcgttccacagctcgccgacgtcgtcgaggctcgccggcctcggcggcctcatcgacccgcgccgcatcctctcccccggccgcgtctcgcccatcgacctcgatgactccgcgcccccgctcccgctcccgctcccgctcccgccgccgccggtgacgcccgcggcggagacggtggtggtcccggcggagacgtcggcggcggtggcgccgttggtggtggcgtcggcggaggcggatgcggcgggcgacgaggcgctggatctgaggcttttccttcgcgggagggacgggagtacgtgcgtggtgatggagctcgactccggggtgctctgcgacagcagcgccttcttcgccgccatggcgccgccgcgcgggcccgccggtgacggaggagggagcggcaggaggatcgaggtggacggggtggacaatgtggaggcgttccgcgccgccgtcgagctcatgtaccagcctgatccgctgcggtggctcgccgccgctggcgtgtcgcgctccattgatgtgctcgaggtgtcttcatcaatcatgtttgaaagaggagttaaattgtgtttgtcatacatagaagcagttccatggaatgagaacgaggaggagaagctcaagaatctctttgcaagatgtacttttgatgaagcaatatcccaagatgttctggctagattgcggcctcacagctggagcagctcagaagacctcacagtgcatcttatccaatcagtcacgagcagcaccaacagtggtgcaagaaaagatatgcaatctttggtaaatggccttctaagcaaaagttctgtctaccaaaaagacatggcagggctaaacagagagagcctgtataatatctgttatgcctgtttaaattcactagtggatctttatgacgaagcaacagaggctacaaaccacactgctcaagcattagttatcaagggcagtaaaccatttattgagagaatctctcagcagacagagaacctcaactggctcttggacattcttgtgaatattgacatggctgaagagtttgtggagctgtgggcaaagcaagacaggctcatcaggatacatgagcaggcatcacccatgatgaggtatgaactaagccgaatatctgctagtgttttcatcgcactcggcaaaggaaaagttcagtgccgtggagagctgaggagcctcctcttctacggatggttcagcccgatgttgcttgatttcggctggcttcagcgatgctccaaaggtctggatgtaagatctttggaggaaaatctaggacaggccctactaaccctcccactcaagcagcagcagtgtctatttgaggagtggtttcagtgttttgcatccaaaggatcagagtgcccgaaccttactagagctttccaggtatggtggagaaggtccttcgttagatcatcggtagaaggtcagtgataatgtttttactactagtatatgctgtctgtaccacttgtaaaattgcaattgttggaataactagtaggggtgatcaggtgaatgatgtctaccgtagtttagccctttcgattgtatgtgcataagcttgttaaatttattttgaggaatggatggctttggtgtgtgtatgtt

SEQ ID NO: 17510 - DNA, 2127 bp, Oryza sativa
  ref <308>: DATABASE ACCESSION NUMBER: AK067948
  ref <309>: DATABASE ENTRY DATE: 2001-12-06
gatgggcttcattgaaatgtcaatggttgatccaattcaatgttagggtgttctcttcttttggaactcaaaagagagcgttgttcttggtgtaccgctatttggtatagcagaaattcagaatgagcatcaccctatttttgcctccctatccaaggaaatcctcctcatccaaattgtctctctatttttttttttgcatgctacagtgagctccctatatttgactccttatatctcgtccatctatattttatcaatatcttatactataacccaaatcaatgatgtcatgcaacgtcaaaaagggataagatgctcccacatttagggagtgataagggacggatagagaatgggataggatatgagcaagatagagagttggttggagagtatgccttcttttatgtgttaatatgttatagtggcatttcgcaacacaatccctattttgtgtctttttagaggacctattagtggtaattcactagcaagggagacagctaaagagcagatcgggcggttgtccgggctccgagctaccatctccactactgagtactgacagtcatcgtctcatcgatgcctataatgttaaaaaccagtcgatcaccggaacgttattagtaacccgagctcaacggtggtgctagctccaccactgctaactaacaaacttaaatactctacactggtatatatttctgaacagtacctagatataactactaccaatctgcaagcaagaagaatttagcgatttacagactccagagaagaaaagattaattgtgtgcacaattgcactaggaattacctgtctacctattctaacgagatgttatcaatgatcaaggtatgacatgcattgtatggcttgcaggtattgacaaaacctattactctgctgatgaagctcttgttctaaagcaaaaagcagaggacgtggtcccttatttgaatgaccggtgtatttacttagttggaatgatgggttctggcaaaactacagttgggaagatattagctgaagtattaggctattctttctttgacaggtttgcattcgtatgattgtatctgatgatgccaacctagaatttgaagcaacttctgtccattattcagaaatgttactgatgtttcctcattatagcgataagttggttgagaaggcagttggcatatcatctgttgctgaaatctttcagctccatagtgaagcattcttcagagataatgaggtatacgcttgtttctctagagacatgagacttatttccatttcttttcttggtatgaaaaatgaatcagaatccaagccattctcttcccatcttggtctagtagtggcgggtatataacgatgctattcaagctcctgataagaaagttttctgatatcctcttgtttcattggacttctcaagagtgaggtactaagggatttgtcgtcaatgcatcgattagttgttgcaaccggaggtggtgcggtgatccgaccaatcaattggtactggaagtgataaactaccctgaattgctcttcaaaagcaatgcttactaagtttgctgtgtgaaatttgcaggagttacatgaagaaagggtcaacaatctggttagatgttccattggatgcacttgcaagacgaattgctgcagtaggaactgcttctcggcccctcttgcatcaagaatctggtgatccttatgcaaaggcttatgcaaaactgactgcactttttgaacaaagaatggactcatatgctaatgctgatgccagggtttcactcgaacatattgcagtgaaacaaggacatagtaatgtgacgacacttacaccaagtgccattgctattgaggcattgctaaagatggagagctttcttactgagaaggcaatgatcagaaactaaccacttttgggtggttaaaagcacatcaacaaacaaaatctcttgtttgttctgttgtatttatcgcatatacctaaggcgtgtttcttagtatagcatgaacttgttagtcacccagtatgaaggagggtgatttgagtttgaacttgtgtaaatggataagtaatagctttcaattgaaagaaaagtttgtgttgtgttttgtgc

SEQ ID NO: 17511 - DNA, 1264 bp, Oryza sativa
  misc_feature (580)..(580): "n"=any one base of a, t, c, or g
  misc_feature (683)..(683): "n"=any one base of a, t, c, or g
  ref <308>: DATABASE ACCESSION NUMBER: AK067949
  ref <309>: DATABASE ENTRY DATE: 2001-12-06
gatccaacaaattgcctaacactaacaagcaacgatgaccgtcgtcgtcgttgccgatgacgccgccgccgccgcagcggcggcgcagcagcaggaggagctgccgccggggcacggccaaacggtgtgtgtcaccggcgccgccgggtacatcgcgtcgtggctcgtcaagctgctgctggagaggggctacaccgtgaagggcacagtgagaaacccagatgacccgaagaacgcccacctgaaggcgctggacggcgccgacgagaggctggtcctctgcaaggccgacctcctcgactacgactccatccgcgccgccgtcgacggctgccacggcgtgttccacaccgcctcccccgtcaccgatgaccctgagcagatggtggagccggcggtgcgggggacggagtacgtgataaaggcggcggcggaggccggcacggtgcgccgggtggtgttcacgtcgtccatcggcgccgtcaccatggaccccaaccgcggccccgacgtggtcgtcgacgagtcctgctggagcgacctcgagttctgcaagaaaccaagaactggtactgctacngtaaggcggtggcagagcaggaggcgtgcaaggcggccgaagagcgcggcgtcgacctcgtcgtcgtcagccccgtgctggtggtcggcccgctgctgcagcngacggtgaacgcaagcgccgtgcacatcctcaagtacctcgacggctcggccaagaagtacgccaatgccgtgcaggcgtacgtggacgtgcgcgacgtcgcggctgcgcacgtccgcgtcttcgaggcgccggaggcctccggccggcacctctgcgccgagcgcgtcctgcaccgtgaggacgtcgtccacatcctcggcaagctcttccccgagtatcctgtgcccacaaggtgctctgacgagatgaacccacggaagcagccgtacaagatgtccaacaagaagttgcaggatcttggcctccacttcatacctgtgagcgactcgctctacgagacggtgaagagcctccaggagaaggggcaccttccagttctgagcaaagagatcccagaagagttgaatggtgtgccagcatgatactgttgaagaaacagagcatttaacgttctcctgtaacagtgttaggcatctgttgttatgtatgtaaactaagtggataacgaaaaaacatggagactatcattgaatataaacagacgtgaattctgccccttcagaaattatatatttatgt

SEQ ID NO: 17512 - DNA, 1839 bp, Oryza sativa
  ref <308>: DATABASE ACCESSION NUMBER: AK067950
  ref <309>: DATABASE ENTRY DATE: 2001-12-06
gagtcactggccaccaatgatttgcagtagtaacagatataggtcttaggcctccctgagaggctgagagagagagagagagagagagagagagagagagatttggtgttggataggagaagagagtggagacagtgggggtgagaggattggatgcatccagattctgaatctcctgcaagcctacttcctgttatcttctttgggctttcagcaagcatccattgtgatgcactggccagtggatgataaagccatcaatcaactgaaccagcatgagctcccagagtgttgttgcagtgaagcagattactgctccggacaaaatagtggaaacctgtccatccacaaaacattctgcacataagctgttcgatgttaaaccggattttcaagggttgatagatgacaatttgtcatcctccagtcagtcctcaagcatcaagattgagctgatcagatcatcaagcttgccaaatatactgccgtttcagaaaagaagctctgaacctgaacctgaaagtccactgtctcatgtttcacatcccaatgtttcagagccagtttactcaaattcttcaaccttctgcacaagtttgttttcgtcgtcgtcgatggagacggagccgtgccggcaattgggcactctaccattcctgcctcaccctcctaagtgtgagcagcaggtttcagcagggcactcatcaagctcctccctgctagtacctggtggtgatggtgatattggcaatgctcatgatgaacctgaacagtcagatgatctgaaggatttcctcaatctctctggaggagatgcttctgatggcagcttccatggagaaaacaatgccatggcttttgctgagcagatggagttccagttcttgtctgagcagctagggattgccatcactgacaatgaggagagccctcggttagatgacatatacggcacgccgccgcaactttcatcacttccagtatcatcttgctccaaccagagtgtacagaaagcaggatctcctgtgaaagttcagcttagctcgcctcggtcatcttcgggatccgcgacaactaacaaggcgaggttgaggtggacactggagctccatgagcgttttgtagaggctgtgaacaagctagatggacctgaaaaggcaactcctaaaggtgtgctgaaacttatgaaagtagaaggcctgactatctaccatgtaaagagtcatttgcagaagtatcgcctcgcaaaatatctcccagagactaaggaagacaagaaggcatcctcagaggataagaaatctcagtcaggtagcagtggaaatgattcagtcaaaaagaagaacttacaagtggcagaagctctacgaatgcaaatggaggttcagaaacagcttcatgaacagttagaggtgcaaaggcaactgcagctgcgaatcgaagaacacgcaagatacctgcagagaatactggaagagcagcacaaggtcagcatcagcagcaactccctctcactgaaacccccagccgaatcgcaaccggaatcgccaaaaccaacatcagaaaagaaggaggccgaatccgaagcaggcgccgccacttcagctcagccatcatccgaggataaatcaccagacgcagaatgcaagtcgtcgccgccggtgggtagcaagagagctagggttcatgtcggcgatgagcaccagtgttcatagcttgtgtagagaggaagaaggcaaggatttctcagctgcatgcaaatgcatctctcttcttgagaattttagccactgtatataaatttggacttttggggaatgagaatctgaatttggaagc

SEQ ID NO: 17513 - DNA, 1368 bp, Oryza sativa
  ref <308>: DATABASE ACCESSION NUMBER: AK067951
  ref <309>: DATABASE ENTRY DATE: 2001-12-06
gatgtggagaggatacgtcggtggttggccatggccttcttcgtcaagatttcggcgccgtgctcgcttgccggccatggcaccaccagcagtagcagtggcagcagcaggtcaaagaggggattgttgcttccagttggggctggggctggggctggggcctacggcggcaggcagtactcggacgtggtcccggtgccagcgctatcgcaggcgcaggcgagctctagcggtggtcggctgcgcatcttctccggcacggcgaacccgaggctggcgcaggaggtggcgtgctacctggggatggagctggggagggtgaagatcaagcggttcgcggacggggagctgtacgtgcagctgcaggagagcgtgcgtgggtgcgacgtgttcctggtgcagcccacctgcccgccggcaaacgagaacctgatggagctcctcatcatgatcgacgcatgccgccgcgcctccgccaagaccatcaccgccgtcgtgccctacttcgggtacgcccgcgccgaccgcaagatgcgcggcggccgggagtcgatcgccgccaagctggtggccaacctcatcacggaggccggcgcccaccgcgtgctggcctgcgacctccactcggggcagtccatcggctacttcgacatccccgtggaccatgtgtacgggcagccggtgatcctggactacctggccagcaagaccatctgccccgacgaggtggtggtggtgtccccggacgtgggtggcgtcgcccgggcccgcaccttcgccaagaagctgtcggacgcgccgctggccatcgtggacaagcggcggcaggggcacaaccagtcggaggtggtgcacctcatcggcgacgtcagggggaaggtggcggtgatggtggacgacatgatcgacactgcggggacggtgtcccagggagcggagctgctgcacagggagggcgccagggccgtctacgcctgcagcacccacgccgtgctcagcccgcccgccgtcgacaggctctccagcggcctcttccaggaggtgatcgtcaccaacaccgtccccgtgcttcaccaccggaccttcccccagctcaccgtcctctccgtcgccaatctcctcggcgagaccatctggcgcgttcacgacgactgctctgtcagtagcatcttccagtgaccattcatatacatatacaccacgtactccattaactcaattaatttagtacattccaagcatacatcatgatatatactctcctagtagcttgagaaacatttgtacatacataacgcatggcagctctagctagcctgcatccagttcttcagcaagttttatggcgccgccagctgcaccatcggc

SEQ ID NO: 17514 - DNA, 1925 bp, Oryza sativa
  ref <308>: DATABASE ACCESSION NUMBER: AK067952
  ref <309>: DATABASE ENTRY DATE: 2001-12-06
tctgcgccagcccgccgccgctcttctcttcctcgcgcgcaccagcccgccgccgccagccctctgccgtctccgaccgccggacagccgccggctcagggcgcgcgcccgccgccaaccctccgccgcctccgactacaggacagccgggcgccgccgccggcttaggcgcactccctaccccgctgccagccctccgtctccgcttaccgcctgagcctcctcgccggtgaccctgcttccctgtaagaatggatatgaagtttgacaagtttgacagctagccagccctccgctcgtcggtgaccctgcttccctgctctctacgcgactgagaggaaggagaggcgaggtctgctcgcgccggcactgcgctttcaggtccgtcccgccctcgccgcctcgccctacggtgagcacagtgctgacttctttgttcgcacaaattcatccatctatgtcagtccatgctcagttggtcacattcaagattaacgcaaacaccgaactccaattagcttccttaactgatcgacatagaatgaatcaagacagtcactttcagtaaattggtatgtctggaggttatttcagtttctgacttacatgctttatgttatttcagacggtgatttacatggtatatgctctatgctatttcagtgtctgactttcacagtgctacaaccgtaagcaaccatgaggcggcatcttaatacagtgaaaaacaatgcgaacgccacagcagaattttcaacacagtcaagaagaggcgcactgcataatcaaacttaactgctgccgaggttaggagaaagcatgaaagggagaggtatgcttcactctctacagaacagaaacaagctaggcttcaaaagaactgtaagtataaacaacgtaagaaggaggcgactacatctctatcaggttgcatagatcccattgggtccaaacttaaccatgagaaaaaaaaaattcaccatgacatgtgaattatgtactcccaaaataagagtacatgtctgtgtaggttcacaaattatgaagggtgcccataagagatatcacaaattatgctggctttggtgctacccaagcctgttcaggaaccgtgatactgaatggtaacatgtttgttcctaaaatttctggagatatacatttataggcatcatgtttatttagaacaaagagagttatgcctcctatgatgctgcccaaaagaaatcatgttgacaaaccacatggccatagatcactacttatggtaaatgatgcattttcagattggttggaggcttggagctgtctatttcccttcatttcagccttcctgataaaaatgcatgccgcctacgttaatttctactgtgcagtgacaaagctttgatttgagacactattgtaggtagcaattcacgtgatgcattgcattacttttttttttttactgatgaacacatagctctattgtgcttatattcttctctgttggagcaggccttctatgggtcttggatgtgctcatcaactgttttgatcagtgaaggggatgctgttagtgatggagttagaacaagacataaaggcaagcatgaagcatctatggtgcttgagacctactttcttattacatcacccaattttgcttgaacaagaggcatgcaaaacatttgaaggatggatcatgatcaaaggcagagggtgagctgcgccatgggtcgtgaatcaccgttgctatcgcctccaacttgtcgctggagccacgcgcccagcagctagagccaagatgaattcctgagagagtatatatatatcgacgtgcaagatgtgctttgcacgtgcacgctcactagtaaacataaaaatcaagtttgtcctcgcacgttgtcgcagggaccagaaagcaatgttacaaaactgcg

SEQ ID NO: 17515 - DNA, 1756 bp, Oryza sativa
  ref <308>: DATABASE ACCESSION NUMBER: AK099030
  ref <309>: DATABASE ENTRY DATE: 2002-08-28
gccccctttttccccacgctccggtggctccacgccgccccgcccgccgccgcgaccacccgttccaccggcgaatccgcggctttaatctcccacagctccccgtgagatcacaaagaccgggcgggcgtgggctgtgggctgggatggtgggcgacctctcctccctcctcgccgccgcctcctccgcctcccccgtcgtcctcgcgccatcaaaggagctccatggcgtgcacttgccgatgccgctccaggggaagaggccgccgctgcagccgcaggacgctgccgtccacatcgaggccgccgccgccgccgccgccgccgccttccaggggcaggtgatggtgcccggccacgcgcatgccggcgctcccgccgccttccaggccttcgctgtgcccgacatggccgcgctcatcgacgtccaagactctcaccctgactcagttcaacttagccttgggattgccgagcaatgctcaaggcaggagaaaatcctgaaatttctaaggtcagggtccgatgtgaaagaacttgatgtatctttactgactgaacttacggggcatcaaactctgccaatcaacttgggtactcaaccatacatccctgatgataagttatcagctcttccaatcagcatggccagtcaaccatatatccctgacgataagttatctatctatgagtttgaattggatgagccccagcagtatctaccagaaaatcaacttgtcatccctgatcctcttgtggagtttttccagtcccatggttctgcccttaccatagatcaaaacaggagaatcctcttcaatggaaatggagatgatatgagatatttactttcgattgtcttggcattcaatatgtctaaacgagaaataagcagttgcaagacagcatatctagttccatattttgaaaggaaaaggcgatcccgagcaagcagccatgcatccaattcaaaattagcaagcacagcagttgatgcttcaaaaagcactgcaaatgggaagtcaaaatcttcatcaaggaagaagcagaagagtaaaaatattaaagaacgtgacctgtacccgaagaactatttccatgctagtgaagcatttttatctatgctcctggacaaggacaatagcagctcaacaattcattcactgaaaaaagctggtcctgagatcagtgaactgctgacaaaatgctctattggcatcgctggaactggcttggctgttcttctctcagttgtgtgcaagatggctaccggtatgaagagtcctattgctgctacgcggctggtgaacactggtgttggacttgggctcttttggctctcctgggcagtaaacggattgcgagacacaattactagcatatttagaagcccaggtgacatgaacttgaaggacgaagaggttgcagtcagaatacgaaagagcatgaacgacattctcttcagagctatcactatattggcaatcactgcttttaagtttgcgtaggtggttacatactaatttaccttttccccgacccacctgtaatatataatccaccattttggttcaggagtacagcactagtgcttctgtaggattaagtgccaattgagcaaatgatccccggtaattttgtagaaaatgagaaaccgttgtgaactgtacagaattttgctggcagcttggtgtatatgaaagatgggtttttttcttatctgtagatgaacaatccaatgcccaatgatttatct

SEQ ID NO: 17516 - DNA, 1629 bp, Oryza sativa
  ref <308>: DATABASE ACCESSION NUMBER: AK067953
  ref <309>: DATABASE ENTRY DATE: 2001-12-06
ttgggccccaaatcggcaaaatcgccaccgcacacaggagaggacacagcgacgaaagcagcgaagtcggcggcgcgtcgcgcccccaccgcatcgatcgcctcgccccggtgagccatgtcggcgcgcgacagggagacggccgtggcgctggcccgcctcgccgccgcgctggacggggcggtgctcggcctcggcacggcggcgctcgccgtcgcctcgtgggtcaagtacctcgccgcgtccgggcagctgcggcgcatcgcctccgcgccggcggccgccatacccgacctccgctcgctcctcgcggagtacggcggcggcggcggcgacggcgaccagccgatcctcgcggtggtgcggggccacgtccgcgccgccccccgaggcaagtacctcgtccccccaggctccggcgagcactgcgtcgtcgcaaagcatacccagctgtgcttgttcaatgaatggagaggcatctttgggtggacctttgatctgcatgctctctttttcaaatcaattaaggagcagattataacatcatttagatgggttccatttgttcttgtagatcctgaaaacatgactggaatggtccatgtgaagttagacagggcaatgcaaccattacctcttacaactgtgtatcataaacttaccccagtcgactcaactccttacacattgtttcagactattattggcaatggttacccaattgcgttgttggatgaggaaaagatacttcctgttggaaaggagattacagcaataggctatattcgacctcataaagcaagtgttgagatcagctcatgctcagaaataccttttttcttgtctgaccttaccaaggatgagatggaagccgagttgtcttctcgtgctaaaacactcttttgggctagtgttgttcttggaacaatgtcagtttgcttgctgggctttgcgacttacaggagctggaagaagatcaaagagcggagggaggcaaggcaagcccaagaggtatttcgacaaactactgatgaagttacagacgatcagtctagcgatgaagaggctggtgaaatgggagacgggcaactatgtgttatatgcttaaggaaaagaaggaaggcagcttttattccttgtggtcaccttgtctgctgctgcaaatgtgcactgattgtggaacgtcagttcgacccattgtgccctatgtgtcggcaagacatccgatacatgataaggatctacgacaattgaggcttcttgatgttttgctgataacccttcgacactgtatggtcacccagattgtctgcgagcctgaagacctcaactgatcatcctgcgtgcactagtctaagctacttggctaacaaaactatgttaccctgaatttcgtgtatatatatgacgtgttagtcactcccaggagaactcatatgggcagagatcaccggatacttttcatagtcgcatagaatcctgtagctagccaaactgccagagtcatgagctgacgcctatagttgcaattacagtactaccaagtttttgttggctctcccttctcatgtctgtgcattctgtaaagatggttttgccgctagcaaaagtatgatggttcggattttt

SEQ ID NO: 17517 - DNA, 2435 bp, Oryza sativa
  ref <308>: DATABASE ACCESSION NUMBER: AK067954
  ref <309>: DATABASE ENTRY DATE: 2001-12-06
gtacctctcgggctctgctcttctcgtcttcctcttcctctccgctacgcagccgcggcgcaagtgcttcctctccacgccatcaccgacacaccaccgcgcgcatccgttcccgtccctatccgccgccggagccctagatagataccgcgtcgcggccatgctggaggagccgctcgccgccgtgctccgcggagacgggaggtaataagggaggggagggggaggggttcccgatcggcggggagctggggtgggggcatgagggcgccgcaggagcgcaccgtcagggatctctacgatcgcacgcgacacaaggatctcgcgctccccgaggaatcagtggaggggcgtggcagtggacgacgggtggaggggccggggcatcgggaagtggtcgccaagatggaggacaagcttacagcaagaaaaagaccagtaccactcgacagtcctaatgtgaagacagaatctggcacttgtaatgtctgttgtgctccttgctcctcgtgcctacaccgaaatattgcactcacggattcaaatatggactgtggatcatctcaaacatgctttgcaaggtcagaaacaaaaaacagttcgtttgttcgtgttgataaagggctccgtaccaaggctaaggggggagaaaatgacgatgaattcagtgctacttcaagccctgcttcctattctgaaaatggtgaaaataaagtcatcgcaagatcatctgttgcagcagattccgaggttgacaagccagcaaaacgtagaaggctagtaaatcacggttctagatcacctatagtagaatgccatgatgatagcaactcatgtgttactggagtatcagcagcaagcaagcttctgttagacaagaaaaaggataaactatctacatcagcatcaagtcgtgaccttactgttaactataaggacaatggcattaacagactaagaaactactgcgccgaagaatctacaggaaagaagagatctgatgttcatgccatgcaccgaagttcatctgatagatcattgcctgccgagtctccttttgcaaccaagaggttgctgcgtacccaatcctctctcagtgcatcacatggattatctcctaagagaccaacacatgaatttgggaatgcacaaaataatttagctcaccaaccttgtgagaaagcttcttcaaacaagaccgtagagcgttcactgggaggaaaatcagatccttctgtgcttggtggtgagaggcacagcatgatgactagttgtggtaccagtaatagggataaaatcaaggctggatctttaacaaagaatctggaaaatggcacctcatgctcaagaaatggaagtctagaacatgctgacatccaatctaatgatgctgtcaataggaatgacaatgataaacaagaacgtaatcaaggttgttcaatggatacaggtagtggtagaaagttgaatacacagaatgatgtgatgacggactctgggaattcagagggcttaatagatgttaatgtttgtgatatatgtggagatgttggaagggaatatcttctggctacatgcactaggtgccttgaaggggcagagcatacttattgcatgcgagtgaagttagagaaagttccagatggtgaatggttatgcgaagaatgctgtcttaaagaagatgaaaaccaaacaagaagcaacggtggcacatcaagggataaggttttggacgggaagaaccaaaattcagaaagtacaaacaactctaagacattgaaggttgttgtgactgatttggacagtcaacaaatcacttgtggcactccagtaaatgatcccttggctggtagcaatcaaaagttgcatcttgcgtcatctgatctggaagcacggcaagtgaaggtgtgccaccccaactgctgaaagactggatgtgaagaacaaaaattcaggaattatgggaaatcgcaagaagttgcaagttgttacatctagcttggaagcacgacaatcctcttgtaggacaccaacgtctggaagcttggataagaagaatcaaagcttagacaagaggagtcaaagttcagaagtgttgttaaaacgtaagaagttgcgagttgccactgatatggaatcacctctatcaaatgatggtgtacggagtccacctaaatcatgcaagagatatgcagaaaatactttatcctctactcccaggctcctgaaggcggacagccctaggaatcatgatgtgttctccagggagaactcatttaaaagctctaacaaaggaagtataaagtcgcctgataatgctccaatgaggtctcaagcagttaatagttccgtgaccttacctcggtcatattccttggggaacttggcaaatgttaaaacaccaggtccttcaccacgaggccttttatcaaagc

SEQ ID NO: 17518 - DNA, 1276 bp, Oryza sativa
  ref <308>: DATABASE ACCESSION NUMBER: AK067955
  ref <309>: DATABASE ENTRY DATE: 2001-12-06
gtcgagccagatctagctggtagtacagatgggcagcatcggcggcggcggctcgccggaggagcgcgcggcggccggtgggccggtgtgcgtgacggggtcgaccggctacgtcggctcgtggctcgtccgcgccctgctccgccgcggctaccgcgtccacgccaccgcccgcgacccagacaaggcgtggcgggtgttctccgccgtggaggaggggaaggaccagctgcgggtgttccgggcggacatggccggcgaggggagcttcgacgccgccgcgaccggctgcgtggcgttcttccatgtcgccgcctccatggacatccacgtcccaccccagaatggcaacgacaacaacatcgaggagcacgtgaggacgcgggtgctggagccggcgacgaggggaaccatcaacgtgcttcaatcctgcgtccgcgcggggacagtgcgcagggtcgtcttcacgtcgtccatcagcacgatgacggcggcgacgacgacggcggcgaccgggcggcgcaaggccgtcgtcgacgagtcctgcctccgcgccgccgccgacgtctggaacaccaagcccatcggctgggtttacatcctgtcgaagctgatgacggaggaggcggcattcgggttcgcgagggagaatggcatcaatctggcgtcgctcgtgctgccgacggtggccggcccgttcttgacgccgaatgtgcctaccagcatccagctcctcctctcaccaattacaggtgatccgaagctgtattctctgctggcatctgtgcactccaggttcgggtgtgtgccattggcacacatccaggacgtgtgcgacgctcacgtgttcttgatggagacggagcaagcggatggacggtatctgtgcgccggagggagctatccgatggcccagattgctcagattctgtccttgcactaccctcctttcaaacctgcaaaaaggttaagcaaagatttccatggctcaaacccgtcggtggtatcgtccaagcggctgagggatttggggttcaggttcgagtatgatgttgaggaaatcatcaagaacagcgtcgtacagtgcgttgatcatggattcctgcaggatcccgacagttccaactgttagtggtagtagagtagtgagtagtgacgctcagtgagacagtgactgagccaagttgctgtctggttgggcctgaaaggctttctttcttgtactactagtagttagtacttgtaattcagtaatgtattgtattgacaagagatc

SEQ ID NO: 17519 - DNA, 2380 bp, Oryza sativa
  ref <308>: DATABASE ACCESSION NUMBER: AK067956
  ref <309>: DATABASE ENTRY DATE: 2001-12-06
ggttcgatcgatctcgccctcgactccaagccgacgagaggagttgaggagttgaggccatttcggtgcgtgcgcggcgggcggaggtgatcggtggcgtttcgttccgttggcggcgggcggaggtgattgctcgcgcggcgtggagcggtggggggaggatccgagcgggagggagagcgcgcgcggatggggtggcggagtcgcgcttcggcggtggcggtgctgtggatgctcgccgctgtggtggcggcggctgcgctggatcctgatcaggacgagctcgaacgcgcgtttccaatcgtcgaaccagatcatggtcacactaaactccgtcttgcaaaagaaggtttggaggcaattaaaagaatcgaaacaccaatagctgctgtcgctgttattgggccatatcgatctggaaaatcttttcttctcaatcagcttctctccctaacatgcaataaaggttttggagttggacatatgcgagataccaaaacaaaaggtatatgggtctggggtactcccattgagttagatgtgaatggctccaaagtttctgtcctttacctggacactgagggatttgagagcatcggaaaatcaaatgtatatgatgataggatatttgctctggccactgttttaagttctatccttatctacaatcttccagagacgattcgtgaagctgatatatctagactctcatttgctgttgaaattgctgaagaattctatggaagagtgaaggggcaagatgttgcttttgagccagcaaaactactgtggcttatccagagggatttcctccaaggaaaatctgtccagcaaatggttgatgaagctctccaacgggtgcctaacaacaatggagacaaatatattgatgaggtcaaccgaatcagagactctttggcatttatgggcgataacagcactgcttttagcttaccccagcctcatcttcaaagaacaaagctatgtgacatggacgatcaagaactggacccattatatatagaaaggagagatgagttgaagcaaattgttacttccatgataaaaccaaaacttttgcagggtagaactctaaatggaaaggagtttgtatctttcctaaggcagatacttgaggcgttgaataaaggtgaaattccatcaacaggatcacttgtagaagtattcaataaggcaattcttgagcgctgcttaaagttgtataatgaaagaatggaaagagtgggtctaccagtatcagtggataaacttcagctgattcacaatttggcagaagatgaagctagaaagctctttgacaagcagcattttggtaaacatcatactacccgatccatcctcaagcttgatgaagagatgagaaaggtcttcggaaactttggttttgccaatgagtaccagtcatcgaagctgtgcaaagcaaagttttcagagtgtgaagataaaatggaacaccttcaatccttgaagcttccttcgatggcaaaatttaatgctggatttcttcgctgtaaccagagttttgaaatggagtgtgtggggcctgccaaggaaagctatgaacgtaggatgtcaaagatgctcgcaaggtctcgtgctcttttcatcaaggagtacaacaacaaactattcaattggctggtgacgttctccttggtcatgattgtgattgcgcgctttgtgatcaagttctttttactcgaagttgctgcatgggtgatattcatcttcttagagacatacacgagattattctggtcgtcagaattgttgtactacaatcccatctggcacatgatcgtctcttcatgggaaaccattgtgtataacccagttcttgatattgacagatgggtgatcccaattgttgttgtgctatcatttttagctgtttactggcgttgcctcggtgtcaggaaacgaataggaagatcattgcttcctttgtacagaggttcttacggaagctccagtcgcccaagaacagattaatccaggtctagaaatggtgatgaatgatgcaaatcgctgggaaaatccatgaaaatatccttttgccgtgtgatggatagtggacggcaaaaggatgttggctctatgcacacgctgcaagaagcttctcttgcaatccaagaagggaatatttaggctcagctcacggctcttagtcttactgacccaccaagcaaagcaaacgctaacgtatgaatgataatcaatctttgttctatatcgaaatgcttatagtaacaaagaaatttaaccatactttatttcaatgtaaagatcattctttgtatattatggcacactagataataacaaagaagatctggtagtgtacaggccagagcagccg

SEQ ID NO: 17520 - DNA, 3002 bp, Oryza sativa
  ref <308>: DATABASE ACCESSION NUMBER: AK067957
  ref <309>: DATABASE ENTRY DATE: 2001-12-06
gagcgaaccagccgcgccgagtgccgaactgccgctgcgctcgccttcgctccgcctcaaccacgttgcctcgggcctcttgccaccagcggagccatcagatctgcagctctctccgtgtccccggccgcgtccggcgtgctctctgcgcaggtgatgtcgcagcagtagatagatgaggcgatgagccatccctagaactgaatgcggctgtgcatagcggagagcgtatcctttatggctttgtgtatgtgtatattttttaaggaaagtaagcttactgcttacgagatcacatggtactgtggtagtgtaaatcatgcgccaaaggatcaagagaaatgtgcactaaattgatattgtgtatatcatatccttacttgggcccttctgaataactgaacgcagcttgccatcaaataaaggtactggtatcgtacttctttctaaatgaacctacttagtttcatgcaagagttcatacagacactagaatattcaacagattcattacaattaagaacaagttgatatattattgccctaagaagaattcataacatgctcgaactgatcttttctctatggtataataattcttcttcttgcaaaataaaattagtgttgttattggtcaccattagtaggttgtctgattatcgcggtggttgtattctaggagaacttccagtatttaaatcattattagtgagctggttctttcaaggaaagagttcctttctggtccttacaaattttccaacgataggtgtagcagtctagcacctttcatcattatcttaattcacttgtttaggatcaaaatggccatattatatagtattaactactcgtaggtgaggcaccctcaaatcctatttgccattttaatctctgatactcagtgccttgagggaatttttagcaaacattctgcggactgtgctgattatcattgatttgtattatgtttacataactaccacacatgatcatggatgactaggtaagttacaggatgtcatactcaagtcaactatttattcttggattctatattctctttaagctttgtacattatctgggcaaatcagctagcagcctagcatattaattcaaccttactattccagggaacaacaaatacttaaattcgtaaatttatttgtggtcatatcgtgagacactactcgttgtctaaagcatgatggaagggtctttcctggttagatctctaacgggtgaaaaaatgtgaagaaatagttgttggatgctgttgctgtatttcccaacagatgactacaccagcaacacaactacaaattattcttagctacgtggaaatatatacgtggagaatgacacgtcagtatgaggagattctcaggagactcaccagaagtgcaaagtttttgctgaatagtggacgacaacctctgctccagtttgttggatctctcatctcatatccagggggacaagaacacttgaagcttggcaagaactcacatataccattctcgccacacagtccatgcacatcacacaattttgctatagcctgccatgagactttccagctcccatctgatgcattcaaactatacattcttagattcccatcataatcaagcgtcagccttctgttgattccagcaccccaatcagcagccttgatatccagcttatcacttgagaggaagtgtccttcagtgtcaaggattgcattcctggagccattgtagctagtcctcccaatatcaaacactgagtagtctggacttggccaatagatgctagatatttctggcccatcatacatgaggcgtaacacattgtcattgtcaaaatagaggttgaaataaccagagaccagtcttgtacctttggtgagaggctgtaatggaagcaaggtatccgttggtgcccagaagctttgccataacttcgtgcctgtggagtctctgatgacgagattgccagtgtcaagaaggacagccgttgtgcccttgccagagctcgtcttgctgtcccaatttgcggtgccattgacatcagcgaggaccaggttaccttcatggttcagtgtcaccttagagccatggccatttaccggggacttggggtttgcagaccatacgacggtcctattcttgctgttggtgaaccagatggagaaggagaaagcattccctccaacttcatagaagccacaagagaaatcggcgtttggtgaggtaaggaaggtttgcttatgctcttcaacaaataaggatgagccggtgcttagcatcaacaggggtgaagcatatgagaatggcagtacactgatcaagggaagaatgactagacagagtaatcttgccattttgttttctttgtgttcaggccatcagatcatggtatggaggaaggtgtttgcttccatttatgatgctctgcctcatccttatttgatatccacttgttgcaaaggttctttcgtggagtcaaatttgaatccatgctgcaaattctacatgcctaaaccagtaaaccgggaatagttaagtgctccttcaggacattgtcgcattgcattcagtcctggcggctttcagcttaaatatttgacatgtttcttgtcttggttacaatcttcatgacagctttcacatttttgagagctgcctcattatttctcaataccaacattctgtttggcgtggacgatttggaaagaaagaaacaatcgggtcttcaaccaaaagagtaggacatgggcggaaattgctagggccatgacgggcgaagcagacctttggcggttggctagagccgcgataccggccatggcgacccctatgtcgggtggaaggtcgccacattcgttgggagattaggcttttattttcttcctcctcccccctcctgtatcttgtccccttcgtgtttttgatttttcggcccgctctgtaaatactttattccttaatacaaagatgcgtccctcgcgtatccc

SEQ ID NO: 17521 - DNA, 2058 bp, Oryza sativa
  ref <308>: DATABASE ACCESSION NUMBER: AK067958
  ref <309>: DATABASE ENTRY DATE: 2001-12-06
ggaggttattgctgagttgaaggcagctggtgctacttggattcagtttgatgaacccacacttgttcttgaccttgactctcaccaattggctgcattctctgctgcatacacagaacttgagtcggcactttctggattgaatgtgcttattgagacatacttcgctgacattcctgctgaatcatacaagaccctcacatccctgaacagcgtgactgcttatggttttgaccttatccgtggagccaagactcttgaccttatcaagagtgctggtttcccctctggaaagtacctctttgccggtgttgtggatggacgcaacatctgggctgatgatctcgctgcatctctcactacccttgagtctcttgaggctattgttggaaaggacaagcttgtggtctcgacttcctgctcactcatgcacaccgctgtggatcttgtaaatgagaccaagctcgatagcgagattaagtcatggctcgcttttgctgcccaaaaggtggttgaggtgaatgcccttgctaaggcattggctggacagaaggatgaggcttactttgcagcaaacgctgctgctcaggcctccaggaggtcatcacctcgtgtgacaaacgaggaagtccaaaaggctgctgctgctctgaaggggtctgaccaccgccgtgctaccaatgttagcgctagactggacgcacagcagaagaagctcaaccttccagtccttcctacaaccacaattggttcattcccacagactgtggagctcaggagagtccgccgtgagtacaaggcaaaaaagatctctgaggaggagtacatcagtgccatcaaggaggaaatcagcaaggttgttaagatccaggaagagcttgacatcgatgtccttgttcacggcgagcctgagagaaacgatatggttgagtacttcggtgagcagctttctggttttgcattcactgccaacggatgggtgcaatcttatggatcacggtgtgtcaagccaccaattatctatggtgatgtgagccgccccaaccccatgactgtgttctggtccaagttggcgcagagcatgacctctcgccccatgaagggaatgttgactggtcccgtcacaatccttaactggtcttttgtcaggaatgaccagccgaggtttgagacatgctaccagattgctcttgccatcaagaaggaggtcgaggaccttgaggctggtggtattcaggtcatccaaatcgatgaggctgctttgagagaaggtctgccactccgcaaggcggagcatgctttctacttggactgggctgttcactccttcagaatcaccaactgcggtgttcaggacaccacccagatccacacccacatgtgctactctaacttcaacgacatcatccactccatcatcaacatggacgctgatgtgatcaccatcgagaactcccggtccgacgagaagctgctctccgtcttccgcgagggtgtgaagtatggtgctggcattggccctggtgtctatgacatccactccccaaggatcccgtccacagaggagattgcggaccgcgtcaacaagatgctcgcggtgctcgacactaacattctctgggtgaaccctgactgcggtctcaagacccgcaagtacaacgaggtcaagcccgcccttaccaacatggtttcggccgccaagctcatccgcacccagctcgccagcgcgaagtgaggatatccatagctgcaagttcccttcggttgcgaggacgatgccgtcatagccatctgtttttgaataatctgggtccagtggatccaattgtctgtggttaggtttagtcagtctcggtgggaagatccctcatacccgttttacttttgaatcaatttggtggtttttgaggcagtttgtcggtgtatttgtattgtgtgtaatctgagtgggaatcagcagtgtttcatctgcatctgaatcgttgcggatcaaattacaaaattttcaaggagagttcttgatgttatggtcttccaactacctaagtgttttgtgtc

SEQ ID NO: 17522 - DNA, 2563 bp, Oryza sativa
  ref <308>: DATABASE ACCESSION NUMBER: AK067959
  ref <309>: DATABASE ENTRY DATE: 2001-12-06
tgctctccgcattctgttttctactattcgctagtatactgctactagttcttcttcttcttcttctgtctgatccaccagcaaggttaggttaggcttcttcttgagcaagcgattcggggtagttgagctggttgcaaccccgctttgttgattcgttctttggcggcaaattcgatattctgtttcgctcccccctgggtttctgcttggaatttagggggtcacgagagcaaaccacgcggtcccgttcttgaattgctggagaggggtggggaagaaagatcgggggaagaggggacgcgagctcagcgggctttggtgcttaagttctttcgggtttgtgttcttgtgaagttcctctggcatggggacgaggaggaggaggaatccggtgatattcttgttcttgtggttcgtcatggcgtttgagctgtgtgcatctctgaatcatgaaggtgtcgctcttatgaggtttaaagagatgattgatgctgacccatttgatgctctgttggattgggatgaagggaacgccagcccctgttcttggttcggtgtggagtgctcggatgatggtcgagttgtggccctgaacttaccaaatcttggtctaaagggtatgctacctcaggagattggaacacttgcccatatgcgttccatcattctacacaataactctttctatggaatcatccccacagagatgaaatatttacatgagttaaaggtgttggatctaggatacaatactttcagcggaccatttccatcggagctaagaaatattttatccctgaaatttctctttctcgaaggcaacaaactttctggcagtttgccaattgaatatgagctcgcctcgatggaccagacttctttaaataagatatctacagaaaggaacgaagagaatgccacaagaagaaaacttctagcaagcaaacaaaaacgttcccaaaagaacaggatgcttttgtctggaacatctgaatcaccactggaaaatgttacaatgccaaagtctcaccctgataatataacagtgccacatcgtcccgtagctcctcgatcaagttctccacagccgccactcccttccgaacccattccctcccctgccccttctatgccctcccctgccccttctgtatccaccactacaaacggaacttcaggccaagaaaacaagagcaagacagcaatatatgcatccatcggaggagtggcctgcttggtggttgtggccatgtcagctgcactcatcctttgttaccggcacaggaagactagtactgtggtacctttttctccaacagcaagtgggcaattacatactgctactttgggaggaataactaaattcaaacgctcagagcttgaaacagcctgtgaaggtttcagcaacataattgacacactacctagattcacattgtataaaggaactctcccgtgtggagcagaaatagctgctgtgtctacattggtgacttacgcaagtgggtggacaactgtagctgaagcacaattcaaggataaggttgaagtcttatcaaaagtgagccataagaatttaatgaaccttgtgggttactgtgaagatgaagaaccattcactcggatgatggtgtttgagtatgtttcaaatggaacactgtttgaacacttgcatgttaaagaagcagaccaattagactggcagtcatgcttacggatagcgatgggagtgatgtactgtctgaactacatgcaacagctgaaccctcctgtactgctgagagacctaagtacttcttgcatatacttgactgaagacaatgctgcaaaggtttccgacatcagtttttggggtgataaaaaagaagacgaaaaatctgaggcttctgatgagcacatcacagtttataagtttgctttgcttctgcttgagacaatctctggaaggcgcccatattctgatgattatggcctccttattctttgggcacatagatacctcattggtgacaaacccctgatggacatggttgaccccacactcaaatcagtccctgaggagcaagtcagagaactcacaaagctggtgaaattatgcttaagtgaagatcccatggagaggccaacggtggcagaggtaaccgcatggatgcaagagatcactgggatttctgaagaagaggcgattccaaaaaatagtccgttgtggtgggctgaacttgagatcatcacatcataaaaagccagttcattgcgcaatattattgctgcggcaacggtgtccattcttgcctagatcacagcaaattgtacagtcgtttaggacccattttgggcaggcaattcagttgtacagatatgcctgcactgctcacacccattctttcattctttggttcatgaaacacacataatctctgaagtccactaaacagttgtgacgaaagcgaggagtataaattttctactagtttctacacacaattcctgcactgaacagatttgtttgaacagttgagtctactcagagatacctgaagtctgatggttgatacttgat

SEQ ID NO: 17523 - DNA, 1208 bp, Oryza sativa
  ref <308>: DATABASE ACCESSION NUMBER: AK067960
  ref <309>: DATABASE ENTRY DATE: 2001-12-06
gactggtagaagtagctccgtgttgtagtgttgtgtagcagtagtccaccgctgagaagctagcaaagccagccatccattcagcgcagtactctcgggagagctagaagcgatctattctagccacaaggaggagagataaacgtatcgaaatggagcacatcgcgaggttcttctttggagtttccggcaatgtcatcgctctcttcctgttcctttcgccagttgtcaccttctggaggatcatcaagaagagatcaacggaggacttctccggcgtgccttacaacatgacacttctcaactgcctgctatctgcttggtacgggctgccgttcgtgtcaccgaacaacatcctggtgacgacgatcaacgggacggggtcggtgatcgaggccatctacgtggtgatcttcctcatcttcgcggagaggaaggccaggctgaagatgatgggtctcctgggcctcgtcacctccatcttcaccatggtggtgctcgtctccctcctggccctgcacggccagggccgcaagctcttctgcggcctcgccgccaccatcttctccatctgcatgtacgcctcgcctctctccatcatgaggctggtgatcaagacgaagagcgtggagttcatgccgttcctgctctccctgtccgtgttcctgtgcggcacctcctggttcatctacggcctgctcggccgcgaccctttcatcgcgatccccaatggatgcgggagctttctgggcttgatgcagctgatcctctacgcgatctaccggaaccacaagggggccacgccggcggcggcggccgggaagggggacgccgccgacgaggtggaggacgcgaagaaggcggccgccgcggtggagatggccgacgccaagaccaacaaggtcgtcgccgacgacgccgacgccgacgccgatggcaagtcggcggacgacaaggtcgccagccaggtgtgacgcgttcggggccccgcacggcgcccggccgacacgcacggaagaatgcagcttaaagcattgttgctgctgctggattgattagtggttaagcagattattgctgtcgcctttcttgatttttctttttactgatctctgtctctcgtgcccgatcgagagagtatgatactgtatttcccgttctgttcttgcaagcgtgaagccatttcccatttttttttctaccgtacg

SEQ ID NO: 17524 - DNA, 1363 bp, Oryza sativa
  ref <308>: DATABASE ACCESSION NUMBER: AK067961
  ref <309>: DATABASE ENTRY DATE: 2001-12-06
gtcgagccgacgagttcgccgtcggattctcgcaaaagcggcggcgccgccgacgaggacgagggacagggggagcagtagcaggcgaggcgcggcgcggcgcgggtttagatggagggcggcgagcaggaggagtcgtcggcgcagcggcgggagcgcctcctcgcgctccgctcctccgccgcagcagccccctcgccgtcggccgcaccgcatccgccgccacctgcggcggacgcgtgggatctcccggtgcgcgacctgatggacgcctccgccaccaccaccgccgcggccccacgcccgcctccgcggttcgactactacaccaaccccgccgccgccttcgcctcctcgtcggctgcttcccacaagcgcaaggtcgcggagcccccgcctccgggatcagggaactatggaagcggttatcctcctccacaccagcaccatatggccccaccaccaattcacactccatcccgattgtcccatgattcaccagggggcagtccttggcgaagtcctatgcagttccaggctccgatgtcaggataccgaggacctcctcctggcgctccaccaccatggagcccacattctggcgttccaccaccatggaatccacattctgctcctccatctcaaggcctttatccacatccacctagctatggacccagaaactataatcctggccaaggaggcggccgaatgaactatggacccagaggtagaccagactcaccttatggaagagggaggggccaaaacaactacaacaacccaggatcaaggggaagagggggaagggatggctcaggcactcaaaactattctggatggcaagatggaagagttcgctaccacaaaagcatgactgatgacccatggcgggatttgcaacctattgttggcaacataatgatacccagggatggatccaagtcctggcttccagaatcactgcgtgcaaagaaggatacatctgaccgaggccaagtcaagcctccatcaggattgagcttggcagagtaccttgacttgtctttcaacgaggcttctaatgatacgtagacctttgtattgttaaaaatgctgttgttctcggtagagttttgtgcccgctgtgtttcactttgaacgtggttcgtttctcattttcattgcttccattggcctaggtagtacacacttacatcaggggttacaatgtcctggtgtccatttactagcactgtttatgaaattaccctcatgatgtggtaacatttttacggttatttgaggcactaatacatgtaggaaaaatgataaacggtagtataatttataattttatggcttgaggtgtggatacgtgtcg

SEQ ID NO: 17525 - DNA, 1308 bp, Oryza sativa
  ref <308>: DATABASE ACCESSION NUMBER: AK067962
  ref <309>: DATABASE ENTRY DATE: 2001-12-06
gaatctcatcaccatcgaatcatcagcatacacacgatggcgtcccaacgccggcgatcatctgccaccgccgtcctcctctccttgctactgctcctccagttggccgccgcctatcctcaaggaaagaggcagaacgtcgccgtcttctggggccgcaacaaggccgagggctcgctccggcaaacctgcgacaccggcgactacaacatcgtcatcatctccttcctcagcgtcttcggccacggcaaatactggctcgacctctccggccacgaccttcgcgacgacaccatcgtcaacggcgtcgacttcttcatcgacaacggcccagccgaccactacgacgacctcgccaaccgcatcaacgactacaaccagaacatccgcgaccccatcggcatcatgctcacggcgacggtgaggtgctcctaccctgacccgaggatgaaggcggcgctggacaccaagctgttccggcgcatccacgttcgcttctacgacgacccgagctgctcctataaccacgccgggctcgccggcgtcatggcgcagtggaacaagtggtcggcgacgtaccccgacgggcagatcttcctgggggtcgtcgcggccaacttgacggggaagaacgacatggtcgccgtcggcgagctccgcgacaagctgctgccggcggtgcagaacacggatacgtacggaggagtgatgctctggaacagctactacgactcgctcactcactacggccgatacgtcaaggacttggcttgatataattaattaaactcaaatcaaccaataattacttgagcccgtgcatgcatgcatgcagctcaatcactatctcagtaattacggcgtcatgtgtttgatataggaaagtaatccctacgtaggccattctcaacccaatgactaagatggtgtctatagcattaaataaggtgccacctagaatgaaaaatgatgtgacaagtaaataaatgaggaaagagaaggaaatcatgtcttgcatgagacatggtttctacacaacatccaagacatcatgtgagataatgagtattaaatttaagtatggaatagtagtgtttgcattggaagagtggcgtctagtactagtttcttgatgatgtggagtttatgaaaatcatgttttgggttgggatgttgtttttcttttgacctagcttgctagcgaaagctagtgttaattacatttttaatttgtcataaatgcatgtgtgatcgatgtgtccttaattagtctttttttttgcaatctatggtagtagttattccatg

SEQ ID NO: 17526 - DNA, 3353 bp, Oryza sativa
  ref <308>: DATABASE ACCESSION NUMBER: AK067963
  ref <309>: DATABASE ENTRY DATE: 2001-12-06
tttgaaagggatttcttctcaagttaaggatgaggacagcatcattcattttttttttaaaaaaaagcattggcaaattgtcctctaaattgtaagatttatttattatcatttgccatgttctagatattgatatgttgaaaaattgtaaattaaatgttgtaattctatatgtggaggattttatatgaaaattctatgaatatacaaaattatgctcaagtttgtgttatatccgctatagaatatacacaactaatagtttagaattgtgtgatattatacatgccaaacattagtcttttgctctaaaaaaaaattcctacccttttacgttttgaatacacaactttaaaatcctgggcctgctcatctatgatgagtcagcgatatgctgctgatttgctgccattgtagtttgtaggatttgtagattctgatgaagagtaatgtggatattgcatcgtttgaacttgcacattttgaacgtgctttttaaaattagtcgattattgatgttaaaagatattattgatttatttttatcacattttaattaaatttgtacttgtatatgggatttgcggtgttcggaaattttttatatgtgatgtgaacctttgaagtaggactacccaaccaaaaaatcctggctactccccgctccggcacatgcctccacatccgaggctcctactcaacgcagtgttaccgggacacggacacaggtgtcggagtccgactcggactcgagtgtccgacttggcaagctgaaaaaaaaaaggattcggggactcgccccatatatatatatatatatttttagtgaaaatattatatatatcatcaaatataacatactcttatagtcagtaaaacactaaaaacatatggtgtcacacattattctgcacaaaagatcttatcttcttattagttcccacatagaacaaaaactgccagccaaaataagtgaatttcatgtgtagaggatcccttgttcacaaaaaatcccactgctatcctgccgcccacaggccacatgccaatactagatttgtgaatgactggatgcaagtaagtcgctgctgtcattgtatgttttggtattggcctattgggcaagacatgaataggaatggggaagtagtaattttgttaagggtggtcggagaaattggaacagagctgatgcacttgataaacatgcagggggcagttgattctttgatctacgatttagcattactgaggcaaaatgtgtgcatccttgctttttttcatttttgatggcgtatctaccttagaacctctgcctaagatctcttgttctcgactccagtttaccttgcgaattggtcttcatggcatgggaactcactgaggtcccaggcaacccaactccctccctccgtggctctacagttgaagtgattgctgccaagattgagcccaagttagccaacagtctcattcggcaattgagtcaagcatgcccattggagaatcttcggcatgtaaaacgggtgcgtcggtgctgtgaatatggtgaaaaatctgagttatcaatcatcttatgccttgcaactgggcctgaacattgtagcgaaatgtttcctcaagatgtaaaaaagattgtaggtacctacgaattgaatactttcattgcaaaagtaagtacttttgttaaccttgggagttcggaaatttgagttctctgttgtttttgtaggcatattggacttatttactaacttaatcatgtcatacattcattaagatcaaaattattggtctctagttttacttatatggaaattatccaccaagatagtgattgttccgtgttaaatccttacatgtttctttgtgtgacctacaggcaatgtgaagtgatatttaatcctcctgaatccatcaacatctaaggaatgtatggatcatagtagtaataatagataaagatatagcattttatctttaggtaatccttccagtcacaaggaatgtttggacatctgcaaatgaaagttatgatatattgaaaaatacagtatgctccaaaacaatctgcaaatatcattttcttgtgtgcaatctaaatattcgtagagatcgtgttgatagccaaagtttatccgcacaagtgcacatgcaccaaaatgtcacttatttgtgacaggggagtatcattcttcaagcaattgattagtaagaagattttgctatgttcttatgatatgaatctgtctttatattaggcatatcatatatcatttattgttgctagaaatctttctcaggttgcgaggtttcctgctacttcaaaagaggagtgggaggaacaatgcaaactttggccaacatcttatcatcccccacacgacttggatggtgtatctggattcaaagagtgtgaattgccatcaatatttaattgcatgagaactgcactgcggttatctgaggtgggcaatgctgctgttgttgttaatccatcaaccatgcagattattgcaaaggctacagaccaaacgctccaacatgatagtttaaaaagtaacaaatgtgctgaattgaattcagacagccccttctcatcacttgaagtacctgagaagaaagggagcaggttgttcctgtcaaactccaatgtttctaaatgcaacagcctgaatatggaagcctcatgtttaaacccttggggatggatgaaaccaaggccgtctgagcagaagtcattgccctgtgaaggtggttttccatggcaccctctgagacatgctgccatagttgcgattgaaaatgctgcggagagggataaagtgatgttcccttcaattatatcatcaaccaaaccaaattcagatggaaatatggagtattattctgttaatgaatcagcaaaacgactaaaggtggatagaaatgacgacaaaaaaattgcacatgaagcaatctgcgatgacttgtcagaaaccagaccatacctttgtacaggatttgacatttacctagtctgggaaccttgctcaatgtgtgcgatggcacttgtacatcaaagattcaaacgtatcttctatgctttcccaaatccaattactggagcactgggcagtgtctacagattgcacggggagaaaagtttaaatcatcgttactctgtatttagggtaaaagtgcccgagtcatattcgaatagttcgggcgattgttctgacaaatgctgatacagcttggcgtgctctgcatgaagggtgcgccgttttccagttttgatttttgtgaacagcttggcatgttgtatcattatattatgtaattcaacctcaactgcatagtttgtactagcc

SEQ ID NO: 17527 - DNA, 1795 bp, Oryza sativa
  ref <308>: DATABASE ACCESSION NUMBER: AK067964
  ref <309>: DATABASE ENTRY DATE: 2001-12-06
gaaggcccaatcaccagctgccactctcaagaacctgactttggatcgctatcccttttgcttcttattagtgctcagggaaagaaagctatagcagtagctaaataagccagagagaggctaagagagagagaggtgaggggagagaagaaatcctcgcagaattcgagcaagaaccgagggagatcgatcgcctcttgtcctcgttccgaggcagagatcgacctgaagtgagctgagctgcggcaaggaggaggaggaggaggaggaggagaaggagattggagatgatgatgagggatgtgtgcatggaggtgctgcctccgatggaccactacgcgtcgagggggaactggttcatggcgcgcaagtggtcgccggaggagaacaagcagttcgagcgggcgctcgccgggctggacctgcggtgcccggactgggaccgggtggcgcgcgccatcccgggcaggtcggcgctcgaggtcatgaaccacttcagggacctcgagctcgacgtccagcagatcgagaatggcatggtgcccttcccggtctacggcgccgccgccgccggcggcgcgttcacactgcagtgggatggttcccatggcgtcggggacttcaggaacgcgtaccggttcggcggcggcggcggcgggaagcggcacttcggccgtacgccggagcaggagaggaagaaaggcgtgccatggacggaggaggagcacaagttgttcctcttaggactgaagaaatatgggaaaggggattggaggaacatatcccgcaatttcgtgcagacgaggacgccgacgcaggttgccagccatgcgcagaagtatttcatcaggctcaactccggtggcaaggacaagaggagatccagcatccatgacattaccacggttaacctgacggatgaccggcctccctcgccatcacagtcctccttgatcagcaatcagtccaacacatcaactctgaccgcagcggttgcccccttctcatcgacggccgatgtcaagccacagaatgccgcgaatgcgtccttcaattcgccaagccggacacttgggatggcgggttacgggatgggattgcatgatcaaggattgcagtgtggtggtcctctacatgatcagttggccgcgagccgaagcatattgttttagatgaaaccaatccaggcagcaccatggatcagatgtctagtgtaatattgccctgcttgtagcttcatcactacctgtattgaagtaattaattatggggaatttttcggaacataacagagggggtgtggagggatctttgtgccatgttggtgactgataacctgtgatccataattgttggcaatactgagaatgtaacgaaacgaacgtcaagaacttgatgccggtggtattttcagacagtgattgctgctagtgctgaacactgatcatgcatgaagtggactttgtattcaatcatggatccagcttttgtgaggtggatgaggagaattctattcactatgttcttctggtcagtgatgcactgagaaacaccggttgccatctgattgaggggtttcagatcatgctgtacttcacacatacttatccacagttctatcaatttgctcattggtgctccccccatttgatgtttgcatagaatttatttggataaacggaaaataagtttgctctgagtcattcagcattattactactttcagttgctcatctagtcaacttttcttgtttgtagcttcatttttataataaaataataacttctttttttt

SEQ ID NO: 17528 - DNA, 1354 bp, Oryza sativa
  ref <308>: DATABASE ACCESSION NUMBER: AK067965
  ref <309>: DATABASE ENTRY DATE: 2001-12-06
ggtctggtctgggtctggtcggtcgtcttccactccatccgatcgaccaaccagccgatgggttctcgcggctgcttctgcaagcgacccgcggccatgggcaatcttcttcttcttcttccccacccggccaaggccaaattgaggcctcccaccacggcggcgaagcgcggtacactcttcttctgcagcctcagcaccgatggtccgtcgtcgacgatgaccgtctccatcactggcgccaccggtttcgttggccgcagattggtccaaaagcttctctccgaagatcacaaggtttgcgtcttaacgcggtccgccagcaaggccacatcagtttttccggcttccacatttccaggaattacaatagccgagcagggggactgggataagtgcatccaaggctccactgctgttgttaacttggcaggcatgcccataagcacaaggtggtcacctgagattaagaaggaaatcaaggaaagccgaatcaacgttacatcaaaagtggtgaattacataaataatgccagtggtgatgctcggccctcagttttcgtgagcgcaacagccattggcttctatggtaccagtgagatcagtagcttcgatgagtcaagtccgtcaggcaatgactatctagcagaggtgtgtcgagagtgggaggccagggcatgccaagtaaaccaagaggatgttaggcttgtgcttcttcggattggggttgttctcggcaaggacggcggcgctctagccaagatgattcccctttttatgatgtttgccggcggccccctggggacgggacggcaatggttttcctggattcaccaggacgacctggtggacctcatctacgagtccctcaagaacccatcatataaaggcgtgataaacggaaccgcacccaacccggttcggctgtcggagatgtgcgagcggctggggcgagtcgtcggccgcccctcctggctgccggtgccagaaatcgccctcaaagcggtgctcggagaaggtgcatcagtggtcctggaagggcagaaggttcttcctgtgaaggccaagcaactgggcttctcctaccgatacccctatgtacaggatgcactccgggccattgccagggacctatgactgatcgactcagatgaatactcaaatcgatcgatccgccgtgcacgcacaacagtagatatcaaaattgaaatatattatatataccaaaagcaaactattattgttgttggcttgtattatctctgattaaactaggccatacgtttcattggatggcgtacgtctttccaccatttttagactgaagcaaatatatgcacgtgaatgaatgagc

SEQ ID NO: 17529 - DNA, 3890 bp, Oryza sativa
  ref <308>: DATABASE ACCESSION NUMBER: AK067966
  ref <309>: DATABASE ENTRY DATE: 2001-12-06
ggcatcaaggctaggaccaccgtcgaacacctgctgtgcgcaccgccctgcgttcctttgcttcaccaccgtgtgtgcacagatcccagggtgtgcacagcagcatagataaatacagttgtagcctgaaagatagaacttataatctattgcttaaaagtttaaagaaagttgttcagagaaggaatataagatgacggatacagtactcagcattgcaaagtctctggtgggaagtgctgtaagcaaggttgcttcggttgccgcagaaaagatggtcttgctgctgggagtgcagaaggagatatggttcatcaaggacgagctacaaaggatacaagcatttttgatggctgctgaaccatcaaagaaaagcatactattgaaggtttgggtgcagcaagtaagggatctatcctatgacattgaagattgccttgatgaatttacagttcatgtgagcagccaaaccttgtcgaggcagttgatgaagctaaaggatcgccatcggattgccatccagatccgcaatctcaggacaagaattgaagaagtaagcactaggaacatacgctacaacttaatagagaatgacctcacctgcaccactactgatgagaggaatttatttatggaagacattcgcaaccaatcagctaacaacattgaggaagctgatcttgtgggtttttctggacccaaaagagagttgcttgatcttatagatgtccatgccaatatcggacctacagaagtcgtatgtgttgtcggtatgggtggtttgggtaagactactattgcaaggaaaatttatgaaagcaaagaggacattgcaaagaatttttcttgctgtgcttggattactgtctcacagtcctttgttaggttggaactactaaaggatttgatgatgaaactttttggagaggaagtagtgaagaagcagatgagagaactcgaagggaaggttccacaagtagacgacctcgccagctacctcaggacagagttaaatgaaaggaggtactttgttgtgcttgatgacgtgtggagtacagattcatagaaatggattaatagcattgccttccctagaaataacaataaagggagctgggtgatagtaacaacacgagatgttggcttagctaaggagtgtacttctgaattgcttatctaccagcttaaacccctggaaataagctatgcgaaagagttgcttctaaggaaagcaaataaaacaacagaagatatagaaagtgataaaaagatgagtgacattattactaaaatagtaaagaagtgtggttatttaccgctggctatactcacaatagggggcgtgcttgccaccaaagagataagagagtgggaaaccttttatagtcagataccttcagagcttgagagcaacccaaaccttgaagcaatgagaaggatagtgaccctaagttacaactacttgccatctcatcttaagcaatgctttttgtatctaagcatatttcctgaggattttgaaattaataggaaccgtctggtaaatagatggatggcagaggggtttattaaagctagggctaatatgactattgaagatgttgggaaaagttactttaaagaactcatcaaccgtagcatgattcagccatcaagagcgggtgtacgaggagagttttagagttgtcgagtccatgatataatgcgtgatattacaatttcgatttctagagaggaaaattttgtattcttacctaggggcactgactatgaagcagtacaggggaacactcggcacatagcatttcaggggagtaagtattgctctaagataagctttgactggagcattatacggtcattaactatgtttgccgagaggcccgtagaactagagcattcagtttgttcatctcagttgaggatgttacgggtcttggatctaagagatgcacaatttactatcacacaaaatgatgtcaacaatatagtgctcttgtgccacttgaaatacctacgcattgcaagatacaataatgcatcatatatttactcacttccaaaatccataggaagactggatggtctgcagacattggacttggattcgacgaacatttcaacactgccaactcagattactaagcttcggagtctccggagccttagatgcatgaagcaatatgatttttcttctttcacaacatgtttaactgacacattgtgcctgcccatgatattcacaccttccgttagtacctctgatcgtgctgaaaaaattgctaacttgcacttggccaccaaaagcttccgttcaaaatcaaatggcgtcaaggtaccaaaaggaatatgtgggttgagagacttacaaatattgggggtagtggatattagaaggactagcagtagagtaataaaagagttggggcagttaagcgagctgaggaaactatatgtggtaacaaagggatctacaaagttaaaatgtgagatactctatacagccatccagaagctctattccctacaatctctccatatggatgctgtgggatgcacaggtattggaacacttgagtgcctagattctgtttcatcgcctcctcccctattgaggacactcaggttgaatggaagtcttgaagagttgcctaactggattgagcggctcactcacctgaggaaattctacttattgaggaccaaactaaaggaaggtaaaaccatgctgatacttggggcattgcccaacctcatgcttcttcatttttgtcacaatgcttaccttggggagaagttagtattcaaaacaggagcattcccaaatcttagaacacttgtgactttcaatttggatcagcaaagagatattagatttgaggacggcagctcaccccaattggaaaagatagaaataggcaggtgcagattggaatcagggattattggtatcattcaccttccaaggctcaaggagatttcagttgaatacaaaggtaaagtggcgatgcttgctcagctggagggagaagtgaacgcacacccaaattgtcccgtgctgcgaatggcaatggaccgaagtgatcacgatcttgctggcaacgccaaaggatctcctccctaagcaggagggagacagctcgtaagtaatcatgttgacaacaaacgacagagaacagatatgcatagctcaaggtggtttgatcaagtgatcatctcctccattggcacctccggtcgtccctgcttctgcggctgcgcacacctcgctgttccaaggaggggtgctgacataaggtcagggtttgaagtttcggttcgaaatttcacccccccccccaccgaaatgctcacatctcgcccgaaattttcggtttttgccatttttttgtgaatttggtcaagttttattcaaattcattcaaaatcagtcaaaatttcaaataatttcgtacgaaaaattctgaaatttccaaaatttcggttctttcgctcacctccggtagaaaaccaagtttcgaaatttaaaaccctgcataaggtggcttccactttcttccatcgcgtctcactctctcgattcttccctctcgggtatgaatggttcaatctgatcttttctcgcgatatgctactggttccagcatgagcatttgaaccagcagcttagaatttttcatttgatcaggtgttttatttccacttcttacctgggcagtctacttttccaattcatccagaacagaaaccatgtttattacactatagaggggaacagcatttcaggcacgattgtggttttgttatttccattttggtgtgcacacgaggtgtttgctataatgtctgaaagagcttgtgtatacatggttggttcaacattatgtgtt

SEQ ID NO: 17530 - DNA, 3802 bp, Oryza sativa
  ref <308>: DATABASE ACCESSION NUMBER: AK067967
  ref <309>: DATABASE ENTRY DATE: 2001-12-06
gagtggagcgcgagctgaagaggaggaggggagtggaggaggcggcgctgcagatctggaggcggagcggcgaatggtggtgtcgccggcggccgccgcgatctaggcttgccgcgcgcgcgcggatctgcgagctgcgtagccgtttctcgctgtgagtggaggaggaggaggaaggggaggaggatggcggcgaacgcggggatggtggcgggatcccgcaaccggaacgagttcgtcatgatccgccccgacggcgacgcgccaccgccggctaagccagggaagagtgtgaatggtcaggtctgccagatttgtggcgacactgttggcgtctcggccaccggcgacgtctttgttgcctgcaatgagtgcgccttcccggtctgccgcccttgctacgagtacgagcgcaaggaagggaaccagtgctgcccccagtgcaagactagatacaagaggcacaaaggtagccctagagttcagggcgatgaggaggaggaagatgttgatgacctggacaatgaattcaattataagcatggcaatggcaaaggtccagagtggcagatacagagacagggggaagatgttgacctgtcttcatcttctcgccacgaacaacatcggattccccgtctgacaagtgggcaacagatctcaggagagatccctgatgcttcccccgatcgccattctatccgcagcggaacatcaagctatgttgatccaagtgttccagttcctgtgaggattgtggacccctccaaggacttgaattcctatgggattaacagtgttgactggcaagaaagagttgccagctggaggaacaagcaggacaaaaatatgatgcaggtagctaataaatatccagaggcaagagggggagacatggaagggactggttcaaatggtgaagatatgcaaatggttgatgatgcacgtctacctctgagccgcatagtgcctatcccttcaaaccagctcaacctttaccggattgttatcattctccgtcttatcatcctgatgttcttcttccaatatcgtgtcactcatccagtgcgggatgcttatggattgtggctagtatctgttatctgtgaaatttggtttgccttatcctggctcctagatcaattcccaaagtggtacccgataaaccgtgaaacataccttgacaggcttgcattgagatatgatagggagggagagccatcacagcttgctcccattgatgtctttgtcagtacggtggatccactaaaggaacctcctctgatcacagcaaacactgttttgtccattctggctgtggattaccctgttgacaaagtgtcatgctatgtttctgacgatggttcagctatgttaacttttgaggctctgtcagaaactgcagaatttgctaggaagtgggttccgttttgcaagaagcacaatattgaaccacgagctccagagttttactttgctcaaaaaatagattacctgaaggacaaaatccaaccttcctttgttaaagaaaggcgggcaatgaagagagagtatgaagaattcaaggtacggatcaatgctcttgttgcgaaggcacaaaaagtacctgaagaggggtggaccatggctgatggcactgcttggcctgggaataacccaagggatcaccctggcatgattcaggtgttcttggggcacagtggtgggcttgacactgatggtaacgagttgccacggcttgtctacgtctctcgtgaaaagaggccaggattccagcatcacaagaaggctggtgcaatgaatgcattgattcgtgtatctgctgtgctgacaaatggtgcctatcttctcaatgtggattgtgatcactacttcaacagtagcaaagctcttagagaagcaatgtgcttcatgatggatcccgcactaggaaggaaaacttgttatgttcagttcccacaaagatttgatggcattgacttgcacgatcgatacgctaatcgcaacatagtcttctttgatattaacatgaaaggtttagatggcattcagggtccagtttatgtgggaacaggttgctgcttcaataggcaggccttgtatggctatgatcctgtactaactgaggctgatttggaacctaacattgttgttaagagctgctgtggtggcagaaagaaaaagagcaagagctacatggatagcaaaaaccgtatgatgaagagaacagagtcttcagctcctatctttaacatggaagatatagaagagggcattgaaggttatgaagatgaaaggtcagtgctgatgtcccagaagagattagagaaacgttttggtcaatcgccaatttttattgcgtccaccttcatgactcaaggaggcataccaccctcaacgaacccagcatctctactgaaggaagccatccatgttatcagttgtggatatgaggacaaaactgaatggggaaaagagattggctggatctatggttcagttactgaggatattctgactggatttaaaatgcacgcaagaggttggatatcaatctattgcatgccaccacggccatgcttcaagggttctgcgccaatcaatctgtctgatcgtcttaaccaagtgctacgttgggctcttgggtctgttgagattctgcttagcagacattgtcctatctggtatggttacaatgggcgtttgaaacttctggagaggctggcttacattaacaccattgtttatccaattacatccattccacttatcgcctattgtgtgcttcctgctatctgtctcctcaccaacaaatttatcattcctgagattagcaattatgctgggatgttctttattctgcttttcgcctccattttcgcaactggtattctggagctccgatggagtggtgttggtatcgaggactggtggagaaatgaacagttctgggtcattggtggcacatctgcccatctcttcgctgtgttccagggtcttctgaaagtgttagcaggaattgataccaacttcactgttacctcaaaggcgtccgatgaggatggtgactttgctgagctatacgtgttcaagtggaccagtctcctcattcccccgaccaccgtgcttgtcatcaacctggtgggcatggtggcgggtatatcatatgccattaacagcggttaccaatcatggggtcctctctttggaaagctcttcttctccatctgggtgatcctccatctctaccccttcctcaagggtctcatgggcaggcagaaccgcactccgaccatcgtcatcgtctggtcgatcctcctcgcgtcgatcttctcccttctgtgggtcaagatcgatcctttcatttcgcctactcagaaagccgtcgccttggggcaatgcggtgtgaactgctgatcggcaccgttacgaagatgaacttcaatcaatcaaggtctacccccccttgtgtaaatacctgaggggggctagaatgggatcttctttttgtgtagatgaagaccttttttatctaagttatgccactgtttattagctacttcagtgctggcgctagctgctgatacgatggaactgtgaagccttattttgcctgcgaagaagccagcccagcagcgtaaattgtgaatttttttcttcttttgtgacacccgttattttagtcatttgtttgaggggtcgttgttacacatactatgggatgttatttatacggatatattccaattacattcttttgcggtgaacattttaattatattcgtagcatataatgtaaggc

SEQ ID NO: 17531 - DNA, 4320 bp, Oryza sativa
  ref <308>: DATABASE ACCESSION NUMBER: AK067968
  ref <309>: DATABASE ENTRY DATE: 2001-12-06
gggccgcccgctccccgcatcctcccatctcgccgcgttatcgccttccgcctcctcctccgccgccgcctacgcttctcgccgccgccgccgccgcctacgcttatcttgttgtgctggttgcatgcgccgcggcgcaggggctgacggagaggggtgcgcgtggaattgagaggagtggcggatggaggcggtggaggagcaggtggcgccggagcaggtcatcagcacgaggggaggctcggtgttcgggaagaagaccatcctcaagagcgaccacttccccggctgccagaacaagcgcctctcgccgcaaatcgacgacgcgcccaattatcgccaggcgggttctttacgagttcatggtgttgcaatgccgacaatgaagggaattgtaaatgtgttaaatcacattggagcacaaaagaaaggaaaacaaacccaggttctatggcatagtcttcgcgaggagccggttatctacatcaatggtcgcccttttgttctgcgagatgttgaaaggcccttctcaaaccttgaatatacgggaattaaccgggaaagagtggaacagatggagtttcgcctgaaagaagatattcttcaggaagcttcacgatatggtaataagatcctcgtcactgatgagctgccaaatggtcagatggtggaccagtgggagtcagtggtaactgatacagtcaagacccctcttgaggtatatgaggagttgcagcatcaaggataccttgtagattatgagcgtgttcctattactgatgaaaaggccccaaaagaaggagattttgacaatctggtacgccgaatctcccaagttgatatagaaactggaatcatatttaattgtcaaatggggaggggaaggacaaccactggtatggttatagcaacattgatttatctgaaccggataggatcatcaggtatccctaggacaagttcaatcgggaaagtcttccattctggaaatgatgtagatgactatatgcctagctcagaagaagctatcctcagaggagaatattctgtcattaggagcttggtacgagttctggagggtggtgttgaaggaaaaaggcaagttgacaaagttattgataaatgtgacacgatgcagaacttaagagaggctattgctacataccgcaatagtattcttcgacaacctgatgagatgaaacgggaggcatcactttccttctttgttgagtacttggaacgttattacttcctcatatgctttgctgtctatgttcattcagtgtgctctgctcaacaatcaaacttttcagaagaagttagtttttctgattggatgagagcaaggcctgaactgtacagcattcttcgaaggctgttgaggagagatccaatgggcgctcttggttattcaagttcgaaaccctctcttgcaaaaattgttgaatatgctgatggacgccctcatgagatggatattgttgctgccatgagaaatggagaagttcttggacgccaaactgtgttaaaaagtgaccactgcccaggttgtcacaaccttcatttacccgaaagagtggagggtgcacctaattttagggaaattcctgaatttccggtttatggtgttgcaaaccctactgttgatggcattcgagctgttattcagcgtattagtacaagcaagggagggcgaccaattctgtggcataatatgagagaagaaccagttatttatataaatgggaagccatttgtactacgtgaagtggaaagaccatacaagaatatgctggagtacacgggaattgatcgtgatagggtggaacgaatggaagctcgtttgaaggaggatattttacgggaagcggaacgctatagtggggccataatggttattcatgaaactgacaatggcgagatatttgatgcatgggaaaatgtaaataatgaagctgtcctgactccattggaggtgtacaaacttctggagtctgaaggtcttccaatcaagtatgctcgagtgccaatcactgatggcaaagcccccaaaagttcagattttgacacaataaccttaaatgtggcagctgctcacaaggatactgcatttgtttttaattgccagatgggcaggggaagaacaactacaggtactgtgattgcttgtctgctgagattgcgaattgatcatggcagacctattagattgccagcttgtgaatataaccatgaagatccaaatgaattgggttactcaagtggagaagaaacaacggatcacaatggtcaccttaattcaagttcaccaagacctcatactgtgacagaacaacatcctagatttggaattgatgacatacttgttttgcggaagattacaagattatttgacaacggaatcgagtgtagacaaactttggataatgttattgacaaatgctcggctttacagaatattcgccaggctgttttgcagtacacaaaagtaattaaccaacagcatgtggagcaaagagttaagagggttgcattaaatcgtggtgctgaatatttggagaggtacttgaaattagttgcattctcagcatatctttggagtgaagcatttgatggtttctgcgggcaaggagaggcaaagatgtcatttaaagcatggatacaccagaggccagagatccaaagcatgaaatggagcatacggttacgacctgggcgttttttcactgttaatgatgaatccaaagcatcttttcagccttcacaaggtgacgtaatgatggaagccattgtcaaagctcgtaatggttctgttttgggaaagggatcaatactcaaaatgtacttctttcctggacagaaaaggtcaagcactattaacttctgtggtgcaccacaagttttcaaggttgatggataccctgtgtatagcatggcgacaccaactgttgatggagcaaaagaagttctgtcatatttgggctctaaagatactgggagaagcattcctcaaaaggtggttgtcacggatcttagggaggaagtggttgtttacatcaagggaacaccttttgttttgagagaactagatcagcctgttgatactcttaagcatgttggcataagtgggccaatggttgaaaacatagaggcaagactaaaggaggatatactctccgaagttaaacaacaaggtggtcggctacttctgcaccaagaagaatttaactcgtcaacaggccaaagtagtgttgtaggtttttgggaacatataggtacggaggatgtgatgacaccggctgaagtatatagtgtactgagaaatcaggggtactgtatcgactacaaaagaatacctctcaccagggaaagagaagcattagcttctgatgtagatgcaatacaatcgtcggttgatgagaatgctaggtactacctctttatttcacacacaggatatggtggtgttgcttatgcaatggccattacatgcctgggactgggagcagatgaaaagttcatcatggaacaaacagcagaaacacacttcatatcaacttctcttacaaaaagtgtgtctatcaaaacatcagctgatatagctctcaagcaaggtgactaccgtgacatattaaaccttacaagggtactggtacatggcccaaaatgcaaagaagaggttgacactgttattgacaggtgtgttggtgctgggcatttgcgggaggatattatgcattacagaaaggcactgcaagattgttcacttgatgatgatgagacatggtcatatctaatggatatgggcactaaagctttgaggcggtacttcttcctgatcaccttccgatcctacctctactgttcatctttgcgtgagccaacatttgcatcatggatggaggccaggcctgaacttggccatctctgcgataatctaaaactggataaatagatatatgagttatctctccattggatcattgaacagcttgctagttcgtggacttgaggaagatagggctgaaataatttcttaggaaggaggaaacataagaaccggcagaaaggagtagttcgtaggacattttaccagacttgttggcgccaattggcaccagcaaggatgtatatataattccgaggttaaattgtagaggaacatagctgaggttactagttttgtttttctccgtttattttgcaataaatgttatgtaatttgtttatatatatgcatatccttgttctgtctgcttctttatcagtaactcaaaactgttgccacatacggatattgtaatacgagctgtattatgc

SEQ ID NO: 17532 - DNA, 2716 bp, Oryza sativa
  ref <308>: DATABASE ACCESSION NUMBER: AK067969
  ref <309>: DATABASE ENTRY DATE: 2001-12-06
ggcgctgctgcccacagcccacacactctccctcgcccatggagcggctcaagtcggcggtgccggcggagctccggcgagccgtcggcgagggcacggcggccgacctcccctccaccacctcccgcttgctcgccttcctcgaagctctccctctcttccgccaggtgattggtgagctgaccgacccggagctcgcgctgtgccgcaaggacaaggggagggcggccgagctgaaggggaaggggaatgcgtgcttctccaagagagagttcgagcaagcgcttggattctactcgcaggcgttacggtacttcccgattagtcctgatggaacggatgcaagcttgatagccacattatatgtcaaccgtgcctctaccatgcataaattgggccttttggaagagtgtctgcgagattgcgacagggccatttctgtttcacctaattatgctaaggcatggtacagaagggggatggtaaatgcatcttttaggaactattcatcttccatacatgatttggaggttgctttgagcatggaagtaacctcttctggaaagagtaacatagaacaagagttgaagttgattttacaaaagcatcaaaatgtgaatgaagttgggacagcaagcagcaattgcatcaatgcagatatgccacatacagagcaacagcctaaggttattctagaatgtacctctacacccaacaaaggtagaggaatgtcgtctccaaatgatatttctccagcctcactgattcatgctgaggatcctcttgctgtgattatcatgaaatcttgccgggatactcactgccactattgctttagtgaagctccagcagatgtcgtagtctgcccttcatgtacaatacccatttactgttcaaacaggtgccaggagaaggctataggacaaatgtcttgtaatcaaaatactcatctagaatctaacaataatgtggtggatattgcaaaattgagtgtaacttctacaaagagcaagactccagactctaaacaaattgctgaacataggcatgaatgtggaggtgcctgttgggcagctgttttgccagctgatatagttttagctgggcggataatggcacagtacatagagaaacaattgctggtcggaaagagatctaccatctctggtccaaatctggatctcgttcaccactatgatcaagattcttctgctagcaaatttgagtcacatatatatgcaactgtcctgttcttatgcctccagagctattataaatcaggtgtctcgtgggcagaggattctttatcacagttggttcttttgatatgtcaaattaaagtcaactcaattgcaattgttcatatgaaatccatggatggagtcaaggcgctgacaaaggggttttctggatttagtggtgatgttatgtgtagtgtggaacaggtcagggttgctcaagctatttacatgtctggtagctttttcaaccactcgtgccggcccaacatacatgcatattttcattcgcgcactctcattctaaggtctacagaatatataaaagcaggtagcccaatcgagctgtcatacggcccacaggttggtgagatggatcttccagagagacaaaagtcacttcgggagaattactacttcagttgtgggtgttcaagttgttcagtactaagtctatcagaccttgtcatgaattcattttgctgtccgcaaagtaattgccttggagctgtatcagaattaattcatcatagacacaaagagaattttgtgcatgtttccataggagaatctcatgtctgtacattatcattacctgatgtatctaagtttgatgaggatatagtgaaggttggaaaactatttttcaagagtgataccatgttcaacatagatcctggattctgtatgagttgcagatcccaacttgacttgtcttctgctgttgctatgtcagatagagcaacatcaaagataaacagattgaaggagcttccatctctagacaatgtccctgaagtcctcattgcagaagcactacaatccttagaacgcattgagaagttaaggcacccatatagcaagactcttgctcagtcacacgacacaattgctgaggcctttgctaaggtaggagatcaagaacaagcaagaaaacactgtgaagcatccatcaagattcttgagaagctttaccaccccaggcacatcatcatcgcgcacgagttgatcaagctcgtctccatcgagctttccatgggagatggcgcaagcgcggctgctgcattcgcccgggcagatgcgatattctcgctgtattatgggcctgatgtagagaggattttgccctacgttgatgtgctcagaagaactgtcagtgaacggtctattgattcatgttgacaatcttacagtatgtgtatcagtacatgctgttgtatcagcaattagtagacaaatctagaaaaagagatcagattagttagacccattacgttacagaaatctagaaaaaatagagcatattagttaaacccatctactacattacagtcttgcccctgtgttttatgaattttcttctgggattttctgaaacctacatgatttctgaaatttcattagcatttgcagtgtcaaaagaggatggtactagagtaataataagatagtaaagcctggtagggctctgttttttg

SEQ ID NO: 17533 - DNA, 1387 bp, Oryza sativa
  ref <308>: DATABASE ACCESSION NUMBER: AK067970
  ref <309>: DATABASE ENTRY DATE: 2001-12-06
ggcagccaccatgccggcctccgaccccgcccccgccgccgccgctgccgcctacgaccgcaccgccgagctccgcgcgctcgacgccaccctctccggcgtccgcggcctcgtcgcgtcgggcgccacccacctcccccgcatcttccacaacgtcgtccatggtgatcaagaaccaccggaggcgacggcgccatcgtccgcggccacgaccacgacgaccgtcccggtgatcgacatcagcgggagccgcgcggccgtggtcgacgccgtccggcgggcggcggcggagtgggggttcttccaggtgacggggcacggggttcccctcgccgcgatggacgccgcggcgggcgcggcgcgcgcgttccacgagtccggaggcggcgagggcagcgacaaggcgcggctctactcgcgcgagcccgggagagccgtcaagtaccactgcaacttcgacctgtaccagtcgccggtggccaactggcgcgacacgctctacctccgcatggcgcccgacccgccgcccgccgccgacttgccggagatctgccgggatgcactgtttgaatatgccaaacaagtaaagaatttggggaacacactgttcgagctgctctcggagggccttgggctcaaaccgagctacctgacagacatagaatgcaaccaggggcaaatcatactatgccactactaccctccctgcccccagcctgagctcgccatcgggacaagccggcattcggactccggcttcctcaccatacttctccaggatgacattgggggcctccagatcctccatgaggaccgatgggtcgatgtcacgccaactcctggagcgttcatcgtcaatgttgccgatctcctgcagttgatctccaatgacaattacaagagtgtggagcatagagtggtggcgaagaacactgaaccgagagtctcgattgcctgtttcttcagcacccattttcatccgatttccacgaggatgtatggcccgatcaaggagctgttgtctgatgagaacccgcctttgtacagggaggcactcgtcagagattacaccgcgcgttactactccgttgggctagatggcaagttcaagactactctttctgaattccggttatagattggtaaagaaagtctatgatgtaccggtgtgaattgtatcatgtacttgaaatcagtaaagatagagatagggacagtgtgtatgactactccagagagatgatgtacttggcatgtatgctgtagacaacagaatggaagtatagtttcaaacaattacacaaggagctgtggatccacccttgtttgtaaggagtactgctatcatgctatgtattgttatgccattgaataaagagatctcctg

SEQ ID NO: 17534 - DNA, 842 bp, Oryza sativa
  ref <308>: DATABASE ACCESSION NUMBER: AK067971
  ref <309>: DATABASE ENTRY DATE: 2001-12-06
gacgactcaaaaccaccaaaactcaccaagcaaagcaccagcgaggaagaacaagaaggaaggtgaagagaagccgcgttttgtttctcgcgaaagtgtttgttgatatggcgatggaggggaagagcaggaggttcgcggtggcgtgcggggtgctcagccagtacgtgagggcggagcagaagatggcggcggcggcgggggcggcaccggcgagggcggtgacgacgctgagcctgatgcctggggcggaggtggtcgtcgaggaggaggagcggagggaggttggggaggaggaggcggggccagcgacggcgccggccgcgccgctgaccatcttctacggtgggaggatggtcgtcttcgaggacttccccgcggacaaggcggcggaggtgatgcgcatggcctcctccgggatggcggcggcgccggctcagcgggagggcgccgcgctcgcggacatgcccatcatgaggaaggcgtcgctgcagcggttcttcgccaagcgcaaggaccgcctcgcggcgaccaccccctacgcccgcccgtcgccggcggagaccaaggcctccgagccggaggagaagaagacgcccacctcatggctggacctcgccgcctccgcctccgccgccgcgcgccgtgacagcctcaccatcgcgctgtgatctgcgcggctttgaccaaaaacgacttaagacgcgcgcgcgctctcagcgcgcaagaggattgattcactttgctcatacccatggcgacgtagagtttttaccgcttttgctatacttctttgtaaaattcgatagggagattgaattgatgggaaaccccttgtgcct

SEQ ID NO: 17535 - DNA, 1376 bp, Oryza sativa
  ref <308>: DATABASE ACCESSION NUMBER: AK067972
  ref <309>: DATABASE ENTRY DATE: 2001-12-06
gggcccacagcagcagcagcacgccgcgcgcgatggccgccggagcgccgccgctcgccggcgtcggagaccggggctcgtcctcctcctcctcgcacccgcctccgcctccccctcccaagatccttctcgccaagcccccgcttccgcccccctcgtcctccggcgccgacgacgacggcggcggcggaggaggcgcgggccgctcgcggcaggccacgcagcctggctcgctcagcctcgtctccgacgcgtgggaggtccacaccgacaagatcctcccgtatttgactgagaacaatgatttcatggtgattggagtaattggtccaactggtgtgggcaagtcaaccatcatgaacgagctttatggatatgatggaagctcacctggaatgcttcctccttttgctacacaaactgaggaaatcaaagcaatggctaagcactgtactgctggcattgatatcaggatctctaatgaacgggttatacttctagacactcagccagtattcagtccctccgtactaattgatatgatgaagccagatggttcatccgcaattcctatcctcagtggtgatccattatcagcagacctggctcatgagttaatgggaatccagcttggtgttttcttggcatctgtttgcaatattttgttggttgtatcggaggggattaatgacctgtccatgtgggacctcattcttacggttgatttactgaagcacaacatacctgatccatcattattgacctcctcaactacccaagacaaggaaaacaaaaatgataaccaatcaggcattgaagattacatagctgatctctgttttgtgcatgctagattgggaacaagacttttctccttcaaagctcatggttctgaagagggttcttgaaaaacacttcaagtcctcctcctttagcattggaagctctggagcaacacctcaagtttctgactcctcagttccttcaagcatgaagattgaggatctgagctccaatcagcaggacatatatcttcttccattaagaacacctgataactcaacaaattttgagtatcggacatgtccatccatgttagggatgcttcgtgatcagatcttatcaaggccatcgaggtcattctcgaagaatctcaccgagcgtgactggttgaggagctcagcgaagatctgggacatggtgaagaaatctcctgtcatcttagaatattgcaaaacacttcaggattcagggtttttcagaaagtagccatagttacctagctgtttgcatgttcttacgtgactacattactagatcagatgaatttggtactgtatgtgattatgtatatctcggattctgtttttgccccc

SEQ ID NO: 17536 - DNA, 1367 bp, Oryza sativa
  ref <308>: DATABASE ACCESSION NUMBER: AK067973
  ref <309>: DATABASE ENTRY DATE: 2001-12-06
ggagggaagaaatcaagaaaaggaggaggaggaggagaaggcggcctcacgttgcggagcgagataggcgggcggggagggggagctaatggggaggaggggtggtgaggatgacgggggtgtcggcggacgccggcgtggaggtgcacgcgctgccgaccaagggagggacgcgcgtcgtcgccgccttctggcgccacccctccgcgcgcctcacgctgctctactcccacggcaacgccgccgacctcgaccagatgctcggcctcttcctcgagctccgcgcccacctccgcgtcaacatcatgagctatgattattcaggatatggggcctctacaggcaaaccatcagaatacaacacatactgtgacatagaggctgtttatgactgtttaacgaaggtgtacgggattgaaccagaggatctaatcttgtatggacaatcagttggaagtggaccaacattgcatttagcctcgcgcttggaaaaattaagaggggttgtccttcacagtgctatactttcaggcattcgggttctatatccggtaaaagtaacactttggtttgatatcttcaagaacatcgacaaaataaagcaggttgactgtccagtgctggttatacatggcacagcagacgacatcgtcgatttctcccacggcaagcggctatgggagctcgcgaaggagaagtacgagcccttatgggtgaaaggtggcggccactgcaacctggagacgtaccctgaatacatcaggcatctgaggaagttcatcaacgcgatggagaagctctccaaggataagacagccaaagcgccccagttggcgccgtcgtcctcgaacaataacatgaccgaagtagaacacaacaagtgcttgagattcggcaagagatgaaactggagagcagctgattccatcgtttttagccgttgtcacttgtcacaatctactaaccgtgcaatagctgtcgttgctccatgatcgtatggaggaagaagaagaagacgaagaatctgacagggaagggagacagcttatgtgaaggaaaaggagtgtgttctgaattctgatgctgcacaagaatggtcagtgtgagtttcatcagattggagaacagatgtatacttgtgggtagcagcttggatggagaaatggagatgcgatgagaaagtgttagccgtgagctgaatcgaggggagcttagtggaagcaggagatatgtagtagcaatgttctgtagttcagtttacgagccctctggggttctgttttcttacttattattattcagtttgtactattagctgcagatgtgcaaatgcaaaagaagggaatcgattaattcgaattgattgc

SEQ ID NO: 17537 - DNA, 1624 bp, Oryza sativa
  ref <308>: DATABASE ACCESSION NUMBER: AK099031
  ref <309>: DATABASE ENTRY DATE: 2002-08-28
ggagtagtgcgaggtggagaagacgagccgacaccaccaccaccaccaccaccacgagaggaggaagccgcgggtctcctcgtcttctcctctctctctctcctcaaccagctgtctcgcggtcgccggcggcggtgaggggaggaagcggggctgcctcgcgcggcgggaggtctccggagagggaggggtgtcgtgctgatttggggggctgcggcggtgtcggcggcgatggggtgggcttcctgctgcaagggggtggacggggttctacctggccggaggaagaagaagaaggagacgacatggcggatcttctcgctgaaggagctacagtcagcgacgaacaatttcaactatgacaacaagcttggtgagggtgggtttggcagcgtctactggggccagctctgggatggatcacagattgcggtgaaaaggctcaagagttggagcaacaaagctgaaactgaatttgcaattgaggtggaggttttggcgacagtgagacacaagagcctgttgagcttacgtggctattgtgccgaaggccaagaacgcctgatagtctacgattatatgccaaacctgagcttgcactcccaccttcatggacagcatgcagctgaatgccatcttggttgggaacgaagaatgaagatcgctattgattctgcagaagggattgcatatcttcatcaccaagcgacaccacatatcattcatcgggatatcaagtcaagcaatgttctgttggacaagaatttccaagcacgggttgccgattttggttttgcaaagctcattccagatggtgcaacccatgtcactacaaaggtgaagggtacactcggttatcttgcaccggaatacgccatgcttgggaaggcctctgaaagctgtgatgtcttcagctttggagtactgctgctagagcttgccagtggaaagaggccagttgagaagctaaaccccactacgaagctaactatcacggagtgggcacttccacttgcccgtgacaaaaagttcaaggaaattgctgatccaaagctcaaggatgtcttcgtcgaggctgaactgaagcgaatggtgcttgttgggcttgcatgcagtcagaacaaacaggaacagaggccgataatgtctgaagtcgttgagctgctcaagggagaatctgctgagaagctttccaacttggagaatgatgagatgttcaagcctgatctgaccagctccttccaggactcatctcattcgtctcatcctgatagttcagactgcatcacagaagagaagaactcaaaagcagatacaatagacgaggcagttgattcaagtgagacagtaccttcagctaggtagtttgatgcatagaattataagttatctgtcattcatcagcaggagttattggtttccttccgtggagcattgtgtgtttacctctgcatgcgtgtttatgccttgtttaccggcaggtttgggtgcttcccttgtcatctcacagatatacttatctgtgtgtatggttaattgttacaatctgttttcggtatggttgtaccatggcttgtaaaattctgcatatctggtgctgatccaaagttaacatgttgttccc

SEQ ID NO: 17538 - DNA, 1684 bp, Oryza sativa
  ref <308>: DATABASE ACCESSION NUMBER: AK067974
  ref <309>: DATABASE ENTRY DATE: 2001-12-06
gcgtagactctcccccgagcccaagcaaggcaagtcccccacaccacttcccttccctctctgcagccgaggcggcggaggagaagaggagctcgatcgatcccccccaccggcggcgacgggcgagatgaaggtcaccgtgatgaccgccgacgagcagattctcaccgtcgacgtcgaccccgacgaatctgtggagaatttgaaggcgcttcttgaggtggagactagtgtgcctttgcggcagcagcagcttcacttcaatggcagggagatacagaacacggataaacttagcaccgtcggagtccaggatggcgatcttgtgatgatggtgaaggttacctctaatgaaaggccatctcaggatattataagattaaaccctgatggatctgctgttgatcctcaagctttccgacaacatattcgaggtgattcacaacttatgggacaactccttcagaatgacccggcattagcacaagctattcttggtgatgacatcaatgagttgcaaaataccttgcggtcacgccatcaacaaagactagaactaaagcgcaagcaggaagaagagcttgctctaatgtatgctgatccttttgatgttgaagctcagaagaaaattgaagctgcaattcggcagaaaggtattgatgaaaactgggaggctgccttggagcacaaccctgaagcatttgctcgagtggttatgctgtatgtggacatggaagtcaatggtgtacctttgaaggcctttgttgacagtggagcacaatcaactatcatatcaaaaagctgtgccgaacgttgcgggttgcttaggctgcttgatcagcgatatagaggtgttgctattggcgttggtcaatcagagattcttggtagaatacatgtagccccaataaagattggccatgtcttctatccttgttcattcacagtattggatgctcccaatatggaatttctttttgggcttgatatgctgcggaaacatcagtgcataattgacttaaaagacaatgttcttagagtaggaggtggtgaggtttcagtgcccttcttacaagagaaagacatcccttcacatatacgtgatgaagagaaactatcgaagctagcatctctcagccaaggagctgctggagaatcgtcaacggcacgggagaagactcctgatgcgccaccacgagctcctactacaggtgctccagctgtgaatcctccgcaaccacagggaggaggagatttcgaagcaaaagtcacgaaactggtggaacttggattcgaccgggcatccgtaatccaagctctcaagttgttcaacgggaatgaggagcaggctgctgctttcttgtttggtggttagagtcttgtgatgatgatttgagagagttctttctattgctcacgaccctttcaagggctgaacattttatacacagtgatggagggagatatcagtatatcacctcttgggcctttgtgaaactagaacttctgtttggccaatacaggcttttggtttagagatgatggttcatatttctccttccatagaaaacccattttcttgccttcagtacctgatacaaagatcatgtgcatttcgatctcatttgtttgccaatgatgtgaattattggtctcatatatatggtcctcacaggtgaactgc

SEQ ID NO: 17539 - DNA, 1477 bp, Oryza sativa
  ref <308>: DATABASE ACCESSION NUMBER: AK067975
  ref <309>: DATABASE ENTRY DATE: 2001-12-06
tcgcctccgcctcgctccagtaccagtacgactgctcccacctcctctccctcccggccttcccctcccaccccatcacctcccgcttcctcgcttccctcgccccgccgcgacccggcgccgccgccaccaccaaaccctcctccgccaacgcctacgccgccgcctttccggcgaccctccgcgcgcacgccaccgtctgcaacgcaagcccatcagcgacgacgcagcggtccgattactccaccgtgcaagccgccattgacgcggcgccgaaccacaccgcggggcatttcgtcatcaaggtggctgcaggtatatacaaggagaatgtggtaattccgtatgagaagaccaacattttgctggtgggtgatgggattggtgctaccgtgatcactgcctcgcggagtgtggggattgatgggattggtacctatgaaactgcaactgttgccgtcatcggtgatggtttccgggcaaaggatataacattcgagaacggcgcgggtgcgggagctcatcaggcggtggcattccggtcagacagtgaccggtcggtgctggagaacgtcgagttccgcggccaccaggacacactgtatgctcgcacgatgcggcagctgtatcgccggtgccgtatcacggggacggtcgatttcatattcgggaattcagcggcggtgtttgaggaatgcgtgatcaagacggtgccacgggcagagggagctcgaaagagcgcgcgcaatgtggtggcggcaaatgggaggattgatccagggcagacaacggggtttgtgttctggaattgcacacttgatgggagcaaagagttcttagcgttgtttcgggcaaagccggagtcttatcggctgtatttggggcgcccatggaaggagtatgcaattacagtgtatgccggatgttatttggggaaggttgtcaggccagtgggatggcttccttggcgtggggaattcgcactcaggacgctatactatggggagtttgacagtcgagggcctggtgcaaatcacacggcaagggttgagtggagcagccaggcaccagaacaatttgtaggagtctactcagtagagaactttattcaggggcatgaatggattgcatactaactacaatgtgaagtgaaattattatatcagtgtttcttggtggcagttctacatcacaattttgaaaattatcttgagactacaagatgctccaaaggatctgatgccaactgtattgacacggtacataggccaactgatgtggtttcttttgtgtttagttgtaccttagttttgttttaatgtttggttgcgcttttgggctagtgtctggttacagattttgtaattgcgttaattcttttgtagaatacatatcaaaaaatggtttgctgcggaatattttacaagcttatttatgttttgctcctgcaatataattagtttgtggttgcctctgc

SEQ ID NO: 17540 - DNA, 2781 bp, Oryza sativa
  ref <308>: DATABASE ACCESSION NUMBER: AK067976
  ref <309>: DATABASE ENTRY DATE: 2001-12-06
gatcttctgttctcttccagcctgtaatgacgagttctgagaggctccccatctcgaattcatgctccatttgacaactctttctatgccctttttattttttttttgataaagaatgtagttattgatgcaaagtaaatttcttattttatgatttgtctattggtacctttggtagttgacgagtagtgctgcaaggacaaggaaaaggggagatctgaggagcagtttcttctttcctcattcctctctcctaccctagaacaagaaatgatccttgatcccttctaaaattcagacgcaggaaatataaattcagtgacaaattttcatccaaaattgacattaatggctccaagaactagtactgttataacctggagatatcagcagctctttgttgtactatcttcagtaatcctggaatgggttttgatgcttcttctgctttttgaggggctactatcctatctcgttacgacattcgcaagcctttgcaagctccaccctccatgcccaatgtgcacaaggctagatcatgtctttggcatggcgcaaccaggcttctaccgtgaccttatgtgcaattctcacaaggcagaagcatcatcatgggcattctgccacattcaccaaaagcttgtagatgtccacagcatgtgtgagtcctgccttctttcatttgccaccaacaagaagtcgaaccttgcgacataccggtccctggcggggaagctcggtgtcggcatcggcaatgaaggtttcaggcctagcttcagtttggacaattcatctgaagcatcagttatcaaggaagatattactaatattttgtgttcatgttgctcaagcccattgaaagtgaaatcatatccttctatggttcttcagaacatagctagtgccattgacactgaggtgaatactagacatgtctcaagagatcaacttattgaggagatcagtcttgtcaggtatagtgagctgaagacttctgactctgaatcagagccctggcaacatggtggtgttgctagcttgctggatgatgcagttgataatttgaaggaagattttactttgagccatccaaaaacaaaatttgcaggtgttattcctacagatgacattgcacaggatcaagtggctaagaactctgacttgatacaactccagaatggtggttctgacagtaagaattctcaagtttcagcagagttgtaccacttcagagctgatggcaatgcagatcttcagtcaactgacttttccagcaaaactgttcagcatcctaccgaagattcagacacaacagataaatctgaagatgatgtttggcacaatgctcttgattccatcagtgaattatcagtgactgataagcctgccgaaaccagtaccgcggagaatgaaccgaaagctgaatttaccgatagaactgcaatgaaggattctttcaaagctcatgaagatctgcagttactgttgtcacaagtttctccaaatgatgccatcaatatccctggtgtacaagagcaagccatactgaacaatatcactagagcactctctcttgacaggaattattcaggtagtatttctgagagcatggccattgatgaagctgaagaacattgtacagttgatcaactgaagaagcaaatcgaattggaccggaagtcgataagtcttctctggaaagagctagaagaagagaggaatgcttcagccattgccacaaaccaaaccatgtccatgatcaccaggctacaagaagagaaagcagcaatgcagatggaaaccttgcagtatcagaggatgatggaagagcaaagccagtacgaccgtgaggatcttcagaagatggctgccatggtgcaagagctcgaagccgagatcgaaggctacaagaccaagctgagagaccaatcgctcgttaacgagatacgcgacgcgatgcgcatttcacgttcagaggaatgtgagactagcatgtcaagaacagctcgatcgctctcattgttcgaagacgagaaggcgtatatatcaaaacacctgaagaaactaagacagaatctccaccaattctcaaacaacggcaagttcatcgacccgaaaaagattgacgacaaagaagacacatttgatgtcacaaacagtgaggatgtataccaagatgctgatgaagattcagaaatgaccaattcagagaattcagagatgaccaatgtgataagaaatggtcgcaacttcaggtacttatctaatggtacagagggattgacaaatggtaaagatgatcctgagggtcagtactatgcaatggtcagtgagaatgacttggttaattttgaagatgagatctctgaactcactgcaaagctgaaggcactggaagaagatcgtagcttcctagagcacagcataaactcgctgagaaatggccaagaaggcaaggagctgatccatggcatcgcttgcagcctcagagagctccggaagatggggatcacttggaaggattgtgattagctgaagcttcatcagaggatacacgtttgacagaggatgtaaactgtaaagagtgatggattaagctgctgactgtatatgtgctaatgtgcatgtgcacacggcggttgctgtcatgtcatgcggtggtggtaggttttgggccgttgcaagtgcgccgtgctcttcgcgtggagtgttccttgtacaaatgcagtgtggattttttgagtgctcagaattgaccaatatgcatacacaccttttctc

SEQ ID NO: 17541 - DNA, 1321 bp, Oryza sativa
  ref <308>: DATABASE ACCESSION NUMBER: AK099032
  ref <309>: DATABASE ENTRY DATE: 2002-08-28
cctcgacctcgccgcaaatcctccgccgctcctccgccgctagggcataaccgcccgcctctcgccggcatccgcatctcccggggaagggaagggaagggaagggaaggaaggaaggtgagggcggatatgtcggcggcgccgataccccgcgagtgggtggggctgcagcagtttccggcggctacccagaccaagctgcacgagctcctcggcaagctcaaggaggagaatgtgagcacattgacaattctggtgatggggaagggcggggtggggaagtcatccaccgtcaactccatcgttggcgagagggtcgctactgtcagcgccttccagtccgagggtctcaggccgatgatgtgttctcgcaccagggcaggcttcaccttgaacattattgacactcctgggctcattgaaggtggatacatcaatgagcaggctgttgagatcataaaaaggtttcttctgggcaagactattgatgtcctcctttatgtggatcgattggatgcatacagaatggacacgttggatgatcaagttattagagctgtcaccaattcatttggaaaggccatttggcgaagaacattggttgtattaacacatgctcagctctcaccacctgatggacttgactataacgatttctttacaaaaagatctgagtcacttttgcgatacattcgtgctggtgcaggagtcagcaaacgagaacttggggattttcccttgccaattgcattggtggagaacagtggaaggtgcaaaactaatgagaatggagagaaggttctccctgatggaactccatggattccgaacttgatgaaagagattactactgttgtctcaaacgggagcaaatccattcatgttgatcaaaagctaatagatggtccaaatcccaacaatcgctggaagatgttcataccgctcatccttatggtggagtactttttggttgtaaaaggcatccgaagggccattcatgctgacatatcaaacgggaagctagatgactgggaacagcgttacagagacttggttggaagcaaggacccggtagaccagaaaggttcatcatccggcaaccgcaaggcttgagctgaagaatgataccgcatgcatcgtgacccattcaattctctgtgcttttctttttgcgctctattccagtgatctatttgggaagctttatagagttatctgggacaatttgagcaaatttgctcttgtttttagttgctaaaaaaactgtactgaatttttttgtgctgtcgcaattttgcaaatgttgttgatcgaaacttcg

SEQ ID NO: 17542 - DNA, 957 bp, Oryza sativa
  ref <308>: DATABASE ACCESSION NUMBER: AK067977
  ref <309>: DATABASE ENTRY DATE: 2001-12-06
ggattcacacctctcccctcacttctcccccctcaaatccccaaatctaaccggagaaaaccccaatctctcgccgccgccgccgtgatgtctcgccggtacgacagccgcacgacgatcttctcgccggaggggcgtctctaccaggtggagtacgcgatggaggcgatcgggaacgccgggtcggccctcggcgtcctggcggccgacggcgtggtcctcgtcggcgagaagaaggtcacctccaagctcctccagacctcgcgctccgccgagaagatgtacaagatcgactcccacctcgcctgcgccgtcgccgggatcatgtccgacgccaacatcctcctcaacacggcgcgcctccacgcccagcgctacgccctctcctaccaggagcccatccccgtcgagcagctcgtccaatccctctgcgacaccaagcaggggtacacccagttcggcggcctccgccccttcggcgtctccttcctcttcgccggctgggacaagcaccatggcttccagctctacatgagcgatccctccggcaactacagcggctggaaggccgcggccgtcggggccaacagccaggcggcgcagtccatgctcaagcaggactaccgcgacggcctgacccgggaggaggccgtagccctcgccctcaaggtcctgagcaagaccatggattcgaccagcttgaccgccgagaagctggagctcgccgaggtgttcctgcagcccggcaccggggaagtgcagtaccaggtgtgctcccctgaggcgatggggaagctgctcgccaaggccggcctctcgcagccggcgcctgaggcttgatgtgctggtttgctgtgccttgtgatgcctgctgctcttagatggttttatcattattatgcttcttgttatctaaaccaaactatctgataatcatgtgttttaattttatgttgg

SEQ ID NO: 17543 - DNA, 2332 bp, Oryza sativa
  ref <308>: DATABASE ACCESSION NUMBER: AK067978
  ref <309>: DATABASE ENTRY DATE: 2001-12-06
gcacctcaccatcgtcggccggacctccacggaccgcatacgcgcgacacgagcacacgaccacgcaatacgcagcagcagcagcagctacccagcagatcgatccgaccgacggaggaagaagataaaagggcagaagagaaggggtgtgtgtggaaaaggcgagtaaagactccagctttctccccgtttgacctcgccctgctcaccgcgaaggctcgcccccctccctcttccctccccgccgccgtcaccggcggcaggcagcaatggcggccgcttcggaggaggccatcaagcagttctccgcgctgatggagctgctggatgagccgctcaagaccacattccagcatgtccatcaaggatacgcaagaggaactctggtgcgttttctaaaggccagagaatggaatgttccgaaagcacataaaatgttaatggattgcttaaattggaggatacaaaatgggattgacagcgttctggctaaacctatagtcccttctgatttatacagaactattcgggatacgctgctggttggattgacaggatactccaagcaggtatagcgaccagactcatttatttcattttttcataattttaatggagccttatgttcaaatctcacatttcttaagtcaaaaaaaaatctcacacttctttatctaaaattatctggttttggatggcattgtattgctgaacaatagtttcatttgacagcagtttgctttctctttgttgagtaaaggcttttttgctgttcttcgtctcatttcctctcctttttgtagggacaacctgtctatgcattcggtgttgggctcagtacccttgacaaggcatcggtaggtatttattgattagagtctgaacaaatctacctgggttaaatctaaaataatgtgcatagtagtatttgttcaaagccagattcactgagctaaagtctgataccattatggtagatgataaactaaattgcatttgattacttctaacttcagttataggattaggaattagcaactgtttaatacaaaacatagcatgatatatctttttcttggaaatattttgtctaaattacttcatttttgtactaggtgcactattatgtgcaatcacacatacagatgaatgaatatcgagatcgtgttgtactgccgaaagcctctaagatgttcgggaaacagattaacacttgcctaaaggttatggatatgacgggggctgaagctttctgccttgaaccaaataaagatgttatctacgataacagccatcgatgaccttaactatcctgagaaaacagagacctatttcattgtcaatgctccatatgttttttcagcatgttggaaggttgtgaagcctcttctacaagaaagaacaaaaaggaaaattaaagtcctgtacggctcaggaagagatgaattactaaaggttatggactatgaggcactcccaaacttttgcaagcgagaaggatcaggctcgtcgaatgattcgtcggatggagttgattgctactcctatgatcacccttttcaccaggagctgtataattacatcaaacagcaagccctgaatgaagacttcatcggtcccataaagcaaggctcaatgcatgtggatgtgcccacacctgatctggaagaggccaagatcatggagacgatcgaatcggagctccacaaattcagtggagctaatggcctctcgcattcattcaacaagatcaagattgaaggtccgtgatgttgcccgtgatcatatctcgtgacggagacgacgatctgcggagatattatgcttatccatctccagccccagggaacctacggtggggttatagcactccttgcttgcaatctctagctgcaggcttgactaggatccacgagtagaaagaggttagtaattgtgatgcgattctaataaccgaatccgtattatctgaaagtgtagccagttctttttctaattaacctagcgactgtatcatctgcgacacgttactatttcagtgcttatggcaactgggaaggaaatgtgatgtttccagtccttccgagtaagttgctgccctaaatatatatgtaacagtgtatgtatagcctctagctgccttttgattgcagtggtatatatcaagtgctgtactcactgctaagaatgaatcatctgcatgtttcatttcactggatgctgtgaaatttggtaaatcgttatatcaatgtttgatgtttgctgccatctgtataaactcgccagtcgcttttggctacataattaagactgcccatgaatgttgttttgc

SEQ ID NO: 17544 - DNA, 2870 bp, Oryza sativa
  ref <308>: DATABASE ACCESSION NUMBER: AK067979
  ref <309>: DATABASE ENTRY DATE: 2001-12-06
gagcaaagtttcctttccccaatcaatcgccaatccccctcctcaatctctcctcctattttctcctctcgccgccgtttcgcctggcaaatctgcatgccaagccgcgatgccatgccatggcaaggccaggatgggtctgaatttgtcgtgtcatatccactcgagtcgcgagttggccggacgccgaggagagtagccgcggatctgactgcatgacgcggtcagcgggcctggattcctacgaaaggagccgcctttgatctataatcggaggaatatgaaggattaaataccttaacaactgccaaggcaccattgttctctacggtgcagaagcgagcctaaagtgccgctcattttggtttataatcggattagtctttgttcagctgatctgcgcaatccaataccgagtcgtgaaggaacatgctgatgatgcattctatgaattgcagaatccccaacagcaaattcaggcctatgcctttgatggtaaactattaacattgagcaattaaatagttgcccatatcaaattattgactcaaagcttaatcactttcccctcgaacttagtggtcctggccctagttccaagaatgaatcttgatgacctttttgagtaaaagaatgatgtggtgaagactgtacttgaggagcttgaaaaggtaactcaagtgcctgtttttactgagtccagctctctaggattaagttgatcggctgattatgcaaactccagtaagacaaatcattgtttttccttgtttgcatgtattgcattctgccatggctcccagggacgaagctagcatcaaaacaagggggtgcactaccattgaaaatctaaaaaatttcagtacaacactgtacattctagtgtttttaagtgagaaattagaaatttggggggttcatgtgcaccccccaagcatagtgtagcttcggcactgcatggtccatcattccatgtaccgttgtcatcctgtcaggattctaaatctagtcaaacacatttttgtgttagctgaagtattattctctctttttttttctcttgtgcacctatttgcatgttgaaagagttggaatctttgtttggtatacattttaagcatgttatttcgttacccacaattcatactattcttccaagattggtttacatgcttatgtggaattctagtcccagaatactgtttgatggaacttggctgtatcaaaaggaaatctggcattgggctgtctgcatcgcttatctttcgttggaaacttacgtgcttaccaaattttaaactctgtgattgcttcttcctcaagtgttggatattccattcatgataaccaatgctctctctgttcgttctaagttccattcctaatgtgtagttttgtcctcaaacatttttttatcttagtacttgttagtgataagcagtttattatttgtaccgttatatattatatgccatctttgtaaaaaaagactgttctgtagtctatacatcgaacatattcttatggttgatatcatccctgatacttctgtacgcagagcaatgaatgacataaatgcaggtattattccctttcaagtatatatggtacttctttcagtctgtgcaacctgcatgatgtttattagtctatttaatgttgtaatgttttctgaagtaataatctgtcagacttcttaattgatgattataagctctctctctctctctcttctacttatgcttcgtttgctttgttttccgatgcttgtagtgtttggagtagctgctgtgaagctagcccacaacgtgggtaaggttgtctgtttggggggtgggtgtgttttgtgtgtgtgtgtgtgtgtgttttggtgtttggggggggggggggttctggctctgcatagcacattttagaaccattgtcaagtatgtagcctactgcaacttgcataggaccaaagggtgatgtttctgtgtagagaagttagatggcgatgagtcaatgacttgaattagaaatgctctaggtgaaagggaaaggaacagatgtagaactacaattggaattaggccaatcaagtacagaccactgaaactgaagacttgaggggctaatctttgctaattaattattcagtcttagaatcatggctaggatcatatataacctaactaattaatctgaactagaaaacaagctgaactaactattcttaggtagctagtttgcttttgccaactctggacgcttgtgcggtttctcctgttgtcctgcatgatgctagactattgatcattgctgattgctcatacagtcgcactggtatattgctgtagtagaccacatatatattataatgtttcatgttcagttacctttcatgttatctccatgtgtgctcataactagttaactcctgtcacagcccaaagtcttcagcttgcaagtgtctacaaaggggaagcagaaaagattcttctggtgaagaaatcagaagcagaggcaaaaatacctttctggtgatggcattgctaaacagaggcaggctgatggcctgagacagtaccacagcaaaagaagtcatggacctaatcatggtcacgcagtactttgacaccataaaagaacttggggatggctcgaagaacacaacggtgttcatacctcaaggcccaggccatgtcaaggatatcagcgagcaaatccggaatggtatgatggaagcgtcaagcaacaatgtgtaaattgtagcgattcacagaacaaggttggggatggttcagatgggaggagcctgttgtttataatgaatatattaccttttgtttatagcctgttgtcaagcaacactagcaccttttgtttgc

SEQ ID NO: 17545 - DNA, 3491 bp, Oryza sativa
  ref <308>: DATABASE ACCESSION NUMBER: AK067980
  ref <309>: DATABASE ENTRY DATE: 2001-12-06
gtttgatttagtcacttgggttcggtgattgatttcagatttgagtggttgattaccttcaatcgatggatggatgatcatcgggttcttatctgtccttacgcgaggtgattcgagaccctgggttgatagttatttgtaaccgctgatctggcttgtggtatgtgtttgtgctgctctagatgatgcaggagggagggaggctgttgagatgaaccgaattggtggaggtttgattattatggtccaggttcatggttgctttgattattatgatgaatcggggaggtggaggtttgattgttatggttcatggctttttgattagttcatggtggttctgaaattattctgacacgaaagtttgtggtgtcgtgacaacgttcactggatttcctttggtcagatcctcaagatgtgcagatttctaagtgatttggagatagatttacgggagattgtcagatggaatagcaatgcttcgtttggattctgaaccccccttgatttgatttagttgttgtcagcataatttgattaatgccttgaaaagtctgatttgggccgttggttgttcttcagaattattgggagttgcatctcacggcgagtcctatttgctgcatgaattggaatcaccatacatacaggccgctggcagttctttttctgtgatcgacaatcttccccgtaatcaaattttccatgttcttcatcagtaattcttagttcttgcagatagcacacaactaagatggaatttgcaatccaaacctgcctcggtctgcgagctcaagacaggctttatacctatgccactcagtctttagtgcatgttttctatgcttaagctgctttcctccaaaataatactcttgctcactgtaggtctctaaataagagtaattgttatggctcgtctcagtgaagctcactaccctttttctcttcaattcatcgttagaagttaaaaatttacaaagttgaatttcttcccaaataaatgttctcttgcttgctgcaggcctatctcataattttgcaaggccaaccttcaccgagtgaaatctttaaatcaccacccttctcttcaattcatcattagaagttatatacctcacaaagatatatttaagtccaatctattgctcactgcaggtttctgcataatttctatggccaatctgcaggtttctacataatttctatggccaatctgagtgaatcctttaaatcatcacccctttctcttcaatttaccatcagaagttaattgcttgcaaagttgaatttcttctcgaataagtggtctcttgctcactgcaggtcctagttcataattttgcatggccagccttcactgagtgaaatctttaaatccccttattcaattcatcattagaagtactcaccaagggtagaatttaagtgcttggatttatctgcagaaatggaattgcgtaggaattttggagcttcaagatagatgtgactactggagaattctacaaccaaaacatacttttcctagtttgcctaatacttaacttcctgtttagtttctatttcggtcatcagaattgcttcatacatgtagcttagattttggtgtgcctttgtctttctttgttggtcgcagattccttaattttctcccaagttgacaaggttattgattggaggctgttggcttgttcggtttgtgttttatcaccttcaattgttacctatgtttatccgatagtctctgggttggtctgggggttggagctctgaatgcacacaaggtctgattgatttcgcagattattgttacctggattatttcagcatatggatcgtttggcttggcgtttctgtgtggggtcttccctgatggccagccatcagttgcagtatctcgtaattttagtggattctagacttgagacctgagttagttttttttttgtggtttgtgtgtttgtccttgttttagatgatgcagaagggtggctatcgggagattaaatccaagagtagaggatggatcttttgatattacggtggactggagcaactatcatataactggaaaaagatcattaagccaaattcacccactcattattttagtacttaccatccggtttagcatcttctcagcgatgcttatgtggattttcgttttttctccagcaattggaagtactagctttgttggagttgctattttggagctaatcagggcactggtttcttctacatacagattcagtacagatttggagctgcaaaatcaatacagatttggatgttctgacctctctaaacaggcttatccctcctttccaccatgacaatttgtttttgatgtctaagctgcttccgcctatacagattcatagaagatagtcttttgcctgtttcaggtctatttttggtcattttgcaaggcaaatccaattccgattgaaatcttctgaacaaccaggattttcccttcaactccttattaaaaagttaaatgccccacaaggacagaatttgaatactcttaatttcgatcatcagggatggggagggttcgagggtgtgttttggagcttcaagctagatgagaccatgggagatcgtacaacctacaactatatacgatttagtgctctccttgcattcttatgtttctatttctgttttggttgataatgtagcttcttatgcccatatttgatttggcgtcatttgtgccttcctctgaatgcagattctccttttgtccatgtgacgaggaaattttctcgaggaaattaaattgcctggtttgtggtttaccatttggtggtttgattgattgtttctagattcggtgcatgtgttttcttgttcgcatattgattacagggttggttggaaatgagctccctgtgagaaagctagtacctggaaattgaggaagggcagtaagttattagataaggtctggtcgtttcatagatttatcttgatttggattgtctgtctctatgctgttctttgtctcggcactttgaggaattttacctaatggccagctatcagacattatccttttatataagatgacacgccaaagggtggatgttggagttgaaaagggatctatgtttggttagttcatgggaagtccgtgttatttatcaatagtggttccctcattggatttgctgtcattcaatatctacaagttaaggtttggagttgaagctcgactggaccaaagatcatgcattggaaaaaattaaccttttgtttggatttcttcatgtgcacacttcatctgtccaacaatacttatctgcttcttctccaacaattagaagtatatatatggcttgtggagtagctaatttcggaaccatgcttggagttccttccctgacttcttttgttagtctttgttagttaatgcttttcagacattggttttatatatgtcccttgttgattcaatgcagacatggcatttgaag

SEQ ID NO: 17546 - DNA, 2207 bp, Oryza sativa
  ref <308>: DATABASE ACCESSION NUMBER: AK067981
  ref <309>: DATABASE ENTRY DATE: 2001-12-06
gcaagtcccatccttcccgctgccccatcccatcccactatctccctaaccactgtgatttaaccaccgaggaggcggcaagaatcgtgtccagctccgcaccgttgttaggcgggagtggagtggactggttatcgtccacgcaagacgacgacgacgacgacgacggccggagctcgccggagcatcggtgtcagagatgagggtcatgaagctcggaaataggccggacaccttcttctcgtcaggccccgtcaggtcggtctccacggatttggccactgacatgcagattcttgtggatggttgcctgtttcgtctccacaagtttcctttgctttccaagtgcatgtggctgcaagcgctgtgcgtggagtccggcgacggcggcggcgccgtcgagctgccggctttcccgggcggcgcggaggcgttcgaggcgtgcgccaagttctgctacggcgtggccgtcacgatcgggccgcacaacgtcgtcgccgtccgctgcgccgccgcgcggctcggcatgtccgaggccgccgaccgcggcaacctcgccgcgaagctcgacgccttcctctcctcctgcctcctccgccgctggaaggacgcgctcgccgtgctccactccacgcgccgctacgccgcgctctgcgaggagctcggcgtcacgtcacgctgcgtcgacgccgtcgcggccctcgccgtcggcgatgcctccggcgccgttccggccggttcgtcttcgtcgtcgccgccgtggtgggcgcgtgacatctccgagctcggggttgacctctactggcgcgtcatggtggccgtcaaggcgaccggcaccgtgcacgcgaaggccattggcgacacgctcaaagcctacgcgcgtcggtggctgccgatcgccgccaagaaccaccacgcggcagagcgaaccgccggcggcggcggcggcggcgcggccaatgccgagcgggccaccaagaaccaccgcctcctcgtcgagaagatagtgagcttgctcccggcggagaggaacgccgtctcctgcggcttcttgctgaagcttctcaaggcggcgaacatcctaggcgcttctccggcgtcaaaggcagagctcacgaggagggtggcgtcgcagctggaagacgccaacgtgagcgacctcctgataccggcgccgccgccgtgcgcgggcggggtgctgtacgacgtggacgccgtggtgaccatactcgaggaattcgcgctgcggcaagcggcggcgtcggggagcccgaagggcagcccggcgcgcgcgggcaggcaccggcgatcgatgtcggccgagagcggtgagctcgagggggcgcgccgttcgacgtccatggcggcggtgtcgcacggcgcgatggtccgggtggggaggctggtggacgggttcttggcgatggtggccacaaaggacgcccgcacgccgctcgacaagatgatcgccgtcgccgaggccgtgccggacttcgcgcggccggagcacgacgatctataccgagccatcgacacatatctcagggcgcacccggagatggacaagagctcgaggaagaagctgtgcagggtgctcaactgcaggaagctctcggagaaggcttccatgcacgcggcgcagaacgagctgctccccctccgcgtcgtcgtgcaggtgctcttcttcgagaacgcgcgcgccgccggactctcgtccgggcacggcaaccgcgtcgccgcgcgctttcccggcgacggcggcgacgtcagtgcgctgcttggcactggcaggccaagaacgacggaggagaacggcaaggacgggcagagccccgccgccgccgggagcgtggcggcggacggcgactggagcgtggaggggctgaggcgcgcggcgtcgagggtggcgacgctgaagatgaggctggaggaggaggacggcgaggacgccggcgacgaggcgttcgtgcataggacgcgcgcggggttggcacggagcgcgtcgtcgcgtgtcacggcggcggcggggaggtccaagcggatgctgagcaggctatggccgacgagcagaaccttcacctaaggggcatcaagacacttgagcaaagctgatccgtacataccgtgtacaaatatgcttgaatttgtaagtaaaatttgttccctcgagatttgattttgttccaactagttcttgaagtttgggg

SEQ ID NO: 17547 - DNA, 1949 bp, Oryza sativa
  ref <308>: DATABASE ACCESSION NUMBER: AK067982
  ref <309>: DATABASE ENTRY DATE: 2001-12-06
gtaaggaaagcagaggaaaaccccaagccgcaagcccccccgccgcgagtcgtcttctcatctctcctccgccgccgccgcctgctgctgcatctctcgtcgtcgccggtgagggaagggaggggaggggggagggcgtgatggcggcggtgagggaggtggggtcgaaggcggagctggaggcggcggcgggaggggcgcgggctgccgcggtgcacttctgggcggcgtggtgcgaggcgtccaagcagatggacgaggtcttcgcgcacctcgccgtcgacttctcccacgccgtcttcctccgggttgaagctgaggaacaacccgaaatttcagaggcatatggagttacagcagtgccatattttgttttcttgaaggaaggtaaaactgttgatactctggagggtgcaaatccagccagcttggccaataaggttgcaaagttagctgggcctgccagcgttgctgagtctgctgtgcctgctagcctgggtgtggctgctgggcctgctgtacttgaaaaggttcaagagatggcacagcaaaatggagcttctgccactagtagtgcagaagatgcattgaacaagagattggagcagcttgtcaattcccatcccgtcttcttatttatgaagggaacccctgagcaaccaaggtgtggtttcagtcgaaaagtagttgacgttttgaagcaggaaggagttgaatttgggagctttgacatcctaacagataacgatgtacgtgaaggaatgaaaaagttctcaaactggccgacttttcctcagctctactgcaaaggtgagctgcttggtggatgtgatattgtgattgctatgcatgaaagcggtgaactgaaggatgtttttaaggagcacaacattccgctgcagccacagggaagcaaaaacgaggaggcagtgaaagccaagcctgatactgagaagagtggtgcagtttctgaaccagctttgcttactgcagctcagaaggaacgcttggaaagccttgttaatttcagcacagtgatggcatttataaaaggtacacctgaggagcccaagtgtggattcagtggaaaactagtgcatattcttaagcaagagaagatccctttctcaagttttgacattcttacggatgatgaggttaggcagggtctaaagcttctctcaaactggcctagttaccctcaactgtacataaacggtgaactggttggcggatcagacattgttatggagatgcataagagtggggagcttaagaaggttctatctgagaaagggatcgttgcgaaagaaagtctagaagaccgcctgaaggccctgatttcctctgccccagtgatgctcttcatgaagggcaccccagatgccccccgctgcggcttcagttcgaaggttgtgaatgcactgaagcaagcaggagtcagcttcggagcgttcgacatcctatccgacgaggaggttaggcaaggcttgaagacgtactccaactggcccacgttccctcagctgtactacaaatcagaactgattggaggctgtgacatcgttcttgagctggagaagagtggagagctgaagtccacgctttcggagtgaggaaaatttaccgtcgtatccgcatcttcctcttcctggtgtttctaccatccgtcgaccatcgagtttgctctattgatggcattttcttgtattcatagatccgtatttcaaacttagatatatgcctgtgccacatcgcttttaactgtgacatctgcagaagaataactaagacgacctgttcagtacggctaataactaagacgacctgttcagtaaggttatattgccagttcattttgccgcctcgctttcgctctgccttgaagcgttgcaacttccttattatcgcaattaatagagggtgctttagaaaattagaatgtacgc

SEQ ID NO: 17548 - DNA, 1520 bp, Oryza sativa
  ref <308>: DATABASE ACCESSION NUMBER: AK067983
  ref <309>: DATABASE ENTRY DATE: 2001-12-06
ccgccgagatcccgccccgccgtcgagatcacgcgccaccgaggagaggagatacggcggtccgcctatcgcgtgaggacgagcgagactgcatactccagaaggtgcgtgatttcttccggatcgaagatactctttgtcaaaaggaaaaaaaaagggtatatagaaaagaaaaattttgagtagaagaatatcaacagagacgatgatgcggcggtttgtgaatttggtggtggacaccgccggcggcggcggcgacgcgacggcgtacaagctgtaccgcgtcgctgcatcggccctcttttcatgtccagcacgtcggcaagcagccaaagtactagatccagatgacgtggaggacgccgccggcggcctgcctcctccggccatcaccttccacccttcctcattgtccggccctggaaacgtcgatttcttgtacctctacggcagtggcggcggcagcgacggcgacgacagccttctcgccctcgacgtcgacggccgtggtctgctctacagcgccgcctccgcggccgtccgctacatgcccgacccgtgcaagcccaagatcgagccaatctccttcaccgccgacgatggccgcctctacgtcatcgagagggtgcccttgtccggtaaccccggctgcttcgaggctctcacctacggcttactccccgacgacgacgactcactgtcctccaggatgggctggtactggcggtctcttccgccgcctcctttcgccaaggctggctacgacatcaccgcctccgcggtggtgcagttgaacgaatcgaaggagctctgggtgacggcggcgcacggagccgggaccttctcgttcgacacgaattccaaggttggggagtggagggagcttggcgaaaaggggatgccgttcatggggcgcggcgagtacgtggaggagcacgggcaatggtttgggctctcctccacgccgaggctggggctgtacctctgttcctgcgatctctcctatctctgctgttcctacgatgcgcaggtgatggtcaggtgctggttggatggcctagaccggctgccggcggcggcgccgcccaagcgatcgttactgatggagacctatgccgtgcacctcggctccggtaggttctgcatcgccaggttcatggaggaggaggagcaacacaacatctcacttcatccattcttccgcgtcgccggcgaaaaaagcaagaacgacaggttcttgctgctcaccggcgttgatgtggtgggcagtgacgacgccgtcgtcgtgcacaagtctatacgctacgcattccaaaacggtgatttcgttcgtggttactctcgagtcttttaatttcatcatcccctaatttacttattacacctctctagtctccggtaaaactagctatattttgttttgtgacggagtgagtatatcatttatatatatcccttttccttttcatttcgagcgagattgcaataataataatggtactccattcgtttatattacc

SEQ ID NO: 17549 - DNA, 1459 bp, Oryza sativa
  ref <308>: DATABASE ACCESSION NUMBER: AK067984
  ref <309>: DATABASE ENTRY DATE: 2001-12-06
gagtagtcgaagaatcccaaaccctctcctccttccatggcgatttgacccccaaaccctagcaatgccctagactaggactagtaggtagcggaaggaagctggaatcggaaggaaggaaggaaggtgggagggatgggttcgaaatcgaacacggagagggcgaggaaggcgctggaggccatgaagcagctgggtttctccaagaaggaggccacccctgtcctcaagaacctcctcaggctcttcggcaacaactgggagcccatcgaggacgagtgctaccgcgccctcgccgacgccatcctcgaccgccaccaggagaccgcagctgaccgcggctgcagcgcgacaaggccaacgccggacgatgatcatcacccccttaccctctgtggtgcttcgcgcgacgtggatactgagaccgacgaacctcgcaccaagaagcctagggccaccaactcagatcctcaatcgcctccatcccttacggacgaccaagatgttcctgcagctatctcacccccatcccatggtgcttctcctcaattccgtccacagaccagggcctctgcacgactgcgccaagcttctccttcttctgttacagcagcacacaagaggccaagacagatgatggatgaagatttccaagactctgcattcctcagggaacccaagcctgagcccgatatcgatatggacgccatacaaggcactgctgctacatcagactgcccaaatgcccaccttggcctcattgactatccgctcaatgccagctcctcaagggttgcacttcctctggcattgcttccacctgatcaaaatgttccacagatttcaggtcctaaaaaaagggcaattcaaccttgtagcaaggtgaacacgggggaaggatcttcagtcattgatgtagcatcatccactatgggtgaggtcaaaatgtcactgaaatgcagtgttgacccaaagttccgcatgccttccttagaagcagttttcaagatggtggaggataaatatcttcactcatacaagattctgcctcctgagttttccattggtagcctcatgaatgagatatgccaatgtgttgtacaactgggtagtgatcatattgcagaacataatacagaatcagatgttgctggcaatgggagatgctcacaaaatgagccaatgacaggtagcattccatttgtgaagccaatagcatgcgaggatggtggaaataggaaatgtaaatctgcaggagaatcatttattgtggaagactcagaaaattcaagtgttgctaaacagcagactcatttggcacttgccaacttgaagcctatccatgatgtaactgatatatccaagggagaagagagagtgaggatatcggtggccaatgaatttgcaagtgagaaatgtcctccttccttttattatatacgaggaaaccttgttttcc

SEQ ID NO: 17550 - DNA, 1252 bp, Oryza sativa
  misc_feature (543)..(543): "n"=any one base of a, t, c, or g
  ref <308>: DATABASE ACCESSION NUMBER: AK067985
  ref <309>: DATABASE ENTRY DATE: 2001-12-06
gaccgctcgctcatttgggcagaaaccctagccctaggcgagcccctaaaccccaacctcgcccgcgatttcctccccgagggcgtcgaggggaggtaggttggcgccatggatgcgatgaggaagcaactcgacgtgctcatgggggcaaaccgcaacggcgacgtgcgggaggtcagccgcaagtactacgaccgcgacgtctgccgcctcttcctcgccggcctctgcccccacgacctcttccagctcacgaaaatggatctcgggccttgccccaaagttcattcgctgcagctacggaaggattatgaagaagtaaaggcaaaaggaacagaaaattatgatagggaactcgaggaaatgatagacaggctcatcgtggagtgcgagaggaaaattcagagggcgctgaagcgtcttgctgatgaggatgccaaggctgctattgcaatatctgtttctgaggttactcagacagatgaggtgttgcagttgtcaaaggagatcaaggaaaaaatgaaagaagttgatacctatgantttggagggaaaactgatgataaaatcaagaccatggaagtggtggtagaattaagatctaaaaggggtgacatgcaggctacccctttgcttgatgcctttaacaaggacagagcttcattacctcagcctactccaacacctcaaatggcatcagtaccagcacctgctcaccctgatgctcgcactcaagaaatgatcaacgaaaagataaagaaagctgaagagcttggtgaacaagggatggtagatgaagcacagaaagttatggaagaagcagaggctttgaaaaagttggcagcacggagggaaccaacttcggatcctactaaatatactgctgctgatgttcgaattactgatcagaagttgcgtctctgtgacatatgtggagcatttctaagtgtctacgacaatgatcgacgccttgctgaccattttggaggaaagctacatttgggatacatgctgattcgtgagaaactgaaagaactacaggtacattcttgcatacccgacttaccgcaagtaaagtttttggggaatgataattaatttagaattccaaatgtctactgccctaaaggcataatcacaaaaagccaagaaatctacacaatcttatttgaccttatattctgtttgtacattatgatccaagtatgtgggttttgtgctttctctgaatttgttaaggtggaaattttgt

SEQ ID NO: 17551 - DNA, 2551 bp, Oryza sativa
  ref <308>: DATABASE ACCESSION NUMBER: AK067986
  ref <309>: DATABASE ENTRY DATE: 2001-12-06
gagtttcacttcccccttggtcttggtccgtctccactctctccactccgccgccgccaccgctcgtcgtcgcctccccccccaaatcaaaaatcaaaatcaaaacccccccatctcttcttctagtttcttctagaagccgggacgaacaccgcgtcgtcttcgccttcgccttcgtcgtctcccgctcgcttcctccctcctgggttagactgttaagcttatcctgcatcatggagaatggagacaaggatgagaaaaatgttgctgtcacggaaggatctaccaattctgaagaaaaggatcaagatgaggatttgttgaggagaacagaaatgctgaatgcaaaagaagcaataaattcttcaaatgagaattcaggcaatgattcagaagcacagatccatgtgagagatgattcacaaaaagaattcaatgagaagatgaataaagaaggaagctcagatccaatggaacctacagattcaagccagacagaggaagatatccttgctgaagacaaatctgaagaacctgtttttgatggaactgaggttgctgaaatggaagatttgaggcgttcgtccaatcaatctgtggaacttgattcagatgcccatgggtctgtactcaatgaaagagctactgcaatcaagaattttgttaaggaaaagggtgccattgcagtttcaacatttataaggcgcctttctggcaaaaaggacgaaaatgaattttctgttgaagatgaaaagaatgaaggatcagaaagcatcagtagtggcaatattggctcagatgctgaacctaaatcaaaagaggtgcagcccaaatctgaggagagaactacatggaatccactcaacttgattaaaatcggacgagattttgataccttcatgactggggaagctgggcatgaaaatgtgccagatttgatagagcaaccaacagggaagggaagaattattatatacacaaaactgggttgtgaagattgcaaaatggttcgctcattcatgcgtcagaaaatgctcaagtatgttgagatcaacatcgacatattccccagtagaaagatggaactagaaaataatactgggtcatccacagtaccaaaagtgtatttcaatgacttgctgattggagggttaactgaattgaagaaaatggaggagtctggcattcttgatgacagaactgatgctcttttcaaagatgaaccctcatctgctgctccgttgcctcccttacctggagaagatgatgaatctggtagtgggaagatagatgagttggcaaccattgtcagaaaaatgagagagtcaatcactctgaaggatagattttacaaaatgagaagatttagcagctgctttcttggtagtgaagctgtagatttcttatcagaagatcaatatttagagagagatgaggcggtggaatttggaagaaagcttgcaagcaaatatttctatcgccatgttttagacgaagatgtatttgaagatggaaatcacttgtatcgcttcctggataatgatcccataattatgagccagtgctacaacatccctaagggtatcattgatgttgaaccgaaaccaattgttgaagtggcatcaaggttaagaaagttgtctgaaaccatgtttgaagcttatgtatctgaagatggtaaacatgttgactacagaagcatccagggttgtgaagaatttaaaaggtatgttagaacaactgaggagctccagagggtggaaacccatgagttatcacgggaagaaaagctcgctttcttcataaatctctacaatatgatggctatccatgcattagtgacatgtggtcatcctgctggaccattggacaggagaaagttctttggagattttaagtatgtcattggtggatgtgcttattcaatgtcagctattcaaaatggcatactgcgtgttaaccaaaggccaccatacaaccttgccaagccttttggacagaaagaccaaagatccaaggtggcccttccatatgctgaacctcttgttcactttgctttggtatgtgggaccaaatctggacctgcacttaggtgttactcgccaggaaacatcgataaagaactggtggaagctgcacgtgatttcctaagaaatgtaggaattgttgttgatcctgaagccaaggttgcatctgtaagcaagattttgcgatggtatagcacagactttggtaagaacgagacggaagtgctgaagcatgcggcaaattatctggaaccagcagagtcggagcaattcttggaactacttgcgaacactcaactgaaagtcttgtatcaaccctatgactggagcttaaacatttagctgcagccatggtattcacatagatgtctagttatacttgaatacctgtcacagatactcgtggaagatcacgacttcttttacaccagaattttcccaagagttggtcacagctctggatgctgttttgttgtggcacaaagaaatgagtaccaatccaactctgttcgattcactggacg

SEQ ID NO: 17552 - DNA, 1578 bp, Oryza sativa
  ref <308>: DATABASE ACCESSION NUMBER: AK067987
  ref <309>: DATABASE ENTRY DATE: 2001-12-06
gcgatggttggcttcttctcggtttgttcgttccttgtggtcgagagtgagtgaggtggaggagagagaggaggaggaggaggaggggattcattcacgtggcttccggagagagcaggagtcaacgtgcggcttgactctggagatctctctctgtcgtctcgcctcgcccaaatcagaagcgaatgatggaggcgtcgaggtcgtgagagggagaggaatcgacggagagagggaggcggcggcggcggcaggaaggttggagaaggagaggcagtggagaagtcaagaacaagaacccaatcaccgaaacgcctcatcactgcagcaatgccatcatcaaccatggccgtcgacaccactgcttcggagtactggctcaattggaggttcatgctctgcgcggtctgggtctactcctgcatggtcctggcatgcttcttgatctggaagtacgaggggccgagctcacaggacggcaatggcgatggcggcgaggacagtgaggatgcgcggccgccccgggccgcatccggggttgtgtaccttgaagattgctggaaaccatgccttgagcagatccaccctggctggctgctggcgttccgcgtcgtgtctttcttcattttagcctccctgcttgcggttgatgtcgtcgtcgatggatggagtgtcttcctatactacactcagtggaccttcttgctagtcaccttatattttgggcttggttcggtgctttcaatttatggatgctatcagtattcatacaagaatggcgacaatagatctggtgcagatcatggcacatatatcattgctccagctggggaaagtgtatatgatcagtcaataaaaaatccttgttacagtaaaatgcatggtggcaaagaaattgcaggattttggggttatctgttccagatcatgtttcagacaaatgcaggtgctgtgatgattacagatctggtgttttggtttatcctgtaccctttccttgcctacaatcaatatgatatgaattttttgctgattgggacacactctataaatgttgtgttcatgattggtgatactgctatgaatagcctgcgtttcccgtggtttagaatcgcatatttcttgctgtggactggcgcttttgttaatgttcagtggctcatccatgctagcatatcgatttggtggccttacccatttctggacttagcatttcctaaagctcctgtatggtatttggtggtagcagtgatgcatttcccttgctatgctttattcgccctggttatgaggctaaaacaatctctgctggaaagatggtttcctcagagttacacctgcgtgtagcaaacaagaacatatatagtgttacaatttccctcctgctgcatcctgcaaatgcaaattatatggagctgctgctcaccgtaaattcctagaaaccatattgttcagggttagatgatatttcgtaaatttttttcagacagcagcttctttgagtcagctgttgtctcctgctcttttcaatggagaaaactgtacagtccaatataataatatatggcattctcaacc

SEQ ID NO: 17553 - DNA, 1777 bp, Oryza sativa
  ref <308>: DATABASE ACCESSION NUMBER: AK067988
  ref <309>: DATABASE ENTRY DATE: 2001-12-06
gagagacctgtgtacgcgatcttggttagctccggcctttgatcttgaccaccaatctcgcatttcttggatcttctcgtcttcctcactcctcgatcgatccatcgattggttgctggtcggagaccatggtggcggcggcggtggcggcggcggagcaggtggtggcggcgctgcgggaggagtgcgcgacgccggcggcgcggctggatggggtggcggcggcgatggccggcgagatggcggcggggttggcggaggagggcggcagcaagatcaagatgatcgtttcctacgtcgacaacctccccaatgggaccgaagagggcttgttctacgcgctggatcttgggggaacaaacttccgagtcctgcgtgtgcagcttgctggaaaggagaaacgggtcgtgaagcgcgagtcgagggaggtctcgatccctccccatctcatgtccggcaactcctcggagctgtttggcttcatcgcttccgcgttagccaagttcgtcgctgatgaaggacataatgccgtgttcaacgacaggcaaagggaactggggttcaccttctctttccctgtgcggcaaacatcgattgcgtctgggactcttatcaagtggaccaaggcgttttctattgatgatgctgtaggtgaagatgtggtggccgaattgcagatggccatggagaagcaaggtctggacatgcgcgtttccgcattgaccaatgacactgttgggacattggcggcaggcagctactacgacgaagatattgtcgtcggtgtgatcttaggcactggctcaaacgccgcatatcttgagaaggcaaatgctatccctaagttggaaggcgagttaccaaaatcaggaaacatggttattaatacagaatggggtaacttctcctcatcctgtcttccaataacagaatatgatgaagcactagataaagagagcttaaaccctggagagcagatcttcgagaaattgatttcaggaatgtatctaggtgaaatcgtaaggagagtgcttcttaaaatatctttgcagtcttcaatttttggcaatctagatcagaccaagctcaaaacccgctttattctgaggactcctgatatttccgtgatgcatcatgatggaacacctgatctcagaattgtggctgaaaaacttgcagataacctgaaggtaatcttcatcagtaaatccagcattgaactgtattccctctatccattttatgcacaatgaacacattacacggcattgtccacttttaccacagatcacagacacatccttagaaacaaggaagatggttgtcgaaatctgtgacatcgtcacccgaagatcagaccggctggctgctgctgggatcgtagggatcctcaggaagatcggcagaggcgtcccaggcgacaagcgaaagtcggtcatcgccatcgatggcggtctatatgaacattacaccgaattccggcagtgcctggagaccacgctgacggagttgctcggagaagaggcgtcgaagtcggtggctgtcaagcttgcaaacgacgggtctggccttggagctgcactgattgcagctgctcattctcagtacctgaattgattccccatagacagagttccaacttttattagtgactcagtgctgttgttatagtttatagaatgtggtgaagttctgtatgtttcgaaggagcctgatggactctacaaacaaaattttcagaaatgaaatcgaagccaaatgtgttggtggtgttgcc

SEQ ID NO: 17554 - DNA, 3061 bp, Oryza sativa
  ref <308>: DATABASE ACCESSION NUMBER: AK067989
  ref <309>: DATABASE ENTRY DATE: 2001-12-06
tttttggctagcttgagagaaaattctcctgtaataagagcaaaggccttgcgtgcagtcagcagtatagtcgaagctgatcctgaggtgttgggtgacaaacgtgtccagtctgctgttgaaggaaggttttgtgactcagctatttctgtccgtgaagctgcgcttgagcttgtgggtagacacattgcttcacatcctgatgtcggcctgaagtatattgagaaagtggctgagcggataaaggacacaggagtaagtgttcgcaaacgtgcgatcaaaatcatccgcgatctgtgtgcttcaaatccaaacacggacactactcgtgcctttgtggagataatttctcgtgttaatgacgaggagtctagtgtacaggatcttgtatgcaaaacattttatgagctatggtttgaagaaccaactgggagtcataagcacttggttgctgatggtagttcagttcctatggagattgcagtaaagaccgaacaaattgttgacatgttgagaaagatgcccaatcacctacccctcattaccattgtaaagcgcaacttggctcttgatttccttccacagtcagctaaggccacaggcattaactcatcatttatggcatctctaagaaagcgttgtgagttgatatgtaagcgcttgttggaaagaatactgcaggtggaagagggagctgctagtgagactgaagtccatgcacttccttatgttcttgccttgcaagcattttgcattgttgatcccaccctctgcactcctgcaactcaaccttttcagtttgttgaaacacttcaaccataccttaagaagcaggttgacaataaatcaacagcccagttgcttgaaagtataatttttgtaattgatgctgttcttccactcatatggaagccaccacaatctgtggtaatagagctagagcaggatctgaagcagatgattgttcgacactcctttttgacagttgtgcatgcctgtatcaagtgcctttgcgcccttagcaaagcagcagatagagggccaaggttattggaataccttgtaaacattttttacaagcatctgtcgggttctaactcttctaattctgatagtcagcttttgggccgatcattgttttgtcttggactgctccttaggtatggttctcaactcatggcagcatccgaaaatcaacttgatttcccaaagattatcagcttgctgaagaaggaatatcttctcaaggatgatttcagcttgaaggttcgaggtttgcgggctttggggtacatacttattgcaaagcctgattttatgctacgtaaagatatctcaaccctaatagagtcatcattgtcttctgttgttgattatagattaaagattcaaggattgcagaacctttttgagtatctacgtgatgcggaaagccagctcaatgcagagagtactggcaagcctacacccaatgcaacaaacggtggaagtgaagtgcctgttgctgcaggtgctggagatactaacatatgcggtggtattatccaattatattggaattctattcttgaaagatgcttggatataaatgatcaagtccgtcaaactgcactaaagattgttgaaattgttctccgccagggtttggttcaccccattacttgtgttccacaccttatagcactagaaactgacccactggaggggaactcaaagttggctcatcatctgctaatgaatatgaatgaaaagtacccttcattttttgaaagccggttaggtgatggcctgcagatgtcatttcgatttttcgagtccacaatcagcaatcatgatatggtggccacaaacatgaaatgtaatccaattgcgtttgttaaacctgggatatctcgaatataccgcctcatccgtgcaaaccggaattccaggaacaaatttgtacactcaatagtccgtaaatttgagggtgataaccgcagttaccccacaattagctttctcatgtactgtgctgaagttcttgcgtctctcccattcacaagccctgatgagccactttacttgatatatgatataaatcgggttattcaattaagagctggagcagttgaggcaaatttgaaaaattggacttccatgtatcagcagcaagaaatggtgggtatgccaagagacactggtgatgttatgcatgagcctgggggatgctctgaccaaaatttggttgatgtctctcaaatgatgcttggcaatacatgcagcacgccagttgttaacatggccaaacttcaggaggattgccatggcgcgatagccctgcagctccttctcaagctgaagagacatctgaaaactgtctatagtttaaccgatgcccggtgtcaggcattttctttgaaggatccaccaaaatctggcgaaacaatctccaagcagaatatcccattgaacattagtaataccaacaccagtttgccgagctgcccgcaggatgcagcacgtgtataccaggatttcaagacagtgctgcgagaagacaccgtggactacgggatgtacaccgtttcggcccagaaaaaacgtccgactccaagaagctcgtcgagagtaagaagaccggcggctgttacaagaggccgtggtggtggtggtggtggtggtgatgaggacaccgatgacgaagattggactggtggtggagcaagagtgctggacttcagcgctcagggtgggcgagtaacaaggcagagggtccaagtctgactggctgctgactgactgttgttggtgcttcttgtgtacattgtaggaaattttataggtaacaggggaggtttaggtcgtcttaggggccattgttagtacatagaagcagaaaaaaggaaaggaagatatctagcttttacttagatgccattaatttggagcactccttttcttttgcttgctgttgcccaatttagatgttgtaattgctctcgggctctggcaatactccaacaaacaggttgtgctcctttctaattcaatggaaaagaaatgctttcttttgcttctc

SEQ ID NO: 17555 - DNA, 2230 bp, Oryza sativa
  ref <308>: DATABASE ACCESSION NUMBER: AK067990
  ref <309>: DATABASE ENTRY DATE: 2001-12-06
gagtagaaaaaaaaaaggaaaaagggaatagggaagcgagggcggagtacggcgcgcttcgccgttgccggaggcggcgggggtgagggcagcgagcgatgccggtggcgaggccggagccgcaggagccgcgggtgatcgcccatgtcgacatggattgcttctacgtccaagttgagcagcggagtaacccggagctcagggggcagccgaccgccgtggtgcagtacaacgactggaaaggcggcgggctgattgccgtcagctacgaggcccggaagttcggcgtgaagaggtccatgcgtggtgatgaggccaagatggtttgtccaagtatcaatttggttcaggttccggtggcccgtgacaaggccgatcttaatgtttaccgtagtgctggctctgaggttgtcacaatcctctcgaccaaggggaagtgtgagcgagcatccatcgacgaagtttatcttgaccttactgatgcagccaaggaaatgcttttagaatctccaccggagttattggagttgatttttgaggaggccacaaagtcaaatatcctgggccttccttctgatgtcagcaacagagaagatagcgtgagggcatggctttgtcgagccgatgctgattaccaggataagttactatcttgtggggctataattgttgcgcaattacgggtcaaggttttggaggaaacccaattcacatgttctgctggtattgctcacaataagatgttagcaaaacttgtcagtgggatgcacaaacctgctcagcagacagttgttccatcatcagcagttcaagattttctagtatcactgcccataaagaagatgaagcaacttggtggtaagcttgggagttccttgcaggatgaccttggggtcaatactgttggtgacttctaagttttacagaggacaaattacaagagtactatggagtaaatacagggacgtggttatggaagattgcaagaggtattagtggagaagaagttgaggatcgtcttctaccaaagagccatgggtgtggaaagacatttcctggcccaaaagcattaaagaataatgcttctgttaagacatggctggatcgactttgtgaagaactgagcgaacggattcagtctgatttgaaccagaataagagaattgctcaaacactaactctctatgccagggcatgtaagaaaaacaagtctgattcaatcaagaaatttccttccaaatcttgtccgttgcgttatgggactgtcaaaattcaagaagatgcaatgaagctatttgaatctgggcttcatgatttcttgggttctcagaacacaaaatggagcataacatctctttctgtttcagcaagcaaaatattcgacataccaattggaacaagctctatcttgagatacattaaaggaccaaattccactgtttcaccagctaacctcgattgttcttctttacctgaggatccatctcttggtaacaagttatatatggcacctaatcatgaagaacactgtgaaccatcattatctgagaaagaagactatggaaacaatagtaatttagccaaacagtgtcaaataaaggaagaaaaaaaggtgtcaaagaagttaactgaagttaagggaacttgctctattctgaaatttctttcacaaagtcctgtactcagtgagaaaagaaaaattgacagcttaatttgcagtcatccaggtcctgaaagttcttcagaaccgaataaagctgaagaacacaaggctgcgcagtatgttgataggaacaagtttaacactgctgggagtaactctgccagcagtagcacatggatgttcaacgttgaagatatcgatccagccgtagtggaagaactgccgccggaaatacaaagagaaatacatggatggattcgcccgccaaagcaatcaagctcaaagacacggggttctaccatttcgtcttacttccaacctgcaaagaggtcaggataggtagaccatgagatgcatatttctaacatgttgattcgtctcctggcatgacctctcccctgtagattgtaggagcatcagcttgatgcgccaacaaatgggcgtcaactgaaagaccagcaaaatgccaaagtgttcgcccttgtgaatagtatttgcattgtaaatttaattgacagtggaactaacaaatactattagtaccaaaatttatttacggtccagtat

SEQ ID NO: 17556 - DNA, 1986 bp, Oryza sativa
  ref <308>: DATABASE ACCESSION NUMBER: AK067991
  ref <309>: DATABASE ENTRY DATE: 2001-12-06
ggagggttggcgacgccgcgggcggcgcgcgaagcaaatggagcgcgattttggcggataaatttgggcgcgcggaggcgggaggagcgggaaccaaatcgcggagccgcttccaacctcaggtctcaccccaaactcgccgccgccgccgccgccgccatggagaggaagcaggcggagtacagcaacctcgacgagaggtacgcgatccagggggagaagtaccaggggcagcagtacagccacatctacttcacgcgactccaccacatgcgcaacctcctccacgccctcgtcccctcctggaagccgcaccttcctgttactacagtgttgggacttgaagaaggaaaggattgcataatcgttggaactttatataagcacatgaaattaaagccttccattcttgatgaatattctaaggagaggtctgctattcctcttgttaaaccacacaatttcatgcatcctgatgatcatctcattctggaagatgaaagtgggagagttacacttgcaggagccatacctccagcagcatatgttactggagttgtaatagctttacatgggaaagaaacaagtgctggcaactttcttgttgaagatattcttgaggctgggattcctcctcaaattacgttacctagcataaacgaggacaaatatgtggtatttgtgtcgggattaagtattgggagtgaaaaattcaatcctctgcaattccaacttcttatagaccatatcacagggcatttgggtgatgagaatgagcaatccatagcatccaacatagtacgtgttgtggtggctgggaattcggtacatatttctccaagattcttcaatggtcaggcagtagcatcgaaagatcaatccaggatagctgaaccaatcaaagaattggatataatgctcactcagcttgtggcatcattgcctgtggacatgatgcctggatctaatgacccagcaaatttttctttgcctcaacagcctttgcatagatgcctttttgctggagcagccacttataacactttttcatcgtgctcgaatccacatcaattcgagcttgatagtgtccggtttattggaacatctggacagaacatagatgacctctacaagtactctgatgccaaagacaagctggaattcgtggaaagaacactgcggtggcgtcatcttgctccaactgctccaaacagtctaggatgttatccatacacagacaaggatccttttctcgttgaaagctgtccccatgtttacttcgtcgggaatcaagataaatatgaaactcaattattgcaagggctagaaaaacaaaaagtgaggctgatctgcattccaagattttgtgatagtggagttgctgtcatgctcaatttgaggaacttggagtgcagcacgttgagtttctcaacaagcttcgatgcttgaccatgctctacttgtctggagtgcaagtgagttgatgtagcatgctgctgtggacatcttaatcctgaactggcgcagggttgtctaaaggatgtacttgtagttctttttttagattgtgatgacctaggtttctccaattagatgtgttgatataattgcctaaacctcgatgtatcaaaagctgaaatagagggtgcacggtttgtactaaacaaaaagaagcgtatgcttcttttctcggtatgagtatccacagctgatttattcgtcagatgttgtattctttctcatcagtcttagaaaatgtatatttcggatcagatatgcagatgcaaaattgcacagcagacagcagagtaaattagattactgctagtctctagaagtttagcttgagttagatgtcttccccaggttgcagaagatggagttgttgttcaacatgaacgggaagagttaagagtatttttcccctaattccagactctaagaattgatatatttggtgtggttcgacttacccttattttggcg

SEQ ID NO: 17557 - DNA, 2850 bp, Oryza sativa
  ref <308>: DATABASE ACCESSION NUMBER: AK067992
  ref <309>: DATABASE ENTRY DATE: 2001-12-06
gctctctctcgagacttccttccttccttcccttggtggtggtggtggagactggagagtggaggcgaaaaaagaaacgaatcgaatctctcgtccctcctcctcctcgatctccttcctctcaattccatccatcgtctagtcttcttcccaaacccaacaactccatcttcttctttgcttcgcccttgatttgtgtgctgcgtgaacaaggcctgtctagagggcagccatggccactgtttctgacatcggcctctccgcggctatcaacgtctcgatggccgttgcattcttgctggtctttgcttttctacgattacagcccatcaacgatagggtttactttccaaaatggtacctcagaggaatgagagacagccctgtttcctctggtgctgcagtgcaaaaggttgtcaatttaaacatgagatcatacttgaaatttttaagttggatgccggctgctctcaagatgccagaggatgagttgatcaatcatgcaggccttgattccgctgtctatctacggatatacctaacagggatcaagatattcgttccaatatcaattttagcttcgcttgttctgttccctgtgaactggacaaatgacaccctagacagcatgaaggtagtccacagtaaaattgacaaactttcaatatcaaacataccttatgggtcaaacaggtttgttactcacttggttatggcttatgctgtcacgttttggacctgctatgtactgttccgagagtatgagataattacaacgatgagattgcggtttcttgcttcagagaaacggcgaccagaccagtttacagttcttgtgcggaatatacctccagatcctgatgaatcaattagtgagctcgtggagcatttcttccttgttaatcatcctgatcattatctaagacaccaggtggtttacaatgcaaataaacttgctgatctggttgagaagaagaagaaactgcaaaattggcttgattactaccagctcaagtatgaaagaaatccatcaaaaaggcccaccactaagactggctttcttggctgttttggttccgaggtggatgccattgaatactacaaagcagagattgagaagattgggaaagaagaagctgatgagcgtcaaaagatcatgaaggatccccagtcagctgttccagcagcctttgtttcatttcgttcacggtggggggctgctgtttgtgctcagacacagcaaaccagtaatccaacagtctggataactgaatgggctccagaacctcgtgatgtctactggaataatctatccattccatttgtgtccctcacagttaggaggctgatagttgctgtggcattcttcttcctcaactttttttatgtcattccaatagcattcgtgcaatctcttgcaagccttgaaggaatagaaaaggcgcttccatttctgaaacccttaatcaaaattgatgtcatcaaatcattcatccaaggttttcttccaggaattgctttgaaggtcttccttatattgcttccaactatactgatgtttatgtctaagtttgaaggattaatatcacagtcatcactggagcgaagatctgcatctaaatattatatcttcttgttcttcaatgtatttttgggaagcatcgttacaggatctgctttagatcagcttaaggcatacattcatcagtcggcaaatgaaataccgagaaccatcggtgtagccattccaatgagggcgacttttttcataacatatgtaatggttgacggttggactggtgtagctggtgaaatattgagattgagggcacttataatcttccatttgaaaaactttttcttggtgaagactgaaaaggacagagaagaggcaatggatcctggtagtatctgttttgattggtgtgaaccacgtatacagctatatttcttacttggccttgtctatgctgtggtgacaccgttattgcttcctttcatattggtattcttcgggctggcatatgttgtctaccgccaccagataataaatgtctacaatcaacaatacgagagtggtgcacagttttggccgagtgtgcacgggcgcataatcattgcattgatcgtatcacagctacttcttattggactgttgagtacaaaaggtttcgaggagacgacaccagttcttgttgttcttcctgtgttgacgttttggttttacaagtactgcaagaaccggtttgagcctgcatttgtgaggaacccactacaggaagcgatgaggaaagacaccctggaacgggcaagggagccaaccttcgatctgaaagcgtacctggccaatgcgtacctgcacccggtgttcaaaggcagggaggaggaggacaatatgtcaatatccgagggtgtcgggatggaggaggtgatcgtgccgaccaagcgtcaatctcgccggaacactcccgcccagagcaagtacgaaggctccgacacgctctctcttcctgaaactgtacacgaacgatagagctacgggaatatcagggtgactactagcttgttgaattctttatagtctgtacagatagattgatacatacctactcctacggggatgttggcagatagctttgctgtacactttacagcacgagaggtatatggagggattgttcaacacccacagactgatgattggattgccaatattatgatttctttgttggtttccaactgcaactagctgtagtagtaaattagtactaccactgtaataatataaaccagctagctagtagcaagtttttgtcagtgcaagtgtgcaaccgcgcaaggttgttaacg

SEQ ID NO: 17558 - DNA, 2188 bp, Oryza sativa
  ref <308>: DATABASE ACCESSION NUMBER: AK067993
  ref <309>: DATABASE ENTRY DATE: 2001-12-06
accaccctttgattgttgaacgtttgcagaactacactggtgatagactcaattttggactagctgctgagcaggcaaaatctgaaggctataagatggagatggttattgttggagacgattgtgccctccctccacctcgaggaatagctggtagaagaggtttagcagggactatccttgtgcacaaggttgctggggctgctgcagatgctggcttatctcttgcagaagttgctgcagaagcaaaacatgcatctgaggttgttggtacaatgggagttgcactttctgtttgcacattgcctggtcaggtgacatctgatcgcttgggtcctaagcaaatggagcttggccttggaattgtaagattaaaccttgtcagttattattctcattaagcacagaaataattgtcattacttgaatttagtttacttattagtttttgtgcctttgtatctgatcatttccatgctgagtgctgtaaatttgcatgttccccaaatatgaaacacgttttttgttccgcagcatggagaacctggtgttgctgttgttgagctccagcccattgatgtagtagtagaacatgttcttaagcagatattgtcacaggaaactcagtatcttcctatcacaagagggagcaatgttgtcctcctaatcaatgggtaactaaagatcttagaattttcgtttcaccatatctcaatgattatcatatggtttgcttactttatcagcatttagtttcacagggaaggtaaaaaaagccttttacttttggtatcttggtccaacattctgacctatgatgagcagttgccttacactgtagtattacctgatcgtttgatcccatctttgaaatgcagattgggtgcaactcctatcatggaacttatgattgcagcaagaaaagcagttcctgaattacaattggagtatgggattgctgttgacagagtctacactggcacacttatgacttcacttgatatggctgggttctctatcactattatgagatcagatgaaaacattttgcagcgacttgatgctccaactaaagctccggcttggcctgttggatctgaaggaaatcgtccaccagcaaaaattcctgttccagtaccaccatcaccatcagggaaggatgatgagattctcactgaacctcaggagttaagcaagcaagggtgtattctggaggctgctattgaagcaggggctaaagaaattatcaatatcaaggataacttaaatgaatgggatagtaaagtgggtgatggtgactgtggaaccacggtgaggctaagaatgggttgccaatttaacctctcatgatatagctattttaagataaaatatttgtctgtatttttcagatgtatagaggtgcaacaactattcttgaagatctgaagaagcgctacccaatgaatgatgcagctggaacaattaatgagattgggtcaacagtccggagagtgatgggtggaacaagtggaatcttgtatgacatactttgcaaagctgcatatgcaagcttaaaacagaacacaagtattggtgcaaatgaatgggctgatgctttggaggcctctgttgctgcggttagcaaatatggtggtgctagtgcagggtaccgcacaatgttggatgctctaattcctgcatgtacagttctgaaacagtctctcaaagccggggacgatcctgtgactgcctttatcgcgtcttctgaagcagcatcagctggtgctgaatccactaaacagatgcaagcgaaggcaggacggtcgtcatacattgcacccgacctggtggcatcagttcctgatccaggagcagttgctgcagcagcatggtaccgtgcggcggctcatgcagtgaagagtaagctgcacgcctcggatagctagggtagcgcatggcatgctattatatatgtgcacgctatgcctcattcatagatcaaaagtacgactatactgactgacggcgaaattctgggggcgttttctcacccaccccttcagatttggtttccgcttgtgcctttctgcatgggccgagaaatcgagttccgtattcttttgccctcacatcatacaaaagagctcttttattgaagagtttgtagacgatattccaagcatgaagtgaagctgtgcttttgccc

SEQ ID NO: 17559 - DNA, 3025 bp, Oryza sativa
  ref <308>: DATABASE ACCESSION NUMBER: AK067994
  ref <309>: DATABASE ENTRY DATE: 2001-12-06
ggctcctccgcgatttcgagattctctcgcgtttgctcgatagcttccgcctcccccatttccttcttctccatcgaatttttcggagacctccagtagcgcaatttctctttgccgcggcggcagcggcagggcacgggcgggagcggcagcggcagcggcggcgaatcgaggggccggcgaggaccgggtgattggggccggggcgcagccggtgcggcacggcggagctagggcggaggggggaagcccggcgggcggaaagcaggcatagctcgttgtgtccaggctccgggaatttgttggctccgccgccacagcgccactgcttggggatgatggtttgaccatgcgcacaatgcgttcgacgaaatgtccatgggcattcctgggcgtggctggcgccctggtgatgctcgtcgccgcggtccatgtcttcatggtgccaatcctcccttcctcgctcgatttctttggtgctggtcacggcattggcaagccaaggaatgtgctgccaggcgttggagtggtggactcacgtctcagtgggcagttcccttctgattcgtatggtgcagtgacataccgtggtgcgccgtggaaagctgagattggcagatggcttgctggatgcgatgccggcttgtcggttgtcaatattactgaatttataggtacaaagcggtgcgagcaagactgcaatgggcaaggtgtgtgcaactatgagctgggagaatgcagatgctttcatggatatgctggttatcatatacaggaaaacgatgtgaggaggttcagaaggtggaatgcaacttaccaagttctcaagaatggcctgtgggacggtggatagtttccatatgtccagcccattgtgatacaacaagggcaatgtgcttttgtggaccaggaacaaaatatccagatcgccctgttgctgaagcttgtggctttaaaacaatcttgcctaaaaaacctgatgactcgaagctcactgactggaaaacacctgatccggatgtattcacgacaaacaagagtaagccaggatggtgcaacgtgaatcctgaggatgcttattcttccaaggtgaagtttaaagaagaatgtgattgcaaatatgacggactctgggggcgattctgtgagacacgtgttgaatgcagctgtattaaccagtgctcagggcatggacattgccgtggtggtttctgtcagtgtgacggtggatattttggaattgattgcagcatgccatcaaattattcagttgcatatggcatgccctcatggctccaaccaccaatgaatttaccagacttgaaaaatataagctccagctccatcaatgttaaggttgttgctaagaaaaaaagaccacttatttatgtatatgatttgccagcagaatttgacagtcatcttcttgaaggacggcattacaagtttcagtgtgtgaacagaatatatgatgacaagaacagaaccatatggacccagcaactgtatggtgctcagatagcactctatgagagcatccttgctagccctcatcgcacactaaatggtgatgaagctgattatttctatgtgccagctcttgactcgtgtctaataactagatctgatgatgccccgcatctgcagatgccgagggacttgcgcctcaggagctaccatactctggagtactacagaatgacttatgatcacatagctcagcggtatccttactggaaccgcacttctggaagagatcatatctggttcttctcatgggatgaaggtgcctgctatgctcctaaagagatctggaacagcatgatgctcgtccactggggaaacactaacacaaaacataagaattcaacgacagcttattgggcagacaactggaattatattcctattgacagaagaggcaaccatccctgttttgatccaagaaaggatcttgtgcttccagcatggaagcaacctaacccagcagccatctggttaaaactatgggcgaggacaaggaacaaccgtacaacactattctatttcaatggtaatctaggaccagcctataaggatggccgtcatgaagacacctatagcatggggattcggcaaaagctggccgctgaatttggttccacaccagataagcaggggaagcttggaaggcagcacacagccaatgttacagttacctatttgcgaactgagaagtactatgaggaactagcaagctctattttctgtggtgtcttgccaggggatggctggagtgggcgtatggaggatagcatgcttcaaggatgcattcctgtaataattcaggatggaattttgcttccctatgagaatatgcttaattacaacagttttgcagtccgcatacaagaagatgatatcccaaacctcatcagaatacttcgagtatgtgtttgcattaactcccctttcgttcggttataacttttgacacatacttggtgtttccatctcaccaggggataaacgaaacacaagtagagttcatgttgagaaatgtgcgccagatatggcagaggttcttctaccgtgactctatattgctagaggctcaaaggcagaaaagattattctctgaggaggcaccgtggtctgttgaggtgtcaaaactagacaaggttgatgatgtcttcgctactttcatacaggtattgcattacaaattatacattgacccttggcggcaaggtgtcctccaaagaaaggaaaccgggttgcctgacatctgctcgaaagcttcctgaaatgtctggcagacactacaaatgtaaagctaagataggcatatatgtagttctagattcctagaaagtgacctattacctataaattctgttacattcaggaagattcaaacgttacctttggtagttcatttcttccagagttttgtcagattgacccccaggccattttctgtaaggataatagcaatagtaccttgctttcttgattcggaattgatgtatagggcacattcttt

SEQ ID NO: 17560 - DNA, 2113 bp, Oryza sativa
  ref <308>: DATABASE ACCESSION NUMBER: AK067995
  ref <309>: DATABASE ENTRY DATE: 2001-12-06
gaaacccacacacatccacccacccaccaccttctcctccccccccccccccctccacttctactacggaagccatctcctcctccgccgctcgccgtcgccgtcgccggcgacctccaccaccgcctccccgactgtacagcctccgcgccaggccgtgagacgggcctaagcccgttcgcgcggggcgggatgaagggcctgtggaagcagagcggcctggcgggcatggcgtgcgccgcggacgttggcgcggcgggcgcggggcagcgcgcgaggctcgcggtgtacgtgctcgccgtggccttcgcggcattcaccgcgtacgtggccgtctcctcctcctcgccgccccccgccggggagggcgcgtcgtggttcggcggggtgtacgcgtccacggcgccgtaccgcgcgcaggtctcggggttcttctcgtccatcttccccaccggctcctccaccccctcgccggagcagcagccgccgccgccgcgccgcggcgagggaggcggccaggtgagtagccatgggatcgatgagcacgcgcgggtgcggagcggcgcagcgcacagcgtccctgtcgatccagctgcgtctaccaagcattcgggaagtggaggtggaggtggtgcggcaagcaacaatggcggtggtgggagtgcgcctccgcccggcaatttggcaggaagtggcactccacctgcaaagggaagcggcggcgacggcggcggcgctccggcgaataattccacaagtggcggcgccccggcgaacagcgcggtggagcagagtagcccggccggagatgggggtggatccccatccacagccagtagttctgccggaaaatatcctccgcgaacaccggcgaggagagtgtagataagtccaataagcagtcaggaagtggaggtgaagctcccagcaatggcgatgccgtttctgacaagaagaacagcacggcgaaggccgataccgaagttgctgttaaagcatccagtgataattctactggaactggaagttcagcaaagggtgaatctaatgttggatctaatagcagtgcaggaagtggaaatggtgttgcaagtagtgtttcttctgctgctgtgaatagcactgcggtaaagacagatgcaaaagacgtagtcgttgctacgagtactgattctgccggaagtgtctcagatgtgaaggccgatttgagtaacagatcagatactccgccagcgagtggaagtggacattccaaccatacatcagatgtgactgttagtccggcgaagggaaatgctaaagatggcggagctgatacaaataaagcgagtgggaatgtggcttcaactagtaatcagactgctagtactgcaatggtcgcaaagaaagcgggtggatccccaagcaagaatcagacatctgtagcatcgacaaattcgaagaatcagaaccagactagtgctggagttgcttctggtggaagtagtggtacaacaagtaagcaggaggaaacaacttcgcagggtagtgttggttcatctaaggatcatcctgcccaagcaatcaactcaaaaactagcaactacagcgaagtgctggtgaaggggaatggatcatcaacaaaacaggcatcacaaaaacagcctgataaaaaggttgactggatcaaggagatggccagctgtgatatgttccatgggaattgggttcgggatgagtcgtaccctctctaccctgagggatcatgccctcacattgatgagcccttcgactgttatctcaatggccggccagatcgagcctaccagaagctccggtggcaacctagtagctgcaacatcccgagattgaatccaactgatatgttggagaggctgagggggaaaagactggttttcgttggtgattcacttaataggaacatgtgggaatccctggtctgcatcttaaggaactccgttaaggataagaggaaggtttttgaggcatctggtaggcatgagtttaagactgagggctcatactctttcctgttcacggactataactgcagtgtggagttttttcgctcccctttcctagtccaagaatgggagatgaaagtgagcaatgg

SEQ ID NO: 17561 - DNA, 1246 bp, Oryza sativa
  ref <308>: DATABASE ACCESSION NUMBER: AK067996
  ref <309>: DATABASE ENTRY DATE: 2001-12-06
ggcgggtcgtcgtcagccgccgcggcaggcgaggtgatcgggcaggacgaggcggtggagtgggtcaagaaggaccggaggcgcatgctccatgtcgtctaccgcgtcggcgacctcgacaagacgatcaagttttacaccgagtgcttggggatgaagctgttgcgcaacgcgacattccggaggagaggtataccaatgcttttctcgggtacgggcctgaggactcgcattttgttgtggagctcacttacaattatggtgtggaaagttatgatatcgggactgctttcggtcacttcgggattgctgtcgaggacgttgcaaaaacagtagatctcattaaagccaagggaggaacggtaacaagagaaccaggacctgtaaaaggtggaaagtctgtaattgcttttattgaagatcctgatggttacaaatttgagcttatagaaagaggtcctacacctgagcctttatgccaggtaatgcttcgagtgggagatcttgatcatgctatcaatttctatgagaaggcatttggcatggaacttctccggaaacgagacaatccccaatacaagtatactattgcaatgatgggatatggtcctgaagacaaaaatgctgtactggagttgacctacaactatggtgtcaaggaatatgataaaggaaatgcttatgcacagattgctattagcacagatgatgtctacaagactgcggaagtcattagacaaaatggtggacaaataactcgtgaacctggcccattacctggaattaatacgaagataactgcttgcacagatccagatggctggaaaacagtatttgttgataatgtagattttctcaaggagttggaagaatgagtttttgccaatgatctcatcttggtacaggattcagaggtttttccccttgatttgacatcttgcgcccttgaaatcttgtaaaagccacaccacctcgaactgaggtttgtagataggccatgcaaatctaccattccacagttggtagtttaatagagcattagattacaacattccaagcgatgtagatgcgcaatccattttgttagcgaagtcaaatcatatgtacaaattttgttttcccggtcagaactattgttcttaatcaatccattttacattcgaaagttagcattcctgctgtaggacttcttgtcatttgtattctatgtcatggaatatgaatgaatggtggtaagtatggaatc

SEQ ID NO: 17562 - DNA, 2978 bp, Oryza sativa
  ref <308>: DATABASE ACCESSION NUMBER: AK067997
  ref <309>: DATABASE ENTRY DATE: 2001-12-06
gggaccccacacgccagcctcccgatccgacaccaaaggagagagccgcctcgccttcgtcttcgtcttccccccgccgcgctcgtgccctcgcctcgcctcgcctcgccgaaaccctaaccctagaatcgtcgatcgcccgcgagagaggagggggagggggacgagggggaaccgcgcgtgatggggaagaagaagaagcgcgtggagaaggtgttctgctactactgcgaccgcgagttcgacgacgagaagatcctcgtgcagcaccagaaggccaagcacttcaagtgccacgtctgccacaagaagctctccaccgccggcggcatggccatccacgtcctccaggtccacaaggagtccgtcaccaaggttcccaatgcaaagcctgagagggaatcaacagagattgagatctttgggatgcaagggattcctccagatgtattggccgcccactatggagaagaggaagacccttcatcgaaggtagccaaagtggaagtgccatcgctaaggcctcctgttatgcccaatccagcgggcatggtatatcctccacgaccggcctatggtgtagctccacctatgtataaccctgcactgaatccattgatggccagacctccaatctggcctgctccacctccgcaaccttggtttacacaaccagtagtttcggttcctcaaatggcttctgggcttgcaccacaacagccactatttccaattcaaaacatgcctgctcctatgacatcagcacctgcaaatttacttcagacttcgttccctatggcccatgttggagtaccttcacctgttacccctcaggtgtcacaacctctctttcctgtcagtacatctgctggaaacggtgcagtaagttctccatatgtagcatctgttgcacctggaagcatcccaacaagctctccatcagttgctcctgcaggagtaggatatgcagctactaaccaaggtacaggaggtccagcggctgtacctccacccgcttctaataataaagcaccagccacccaacctggtgcaaatgaagtctatctggtgtgggatgatgaagcaatgtcaatggaggaaagaagattgtcgctacccaagtatcaggtgcatgatgaaactagccaggtaagttctgatttttataattttatatctgtaatattaatgatatgtgaaaaaaaccaagttgaagttcatggggatgctctgaactggaatattgtgtaagtgttcattctagggtatagagtaaagtaaaaattttaggcacttatgaattgcatgatacgccttgtgttctaaaattgggtttccatccctttagtttgtgcgtcagaaatttcattttgtttctgttacaattggtcctgtattaccttagtattgcattcaataacatttgaagaccattcactgtgctttgattgcttgtgcataaagagtaaatacagcatatcagcttgcttttgcaccagcatgatgtgtcaagttcatgtcgacacatgtagagaaatttgacacgctgcaatttgtaacctcagtatttggtattataagtaattcttctgagcccattagcgtgatatgggagttaagacgattctctaccttcaaccatctttctctaaataaatcatattgagagtttatatccagtccttcgctatttccctatgttttctggcatctcttgtctagtgatgacaaatccatcatatgctttccaccttcaaaatctgtactttgcgtgctgctgatcaactaaaaaaggaatcttgcgcatctttgatacttcactatgttattctcattaggtagaaggcacaaatccagtcgtgtatgtgctgaatgttagggatacttcactaagaacatacttaattgtgaactttgataagtgggatgttaagtttgtcaattttaggcttttcctgaacattagatatcaagttatctaatgtgtgtgggaataggaaatattttccactggtagttgcacactgagatgtttcctattatattctaccttgcattttcatggcatatccttggtgatttcttgctgatgtcgtgcacgtcaggagttccaagtaggtatttacattgttctacctgctagtaagttttttacaatctgacaaatctcatggtgctaattgacttgagggttatcggccaaggcctggacagttcacaaatatgtatgtagttgatttcaattgagcatcattattttattgattacgattcaccacatgcaaatatgggtttgtaacaagaactaggtggctgagcttctgccaataccgtaacatttattgtaacttaattttggtcgagattgtgccaagaatttggttccaggtcagctttcattttggcccgtgagcctggtacttatgttcaaagagaagagattaactgcttttttttttttgttcttaatcatgccaatcatatctaacaccgtctctcttctcccacaatgtgtgaacagatgaactcagttgatgcagcaattgatcgaagaatatcagaaagtcggcttgctggacgcatggccctgtaaaacaaattgaacacatgtctcgtaaattgcccctatgcaattcactgacatattcgcctatctgggcgagcataggagtagcgcctacagtcggtgattccccgattcctgttctccatttgtttagctagtgactggaggtactgtgtgcagtcaaaggaatatgttgttctgacttggaaagctttgaatgtatctttccacccgagtgaagatgttagtctagaacccattttcccattgtcgcctgaagaaaatgtgatttgttgtcaactctggaaatctcatcatgaattagcagaatcagtttcagaggcatgatgtgtattcattaatttgatggcacatgagcgcctactaataataatttattggtattgatgcc

SEQ ID NO: 17563 - DNA, 2575 bp, Oryza sativa
  ref <308>: DATABASE ACCESSION NUMBER: AK067998
  ref <309>: DATABASE ENTRY DATE: 2001-12-06
ggcttcaaaaccctagccgactcaatcccggccacactcccacccccacgcctccctcgccgccgccgccgccgccgccgccgccgcctctctccccgcaatctcctcgccgccgccaccgcagtcaacgacgccggccgtcgctgtctttctcgcgcgcgcgtggaggattcgaggttttatgtaggcgaagatggcgctagaaatctccatggaaggcatcgaagcgcgggcgcgggagcttggggtcgacctctccaccgtcgatctcgactccgtcaccctccccgccggcgaggacttcggcatcctcagtgacgatgaggatttacttcggattgatgaccctatggagcttgaaatggggtttgctaacgttgttgtcgtggacaacctgcccgttgttccaccagagaagtttgagaagttggagaacgtcatacgcaagatctacagtcaaattggtgcgatcaaagaaggtggtctttggatgcctgtaaacccagagacaaagaagacatacggttactgcttcatcgagtataataccccacaggaagctgagcttgctagggaaaagacaaatgggtacaagctcgacaagtctcacatctttgcagttaacatgtttgatgactttgacaagtacatgaaagttccagacgaatggatgcctgctgaaattaagccatacactcctggagagaacttgcaaaaatggctggctgatgagaaggcccgggaccaatttgttatccgtgctggtactttcactgaagtttactggaatgatgcaaggcagaagatgcctgaacttgtgttccaaaagcagtactggacagacagttttattcagtggtcccctcttggaacatacttggcaacagtgcataggcagggctcccaggtgtggggtggcgacgataagtttgagcgtctaatgcgatttgctcatgcacaggtgaaactgattgacttctcccctggtgagaaatatttggtcacatatagtagccacgagcccagcaaccctagagacactcatagggttgttcttaatatctttgatgtgaggactggcaaagtgatgcgcgactttaaaggaagtgctgatgaattcagtgccagtggaaatatcagtgtttctggtgtttcatggcctattttcagatggggtggtggaaaagacgataaatattttgcaaggcttgggaagaatgttatatctgtctatgagactgaaacattctcccttcttgataagaaatctctgaaggttgagaatgttgtcgacttctgctggtctccaactgatccaatcatagccctttttgtccctgagttgggtggaggaaaccagcctgcaagggtgagccttgtgcaaattcctggcaaagaggagctgcggcagaaaaaccttttcagtgtcagtgattgcaagatgtactggcagaacagtggagaatatcttgctgtccaggttgatagatacacaaaaaccaagaagagtacttacactggatttgagctttttagaattaaggaaagggacatacccattgaggttcttgaattggacaacaagaacgataagatcattgcctttgcatgggagcccaaaggtcaccgctttgctgttattcatggtgatggccctaagcctgatataagcttctactccatgaaaacatccaacaacatcagtcgtgtgtccaagctcaccactctcaagggcaagcaggctaatgcattgttctggtctcctggtggaagattcattgttttcgctggtctgaagggctttaatgggcagctggagttttacaatgttgatgagcttgagacgatggcaacgggtgaacatttcatggctactgacattatgtgggatcctactggaagatatcttgcatctgcagttacctcagtccatgaaatggagaatggtttccaaatatggtctttcagtggcaagcaactttacaaggtgtcaaaggaccacttctttcagttcctgtggcgtccgagaccaccgtcgctgctgacccctgaaaaggaagacgagattgcgaagaacctgaggaagtacagcaagaagtacgagcaagaggatcaggatgccttcaaccagctgagcgagcaggaacgcaagaggcggaagcagcttcaggaggaatgggaaggatgggttgccaagtggaagcagctgcacgaggaagagagaccatacaggatggagctcagagacggggaggccagtgacgatgaggaagagtacgacaccaaggaagttgagattgaagaggaggtagacgtccaagaagaagttccattcgagctggatcaggagtgaaaagcttatgctagcatctgctgagatctttttctgttgttgcctgtcttaagttaatttctgccccctttgcataataggctttagagatcaagaacacaatttcttgatctttctggtttctactggttgattgtacactttgtccttggattttacggaccaatgtattcgaagatgaaaatttgcggttggcatactaattttaatgtgtcgttctcc

SEQ ID NO: 17564 - DNA, 3725 bp, Oryza sativa
  ref <308>: DATABASE ACCESSION NUMBER: AK067999
  ref <309>: DATABASE ENTRY DATE: 2001-12-06
gatccatttttattccctttccgatccaaaagcttccttcccttccgccaccacaccatgccacccgccggagacgccgcccacgcgccgccgccgccgcaccgccgcctcgtcttcgccttctacctcaccggccacggcttcggccacgccacccgcgccatcgaggtggtgcggcacctgatcgcggcggggcacgaggtgcacgtggccacggcggtgccggagttcgtcttcaccgccgagctgccgcgctccccgtcctcccagggcctcctccacatccgcagggccatcctcgactgcggcgccgtccagaccgacgccctcaccgtcgaccccctcgcctccctcctcaagtatcatgagacggccgtggtgccccgcgagtcgattttgaggaccgaggcggagtggctcacctccatcaacgcagacctagtgatctcggatgttgttcctgtggcctgcagggtggctgcagatgttggtatcccctcggtctgcattgggaattttagttgggactacatatatgcagaatatattgtggcatctggcgatcatcaccgttctattgtttggcagatagcggaggattattctcattgtgatatcttacttcgactacctggatactgccctagtatgttcatttgtgtttttcctattctttctttaaaatgttcgtatttcgaacggacaaaattgtcagtatttcatttctcagttttaatttttttaaaaaatgagttttccttaaatccatagtgccggctttccgtgatgtcactgatgtgcctcttgtggtaagagggctacgcaaatctagatcagaggtgaggaaggaacttggaatagcagaaaatgcgaaggtggtggtttttaattttgggggacaggatggaacctgaagcaagaatggctgcctgatggctggatctgtttggtctgcggtgcatctgattctcaagaggttcctccaaacttcattaagcttgcaaaagatgcttacacacctgatgctatggcagcatctgactgcatgcttgggaaaattggatatggaactgcaagtgaggctttggcctacaagctgccatttatctttgtccgcagagattattttaatgaagagccatttttgcggaatttacttgagagcagtattgaaatgaccagaagggacttccttcatgggcactggaaaccttatctactccgtgctctcacacttcaaccatgctatgatggtccaacaaatggtggtgaggtggctgcacgaatcctcgaggacactgctgttgggaagaagtgtatttctgacaaattcaatggagcaagacgattgcaagacgccatagtgttagggtatcaattacaaagggctccagggagagatgtagcgattcctgactggtattctctttccgagacagaagttggtgcctgtccaatctcagaaaatattaaaacaaaagaaagcaccgaatcatgttttgaagactttgagatacttcatggggatctgcaaggattaccagacaccatgtcctttttgaagagcttatctgaatttaatcaaagtgagttaaagagtaatgggaagcaacctcaagagagaattgctgcatctgtgctctttgactgggaggaggaaatgtatatagcaagggcacctggtcgtttagatgtcatgggtggcattggtgactattcaggaagtctagtcttgcaggtatgctcaattgcaggtgaaaaatcatatttctgtacttgatctttaagttaggcgattttattctcccttgacccccccccccccgacttttaaataattaataattgggatgtataagtcccattttttgtgattctccttgtttgatccaaaagcattgcttggcactggtggatggtgtattagcaaatgaaccatctaatggcatcacaacaatacatcttctgttttagtcagttgtaattaaaagttttggtgcaattactagctgccccttcgggaagcctgtcatgttgctgtacagaggaaccacccaagcaatcagaagctatgggaaaatacacaggcaagacggcttgagaacggaggcatggaacctgtggtacaaatagtatcatttgggtctgaattgagtaaccgttcaccaacttttgatatgaaattgtcagatttaatggatgtcgacaaaccaatatcctacgagaaagccagagaatttttttgtcgcaacccatcccagaaatgggctgcttatgtcgctggaacaattctagtgttgatgactgagctagatgtgaagttcactgacagcatgagcattctggtttcgtctgatgtgccagaaggcaaaggtgtttcttcttctgcatcagtggaggttgcaactatggctgctattgcagctgcctatggtctaaacattgctccaagggacctcgctttgctttgtcagaaggttgagaatcatgttgtcggagctccatgtggagtaatggaccaaatgacatctgcttgtggagaagctaacaaactccttgcgatggtttgccagcctgcagaagtgaaggaattggttgccattcctaatcatatgcggttttggggtctggactcagggatacggcatagtgttggtgggggagattacggatctgtaagggtaggcacttacatgggacgaaaaatgatcaagtgtgcagcatccgacttagcttcagaatcctcagtttctgatgctcctgttcaatctaatgactataaacaaaatgccatagaactactgaaatccgaagcttccctggagtatttgtgcaacataccacctcacagatatgaagctatttatgcaaaagatattccagaggtcattactggagatgcatttttgaagaaatatggagatcacgatgatacagtaacagcaattgaccctaaaagatcttacaatgtgaaggctcctactaggcatcccatatatgagaactttcgagttgagaccttcaaagcactcttagaagcagctaataccgatgagcaattgtcagcccttggagaacttatgtaccagtgccactacagctataatgcatgtggtcttggttctgatgggactgatctgctagttaatctggtacaagaaatgcagcacagaaatatgtcaaaaggtgaaagtcctagtctatttggtgctaagattaccggaggaggttccggaggctcagtttgcgtcatggggaaaaactgcctcaaaagcagtgaggagatcatcgagattcagcaaaggtacaaggcagcaactggctacctaccaatcctattcgatggatcatccccaggcgctgccaaattcggctacctgaagatccgacgacgcccctcgtcaccaattgctgccaaatgaagagattggctttcagtttgtcgtgcaactcggtctgtcaatgagtttcatcaagaccgttgattgaaaacattgtgccatcctgtcaactgcaattgttcgttcattgattaattgctccattctggggcacagtcgttgcaattgtagatttcgtgtgacagccaattcgttgggttgctttcgtgtggaactgtgaaaatgtgaaatactggattcttctgaaaggttagtggtttggtactttggtttgtgggttagaacccaattggatccatgccaatgcaattattttgccgtatt

SEQ ID NO: 17565 - DNA, 1466 bp, Oryza sativa
  ref <308>: DATABASE ACCESSION NUMBER: AK068000
  ref <309>: DATABASE ENTRY DATE: 2001-12-06
gagtccgcgcgctccggcattcggcaattccttccttccaatccccaatccttcccctctcttctccgctccggcgatgcaggagccgcagcggattcaccgcgacgccggcggctatcccgctgccgccgccgagaccgaccccctcctcgcgcacccgccgccgccgcgctcgccggcggagatagaggacgaggagatagaggacgaggagatcgaggccgcctccgccgcctgctgccgcatctgcctcgagtccgagaccgagcccggtgatgagctgatttctccttgtatgtgcaaagggacgcagcagttcgtgcatcgctactgccttgatcattggaggtctgttaaggaaggaactgccttttctcactgcacaacatgtaaggcacaattccatctccgtgtcgaatgtctggaggacaacctgtgtcgcaagatgatgtttcgattgtttgttgctagggatgttttccttgtattcctggctgtacagactgtcattgctgctatcggtggtatggcttatctgttggataaagatggacaatttagaaacagtttttctgatggttgggaacacatcctatcaaatcatcctgtgcccttttactactgtgtcggagtagtggtgttctttgtaatggtaggattcattggactgatagtacagtgttcgtctttcaacaccaatgatccatgcctggctggatgccgcaattgttgctatgggtggggcatactggattttcccgcttcaatagaagcttgccttgctctggctgtgatatttgtcattgtttttgctatacttggagttgcatatggcttcttcgctgcaaccgtagccgtccagaggatcttgcagagacactatcacatacttaccaaaagggagctcacaaaggaatatgtggtggaggaccttcgcgggtgttatacaccaccaaagatggatccagagcaagagcagcgtctgaggactttgcagctcatgtagcttccactttctgcgaataggatgcaacaaacctcttgatgcgtgccgaggattgccatgctacataggatctgttgatacaaacattttccagtaatcatagtcgagactcgagaaccccagattagtatatacaattgctgcatggtcgaagatatgtttaggcacatcaatcctcgaaggaggcgaccctcgctgcagtatcaataggcatacaagcaaaccatacgttaccatgggatatgtttatagatgcgagcaagccatgcttggcaaaagtttatgcgtgtacttgtgcggttgcagcaatctacagctggactgtacttattagttgcatcgtacatgtatgctgagtgatatttttgcttgtgttgatgtgttaaagtattaagtgattttgcccacagaatggtggcattctaattctctatagacatggattgtgcagttgttccct

SEQ ID NO: 17566 - DNA, 2281 bp, Oryza sativa
  ref <308>: DATABASE ACCESSION NUMBER: AK068001
  ref <309>: DATABASE ENTRY DATE: 2001-12-06
gactccactctccaacttctcacgcagcatcgccgccgtcgtcgtcgccgccgccgccgcgaggtgagggctcgtagcaccgtccgggagggcggaggaggaggagagatgagctgctgcgccgcctcgtcttcctctccggttctcgccaacccccgggggggattcgctgctagctgctcaacaagaaggaaccacagggtgatcttcctcggttcaaggcagttttctccgatcatatacagcccagcacgccgcgcgtcgtcacggctgtctcggagagaggtgatagcttttgcaggccagcaatcttgggatatcggcagatttgtcaggacgctgtatttcttcaacgggccaccgaatcctctcaagattgtagagtccattcttagcagtttcacaggctctgctcctggtgaggtgccaaagaaaatggaatcttctgatgtggtgctggtcactggagctaccggtggcgttggacgaagagtggttgatatcctgcggaataagggaatacccgttcgagtattggctagaaatgaagagaaggcgaggagcatgctggggcccgatgtagacttgatcataggagatgtcacaaaggaaaattcacttgatcccaagtacttcaaagggattaagaaagtggtaaatgcagtgtcagttatagttgggccaaaggaaggcgatacaccagacaggcagaagtataaacagggcatcaagttttttgaacctgagatcaagggaccttcacctgaaatggtagaataccttggaatgcaaaacttgattaatgctgtcaagaacagtgtgggtctgactgaagggaaactgctttttgggggcacaggcaacttatccggaaagattgtttggggagcacttgatgatgttgtgatgggaggtgttagtgaaagcacattccaaatccaaccaacaggaagtgaaactgatggaccaaccggattgttcaaaggtactgtctctacttcaaataacggtggcttcactagtataaggacaaagaattttacagtgcctgaggatctgtcagcatatgacggtattgaactacgtgttaagggtgacgggaggcggtataaacttattgtgcgcactagctttgaatgggatactgtcggctacattgcaagctttgacacgactaagggggaatggcaaagtgttaaattacctttctcttcactgaatcctgtattccgtgcccgcactatgcctgatgctgcaccctttgatgcaagcaatgttacttccttacagctcatgtttagcaagtttgagtatgacggaaagctgaacccaacatttacagaaggttcatttgagctccccttttcaagtattagagcatacataaacgagccaatcactccaaggtttgtccatgttagttctgcaggagttacaagacctgagagaccaggcctggatttaagtaaacaacctcctgctgttcgcatgaacaaagagctgggctccattctaacttacaagttgaagggtgaggatttaatccgggaaagtggcattccatatactattgtgcggccatgtgctctaacagaggaaccagctggagctgacctcatatttgaccagggagataatatcacaggaaagatatcaagggaagaaattgctttcatttgtgttgcagctctggcaagtccaaatgcagtagagaaaacctttgaggtcaagagcactgttccattcagtgaacctttcgtggttgatccttcaaatcctcctccagagaaagactatgatgtgtatttcaaagagctcaaagctggcataacaggtaaagaggcactagaaggaacacctgctcaggtctgaagaacatgttaaatgcagaacgcccaactgctttgacaaatcttgacatgtcatgtggtttccaaaataccaaatgggaagtactttgtgaagtatgtgaaggaacagttgtttcttttttttatgtaaagtagtatatcctctggagtttgtgttatatttaatctgctgtatctgtatgagaagatatgcatacatcttcagaagacatatggatgtcgatcaagagctcaaaggttatggagcattggagctctttctgtagcagattctgtatattatgttgcttttattttcactgaattgtgtgctgtagatagcgtcattggaatctagatcgaccattttgtaaaatcaaatacattgtcatacagagagaagagaagtttacagttccagtttttttttc

SEQ ID NO: 17567 - DNA, 1589 bp, Oryza sativa
  ref <308>: DATABASE ACCESSION NUMBER: AK068002
  ref <309>: DATABASE ENTRY DATE: 2001-12-06
ggcgttaacccctcgtggcctcagctcgtcgatcgatcgatctcttagtccgatctacttgcgcgcggctagctgctgctgctgctgcgtgttgggggtggtggtgcgaggagtgattggttggttgatagattgatcgatcgagcgatggccgtggcggtggaggagatcgtcaggagggccggcgggtgcgccgtgatcgacggcggattcgccacgcagctggaggcgctcggcgccgacatcaacgacccgctctggagcgccgcctgcctcatcaccaagccgcacctcatcaaggaggttcacatgcaatatcttgaagcaggtgccgatgtcatcatttcctcatcataccaggcaactatcccaggattcttagccagaggaatgcttcttgaggaggcagaagggttactgcgaaggagcattgaattggcactggaagcacgagatgaattctggaagtcgacgctgaggaagtccaagcctgtttacaaccgtgctctggtcgccgcatccattgggagctatggagcttaccttgccgatggctcagagtacagtggatcgtatggagaagacatcacggcagagaaactgaaggacttccacaggcgccggctgcaggttcttgcgagcgctggccctgacttgatcgcgtttgaggccatcccgaacaaaatggaggcacaggctttagttgagcttctggaggaagagaacatccaggtcccctcctggatctgcttcagctcagtggacggcaagaacctgtgctcaggagagagctttgcagagtgcctccaattcctcaacgccagcgacaaggtgaccatcgtgggtgtcaactgcacgccgcctcagttcatcgagggcatcatacgcgagctcaagaagcaaaccaagaaggcgatcgcggtgtacccgaacagcggcgagatttgggacggcagagcgaagagatggctggtgagcacgacctgttacacttaatctgttctcatcactggcacgccaagaaagattagcacagatctgttctcatcactggcacgccaagaaagattagcacatttccgtgcgaattcttggtcgtcttgatcatcaaactgactggtttttttgatgcgtcgcatgcacagccggcacagtgctttgggcacaagagcttcgacgcgctcgcgaagaggtggcaggaggccggcgcgagcttagtcggcggatgctgccggacgacgccgtcgacgatccgggccgtctccaaggtcctcaagggcaagacgtcctattcagcaactcagatttgagaccgactacttggtagtgcaacttttaattaatagcgagaattataccgattcagtattagtttatgctaaattttgcagcggaaattaccgtctaacgatttgtaatgctgatgtgcaaccatcgaattttatacgagcattagcatggagagtgttgcagaggcctggggatgtgatttatcttctttatccttgtaatataaggaaagtagcagccatgtatcgaatttatgagttatctatatatccaaattgcactgataatgcaaaagaacg

SEQ ID NO: 17568 - DNA, 1781 bp, Oryza sativa
  ref <308>: DATABASE ACCESSION NUMBER: AK068003
  ref <309>: DATABASE ENTRY DATE: 2001-12-06
gactcactcaacccaagcaacgcgcagcacaccatcaccagccaagtgttcgacagagttcttggcgagctagaggtgtcgaacaccttcaagagaggagggatggggaaggcggcggcgatggaggtgtcggcgtcggcggcggcggaggcggggatgatggtgggtcatggggagtggcgcgacgacgacgggcgggcgcggcggatggggacggtgtggacggcgagcgcgcacatcatcacggcggtgatcggctccggcgtgctgtcgctggcgtgggcgatcgcgcagctcggctgggtggccggccccgccgtcatgctgctcttcgccttcgtcatctactacacctccacgctgctcgccgagtgctaccgctccggcgacccgtgcaccggcaagcgcaactacacctacatggacgccgtccgcgccaacctcggcggctccaaggtccgcctctgcggcgtcatccagtacgccaacctcttcggtgtcgccatcggctacaccatcgccgcctccatcagcatgctggcgatcaagagggcggattgcttccacgagaaggggcacaagaacccgtgcaggagctcgagcaacccgtacatgatcctgttcggcgtcgtgcagatcgtgttctcacagatcccggatttcgatcagatatggtggctgtccatcgtcgccgccatcatgtccttcacctattcgacgattggcctctcgctcggcatcgcgcagaccgtcgccaacggcgggttcatgggcagcctcaccggcattagcgtcggcaccggcgtcacctccatgcagaaggtctggcgcagcctccaggccttcggtgacatcgcgttcgcctactcctactccatcatcctcatcgagatccaggacacgatcaaggcgccgccgccatcggaggcgaaggtgatgaagcgcgcgacgatggtgagcgtggcgacgacgacggtgttctacatgctgtgcgggtgcatggggtacgcggcgttcggggacaagtcgccggacaacctgctcaccgggttcggcttctacgagccgttctggctgctcgacgtcgccaacgctgccatcgtcgtgcacctcgtcggcgcctaccaggtgttcgtccagccgatcttcgcgttcgtcgagcggtgggcggcggcgaggtggccggacggcggcttcatctcccgggagctccgcgtgggccccttctcgctcagcgtgttccgcctgacatggcgcacggcgttcgtctgcgccaccaccgtcgtgtccatgctcctcccgttcttcggcgacgtggtggggctcctcggcgccgtctcgttctggccgctcaccgtctacttccccgtcgagatgtacatcgcgcagcgcggcgtgcggcgagggagcgcgcggtggctctgcctcaaggtcctcagcgccgcctgcctcgtcgtctccgtcgccgccgccgccggctccatcgccgacgtggtcgacgcgctcaaggtgtaccggccgttcagcgggtagagagaatgtgagatcgatcggtgaccgtccgatcgaagtagtactagcactagcaaacatgtgtacgtcgtatgggcagcagagcaacactgccgttgccaggtggggcccaggtgtgagataaaaaagaacgaggtaaacaaaaaattatttactgagctttgtgtggtgttttgtcatgtaacaccttgtagattcttgtattatgagtttgattgggataacaaggctttaatggttagtgaagc

SEQ ID NO: 17569 - DNA, 2183 bp, Oryza sativa
  ref <308>: DATABASE ACCESSION NUMBER: AK068004
  ref <309>: DATABASE ENTRY DATE: 2001-12-06
gcttcctgggctcctcttcgtcttgctgctgcagctttccttcttctccaccccctcggatctccaggagtcgatcgattctcttctccttctcccccaactctccaccttccacacccttcggcgacacgccgacgcagacagccaccgcacgcggcggcgacgacagcaacaccggccaccatgggcgcgtccacctccaccagcaacccgtcactggaggcgcaggagcaggagaccctcgcgtcggcctccctcgccctcccgcttctccgcgccgccttctcccgctcgaacggttcgctggcggaggcgctgtccccgccgcccgccgccttccgatccgactcgccgccggtgcccccgcgcttccacgacctcgtcgcccgcctcggccccgccatcgcctctctcttcttctccgacgtcggccccgcgggggacgcggccggctggctcgggttcctcaggggattcaaccgctgctgcgcgcgcgttccggcgtcgcagtcgctggcgctgctcctccgcgtgtacgccgcggcctgcgccgacgcgggtgctccctgcggccttcagttccacccggacgaggacggcgccggtggcgaggggaaggtcgtgggggagctggcgccgggggagatcgccgtgttgctctggatgtgctgggtcatggcgtggagcggttcggctcccggggtttcgggtggtcaggagggaggcggcaagggggaacccgtgttgctcccggacgtgacgcacctggtgctgtcggcgctcgtgtcggcgggcgccgtcgcggatgacgctggtgtttggggatgggaggtttcccgtggtgggaagggggtgaaggtccaggagttcacgtcttgggtgctgtccacggctgctgggcttggcaactgcctctcgcggtatgtgcaggaaaggttccggtcgtgcgcagctgatccagtagaggaacgttctgtttcaactggtaacacgtcatcttgtaaccctgacgtatatttgttaacacgtgggagggcatgggcaatctctctcagcctcagaaacacattgagtgaaaagtttttatcagcatctgtcattggaatggatacagaagaccttctttataggtcgtcagttcatggaaaagggctgagccggttttggtcttgtgttgagggatataaaggaccagtgctaattttactctcagctttctctcgtagtggtggtgacaatgttgatactgatcaaagatggggcattggtatattaaccgaggagggtttacagaacaaagacaccttctatggtagctctgcttccctgtgctccacatatccaatattccgcatgctcccaccatctggtaaggagaagaatttcatatattgccacctacatcctcagataagggtgtacgaggcaaagccaaagcctgttggtttaggatttggtggaacgattggaaatgagagaatctttttagatgaggacttctctaaacttacagttcgccatcatgctgttgataagacttaccaacatggctccctcattcccaaccagggttatttacctgttgaggcttcagtacttgatgttgaagtatggggccttggtggagaagcaacgagacggcaacaggatatgtacaagaagagggaggatattttctcagagcagcgaagaaaagttgatctcaaaacatttggcaattgggaggactctccagagaaaatgatgatggacatgatttctgatccaaatgcagttcgacgggaggaccgttgaatacaattttggactatatgtttattatagctcattatctaaaaaatgtttattatagctgccttagtgccagtacatatctggacatgggaaatggacgatcttgaggtttcatctttcttgtaccttggagatatatagaggagtaggtgcacatatttgctccatttgatgtttgggccatttgactgggcaacacgtcatgtaagtattgaattgaaaagagtcttgtatacagaatatcggtctacaacggcatagagcttcctttctcatgctccccttgttttatgggaatcgatagcaaacaaatttgtatctgtattgtaaattgtagattattcccgtgtccagactatcacacagacatggtaatttccgattatccc

SEQ ID NO: 17570 - DNA, 1843 bp, Oryza sativa
  ref <308>: DATABASE ACCESSION NUMBER: AK068005
  ref <309>: DATABASE ENTRY DATE: 2001-12-06
ggggacactgttcgaattgcttgggaactcttccatggaatctggatggataccttattgagtagtaaatttcttaatacagctcgctatccagatagtgctagctgtgattgtttggtgatcaatctattgggattgtgccgactggagctgttcgacattgctttggtcttttgttgatttgcctggagttcggcagtatacagcaaccctggagtgcatgcagtggtttcctcattttttaggacctgactgcattctgtagtgagaactatcctgctaaatgcataatacttgcaggtgttttctgttgtattggcaacgtgatagtttttgtggtgcaaaacattcaagatgggcgccatggacgtacaacttgagtctactgctgttcaacgtggacaagctaagataaatgtggaggaacatgctctagtttctctgttgtctgatgagaagtacgcaactgaaaagaccgaagatgtggaccctgatgattatgagaaacttgaggaagggataatgcagtatgggtgtgcacattatcgaagaaggtgccgcattcgagctccatgttgcaacgagatttttgattgtcggcattgccacaatgaaacaaagaattcaattaaaattgatgctgtgaagaggcatgaactcccacgccatgaagtgcagcaggttatatgctcgttgtgtggcacggaacaagaggtacggcaagtatgtatcagttgtggtgtatgcatggggaagtacttctgtgaagtgtgcaagctctttgatgatgatgtttcaaaacagcaatatcattgcaatggttgtggaatatgcagaattggtggcaaggagaatttctttcactgctcaaaatgcggatgctgttattctatagtattgaagaacagtcatgcatgtgttgaaggagcgatgcatcatgactgtccaatctgctttgagtacctttttgaatcaaccaatgatgtttccgtcttgccctgtggtcataccattcatgtcaagtgcttgcgagaaatggaggagcactgccaatttgcttgcccgctttgctctaaatctgtctgcgacatgtcgaaggcatgggagagattggacgaggaactagcaacgatatctgacacctgtgacaataaaatggtgcgcatattgtgcaacgattgtggggcaacatcagaggtgcagttccatttgattgcgcacaagtgccagaagtgcaagtcctacaacacccgccagatctgaagtggcgaagttttgatgtgattcattttgtatgggaagagagccctgggggatgctcattttgcaacacaaatcccgctaacgcctctgggaatctgatgagctctcggtcgttttcttgctcattggatgcctcagccgaggcaaatcactcgcatctgaaattcatctatgaagtggatgctgttccctcctgtgttcaatttattacctcaccatgtcgcagactcagagtcctgttcagcttaagtttctactagcactagccgagataataagtgcacgtctactcaagcttctgggcataaatggtggctagcttgtgtgttatggtgtgtacttgttgagtctcgggcaaacactgtaacggttagtggcatagtattacttcttgctcgtgtgcgtgtgtagtaggatggcggattgcaggacgtgggtgttatttactggtaggaactgtggtacttgcagtagccaccatttctcatgttcaatgccggtcccatatgccggtcttgttcagttcctataccttgctcggttgagaaaaatggcaaatctacctcagttcattttgttc

SEQ ID NO: 17571 - DNA, 2303 bp, Oryza sativa
  ref <308>: DATABASE ACCESSION NUMBER: AK068006
  ref <309>: DATABASE ENTRY DATE: 2001-12-06
gacttttctcagcacgtagtggtcggccgagagcctcgtcgaagagggcgctgccgccatcccgttcccggcgaccgccgccgccgcaggccagtagtcgttgagcagcatcttgatgccgtccaccagttgcattgcacccacgagcggcgcctgctgctgcacggctatcagctcggcgtcgctgaacaccttgcggcaagcggccgttgacctcgacgccgccaccgccgccgccgccgccgcacgtgctctctctgcagtctgcgctgcgtcagctctcgccgcgcgtcggctctccggcatcgaccctgccaaatccttccttctgctcgctccccaagccttaggctgaaatctgctataactttggaggtactaaaacgagtctgagatgggtgtgattagtacggtgcttggtttctctgggtttggctttggattctccgctggtattgtcatcggatactacttcttcatctacttccagccaactgatgtcaaggacgtcaaagttcgcccacttgtcgaatatgactcaatatcgttggacggtatccttcctgaaattcctttgtgggtcaagaatcctgactatgatagaattgattggctgaatagatttttggagatgatgtggccttacctcaacaaggcgatctgcagaactgcactggatattgcaaagccaatcattgaagagaacaggaagacgtataaactagaatctattgagtttgaatcacttacattgggtagcttaccacccacctttcaaggaatgaaagtgtatgtcacagaagaacaagaattgataatggaaccatctcttaagtgggctgcaaatcccaatgtcactgttgttgtaaaggcttatgggttgaaagcaactgtccagattgtggatctgcaagtctttgcttcacctcgtattactctgaagccattggtccctacatttccttgcttcgcaaaaatccttgtttctctcatggagaagccacacgttgacttcgggctgaaacttttcggagcagatttaatggctatccctggtctttacagatttgttcaggagaccataaaaaagcaagttgcgagcatgtatttgtggccaaagacattggaagttcccataatggatccctcaaaagcttctaagaagcctgttggaattctacttgtgaaagttttaagagctcaaaacctgcgaaagaaggatctgttgggtaaatcggacccatatgtgaaacttaagatgtcagatgacaagcttccgtccaagaaaacaacagtgaagcgtagcaatctcaatccagagtggaatgaggatttcaaatttgttgtgacagaccctgaaactcaggcactggaaattaatgtctttgattgggaacaggttggcaagcatgagaaaatgggcatgaacaacattctgttgaaagaacttcccgcagatgagactaaagtcatgactgttaacttgcttaagacgatggatcctaatgatgtacaaaatgagaagtcccgtggtcagcttactctggaggtgacatataagcctttcaaggaagaggatatggagaaagaaggcatcgataatgctgatgtggtggagaaagctcctgatggtactccagctggtggaggactgctttatgttgttgttcatgaagctcaagatcttgaaggaaagcatcacacaaacccatatgcaaagataattttcaaaggagaagagaagaaaacaaaggtaatcaagaaaaacagggatccacggtgggaggacgaattcgagtttgtatgcgaggaaccccctgtaaatgataaactgcatattgaagttctaagtaaagcttcaaagaaaggattgatacacggcaaggaaaccttaggctacattgatataagcctcgcagatgtgatcagcaacaagcggatcaatgagaagtaccacctcattgattccaaaaatggtcagattcagatagagatgcagtgtagaacttcatagcaaccgtgatgaagtaggtgaaatgcttgaacttcgtgagatacaggatgatacatatgaatgttgttgctacaaacagagtttggccaatacctgtgattgagttctgtagatatttacttctttgtgtccaggcatctgttttaccttgttgagatattttgttattttttcaaaattgtgttgagaacaacgtagaagcaaccatgctattggcatcggaagtggaattagatgtgagatgtaatgacccattatccttcaatgcagataaacatagaattctggc

SEQ ID NO: 17572 - DNA, 1477 bp, Oryza sativa
  ref <308>: DATABASE ACCESSION NUMBER: AK068007
  ref <309>: DATABASE ENTRY DATE: 2001-12-06
tattcgcattcgcatctcccccgcttcctctcctccgccgccccaaaaccctagcggcgagcgagcgagcgagccatccatcacccatggcccgcaagcgccgcgcgccgacgcccccgcccccgccgccgccgcctcccgaggccgagtcctccgcggattcaagcggcgaggaggaggaggaggaggaggaggaggaggaggagagggagtctcccgtcgccccaccgccccagaagcccagcggccgcggcgccgcctcgtcggatgaggaggaggaggagggggaggactccgacactgacacctacgcccaaggtttccagcttcggaaggttggcggcggcgacgaggaaggggaggaggtggaaggcgactcgtcggagtcggagccggagccggagcccgtcaagaaggagtcggcgaagaaggccaaagccgaggccaagaagaagagggccgcgcctgagcccgcgccgtcgggcaaggccaagaaggccaagccggagaagtcgtcgtcggcggcggcgcctgagcccgctccctcctcgggcaagtccaagaaggcagccaaggctgaggctgcgaaagcggctgccgctgagccggctccttctaccggcaaggtgagcaagtgttctcttcagcacactcccactgtgggagtcccacaaaaccccccctcctctcctcctctggctccctctgccacccagccaccacaggatggcatcctcctcctcacctccactcctcctcctcgtctccctcctcgccgccgtcgccgccgccttcctcgcggcgcaagctctcgcccaacaccaaccccaaggaaatgatacggcggcggcgggggaggggtggaggccgaggctgaggaagacgtacgtggagggcggcgccgccgggatggtgccgcggcggcggaggctggtggggaggttccagatatgcgcggtgtgcacctgctgcgggggcccgcacggggtgtgcatcccggcgccctgctgctacgccatcaactgcaacatcccgaaccgccccttcggcgtctgctccttcaccccgcgaacctgcaactgcctcaactgccacctctagcagatatgcagcacagcacatcagccaagaaaatcaggcaagaaaccccaagtaaaagaaaaaaaacagtaatgcttaatgctgcttttaatctctttgttttttttttctctttttgatttttctttggttggtgccaaatcgagaaatgctaagaagaaatttgtttgggattggaagaacacttggatcatatagttagtagttgtagtgagtggaaatattggtagctatgagtagctttgtgatggatggatggatggatgttttttggttagtttttttttccccattttggggggtgactggttaatgtggtgcctattgaattgtggatataattaattagtatcttggtatatttgaaacaaaatcg

SEQ ID NO: 17573 - DNA, 1424 bp, Oryza sativa
  ref <308>: DATABASE ACCESSION NUMBER: AK099033
  ref <309>: DATABASE ENTRY DATE: 2002-08-28
gaggccacccccgttctcctccccgccgccgccaccggcgcctcccgctcgtccccggccggcgagtcgcgtaggagggaagcgccaccggcggcggccgcggcgagatgagcggcggcagcggcggcggcgccgcgagcgcggtgttctacgcggagaagtaccacccgatccaggcgggcagcatcgacggcaccgacgtcgccccccacgacaacgccgtcctccgcgccctcctctgctccaccgccggcctctatgatccgttcggggaccccaaggccaccggcgacccctactgcacggtgttcgtcgggagactctcccgctacaccgacgacgagacactccggaaggagatgagcagatatgggagggtgaagagcatgcggctggtgcgggatattgttactggtgcttctcgtggctacgcatttgttgagtatgaaactgacagggagatgcgccgtgcctatgaggatgcacaccattccattattgatggcagtgaagtgcttgtagattactacaggcaacaacttatgcctggatggataccgaggagatcaggaggagggcttggagggaagaaagaatctggccagcttcgatttggaggtcgagagaggccatttcgtgctcccttgaggccaattccgtatgatgaactgaaaaggcttgggatcccaccaccacctgaagggcgatacatgacacgttatcaggttcccccaccaccaagacgaaaaagcagtgatatctacagggaagagtcacctcccaagagaagatccaaagacagggttgatagcagtcactacagaagatattgtagcccaacccaagacgacgacagcacggtcagcacccataggcggaaaggtagccatgaccggcgagaagaaaccgagaggaggacaagagcatatatcagcagagaggccggcagctacagtaagcggagcccaaccgaagacgatggtgatcgtcgtaagaggagaagaagccgagagcctggagaattatctccatacaaggaggatgatgataacagcaaaagaggaagaagttcagtggagccaggcttcagcccttatcagtctcatcaccacaggcatcacagggagcgtcatgacagcagcagccattctcgccacggtgaacgtcggcatcaagacgaccgtggaaaccactccaggaacaggagatcagagagccgggactacagccactagaggtgtcgagtccatggtgggttcctagtgttttaacctgaatccctggctgcctgttcgctgcttcaactaatgtatatgatctagttttctcaggcgtccttgccttgggttgcctgtgtagtgagggctactaaacctgaagtttcgactttggaatacatgaattaatagaattcatgatttagt

SEQ ID NO: 17574 - DNA, 1175 bp, Oryza sativa
  ref <308>: DATABASE ACCESSION NUMBER: AK068008
  ref <309>: DATABASE ENTRY DATE: 2001-12-06
gtccgatttgcctcagcctctgtccgtctcgcgcgccggctgccgctgcacttgcccatggccatggcgccgccgtctcctccctgcctcctccgcgccctcctccctgtcgcctcctcctcttctcgggggctccgccgccggcctactacctccttgctccgctgctcctcgccgtcggcggatgcggcgtcgccgtcgggggagggtggccgcgagtacgagccctccttcgccgacgacttcctcctcgccttcttccgtgccaagatggtggaggaggttggatgggattctgaaaagcctggctacaatggactgattgaagttgccaaccgcctcatgatcaaggggaagagtgcgttggagacagagcaatcagctgtccgagtactccgatcactgtttccccctctcttgcttgttctcttcaaagctcttttagcaccaattgctaatggtcaattggcttccatgatggttgctagagcaacagcactttcatgccaatggctgatggggccatgtttgttaaattccataacattatccaatggaaaatcattatcaagcggggtatttgttgagaagtgcaaatatttggaagagagcaaatgccttggtgtttgtatcaacacatgcaaactgccaactcagacattcttcaaggatcacatgggtgttgatttgtatatggaaccaaactttgaagactatagctgccagttcaactttggggtgtcacctccacctcttgacaccgacaaagccctaaaggagccctgcttggacatatgcacgaacgcgagaagacggaaagagctcggaactggtagtagcacagatggtttgcaatgcccccaagtttgatgagacgcttttgaaagtttggacagcataactgaagatgggaatgagatcctctgcagtactgcgactgacatgtgggccacacttaccaagagcccagatgtcagtgacttctactgcaggagaatactgcagagtctctgaagatgcctgggcatacagccattgtgcccctttttcagttactgccactagacttaactgctatagtctgatatcaatactaacactgttgtctcaaacaacaacttatatttttgggatgtaacacaattctacttggaaatcaatttggagagatgctc

SEQ ID NO: 17575 - DNA, 1112 bp, Oryza sativa
  ref <308>: DATABASE ACCESSION NUMBER: AK068009
  ref <309>: DATABASE ENTRY DATE: 2001-12-06
ggccccactgcaggctgcagctcacacccaaacgcctcacgccccgccgccatgcgcatcttcgtgctctccggccagagcaacatggccggccgcggcggcgtccaccaccggcgctgggacggcgtcgtgccgccggagtgcgcgccgtgcccctccgtcctccgcctcaccgccgcgctcgactgggtggaggcgcgggagccgctccacgccgacatcgacacggccaagacctgcggcgtcggccccgggatggccttcgcccgcgccgtcctcccgcgcctggacccgcccggctccggcgtcggcctcgtcccctgcgccgtcggcggcaccgccatccgggagtgggcccgcggggagcgcctctacgaccagatggtgcgccgcgcgcgcgccgcggcggagtgcggggagatcgaggccgtgcagtggtaccagggggagagcgacgccgagtccgacgccgccacggccgcgtacgccgggaacctggagacgctcatcgccaatgtcagggaggatcttgggatgcctcaactgccattcatccaggttgctcttgcatctgggaataaaaagaacattgaaaaagtgaggaaagctcagcttggtatcaacctgcccaatgttgtaactgtggacgcatttggactgtcattaaatgaagatcatctgcatcttaccactgaatcacaagtaaagcttggtgaaatgctcgcacaagtctacatgagcaattttttgccagcaacatgctaggaggagtcctgtcaggtgaaataatctgtttaactctggaagtttggcacctaaatatctttctctttaaactgttattataattcttcattttctcgttggttgaaactatctagaggtgaaccaaccaattcatcttgcatttcttgcacagtagcattgatcctttcatttagcaggacatcaacttactggtcaattatgtgttgtatctaaatttaacaattcgagagcaaaacatcacccaagaggaagtaattttctccttttcaacataagttggccatgtaagatagaattcaactccagtgccttttgtgttcctccaatatataagtttcttcttt

SEQ ID NO: 17576 - DNA, 2701 bp, Oryza sativa
  ref <308>: DATABASE ACCESSION NUMBER: AK068010
  ref <309>: DATABASE ENTRY DATE: 2001-12-06
gacccaactcaaagttcacacttcacacaccacccagccaaacaaagcagaatttccatcatgtgcactctgggcaagcagaggggcagagcatggtagggactaggacttgcgaagttgggattgtaagattaccagagttggagcattggagggcagcgagggcctgatgtctgtcaacaaaacggtgaaactgaccatgcccgttctattggcattgttgctgttgtcctatggaactggaagcattcgttgcacgacgatcgctgggaacagcacggacgtgctctcgttgctcgatttcaaagccaccaccaacgatccaagaggagccttgagctcctggaacaccagcatccactactgttggtggagcggcgtcaagtgtaagccgaatacccgagggcgagtcacggctctgaaactcgcgggacaaggtttatcaggccaaatcacctcctttcttgggaacttaacggaccttcacacacttgacttgtccagcaataatttctctggccaaataccccctttaaccaatcttcagaagttgaaataccttcgtttgggccagaattctttggatggtataattccagattcactcacaaattgctccaatctattttatttagacctctctaataacatgctagagggcacaatccccccgaaaataggtttcttaaataatctctctgtattggccttccctttgaattttctcaccgggaacatcccctcaacccttggcaatcttacaaacttgaatataatgctcctcgcaaataataagattgacggaaacattcctcaagaactggggcaactgtcaaacttggggtggttgtccctaagtgaaaacaacctatcaggtggttttccgcagggattcttcaaaaatctatcttctcttcaaatattaagcattcagacgaccttgcttggtggcacattgccatttgacattggcaatacactccctaatctcacaaaacttttcttggctgataacatgtttgaaggtcatatcccagcttctttaggcaatgcatcattgctacgagggatagatctatccttaaataattctactggccatattcccaactcttttggacggctttcaggtttgtctacattaaaccttgagacaaacaagcttgaagctagggacaaccaaggttgggaattcttagaagcgctcagaggctgcaacaatttaaatgtgctctcactagctgacaacctgttatttggggacgtaccaaattcaattggtggcctatccatcaacctgacaattttattgttgggcggaaacaacctaacagggatagttcctctaagcattgggaaccttcaaggcttaatttcattggggctagataataatggtttcagtggtacgattgagtggattggaaaactgaaaaacttgcaatctttatgccttcgaaataacaatttcactgggcctattccatactccattggcaagcttacacagctgacagagctctatctgcgaaacaatgcatttgaaggtcacataccgccctccttgggaaaccctcaactactgttaaagctggatcttagctacaacaaacttcaaggtaccatacctctagagattagtaaccttagacaactcatctacctacaacttgcatcaaacaagcttaatggggaaatacctgatgcattggggatgtgccaaaacttagtaaccatccaaatggaccaaaactttctcagaggagacatgccaatttcttttggcaatctaaatagcctaaccatactaaatatatctcataacaacttatcaggcaccatcccagtagcactaggctatctacccctactaagcaagctggacctttcttacaacaacctccaaggagaagtaccaacagtgggagtattcagaaatgtgacatctgcttatctcgatggcaattcaagactttgtggaggagtgacagatctccatatgctctcatgccctcaagtttctaatagaataaaaagggattctgatataacaaagagggactacaatctggtcagattattagtaccgatatttggctttgtgtcactcacagtgctgatataccttacatgcctagcaaagaggacatcaagaagaacagacctattgttgctttcttttggaaagcagttccctagggtttcttacaaggatctagcccaagctacagggaaattctcagagtcaaacttaattggaagaggaagttacagttcagtatatagagcgaagttagctccgactaaactacaagttgctcttaaggtttttgaccttgaagtgagatgtgcagataaaagtttcttatcagaatgtgaggtcttgagaagcattcgacatagaaaccttcttcctgtcctaactgcatgttcaacgatagacaatagtggcaatgctttcaaagctctgatttatgaatacatgcctaatgggaatttgaatatgtggttgcataaacaatttgcaagtgttgcttcaaaatgtttgagtttagctcaaagagtgaatatagctgtggacattgctaatgcattgtcctatttacaccacgaatgtgaaaggtctattgtccattgtgatttgaagccaactaatattcttcttgatgatgatatgaatgcatatttgggagacttcggc

SEQ ID NO: 17577 - DNA, 1172 bp, Oryza sativa
  ref <308>: DATABASE ACCESSION NUMBER: AK068011
  ref <309>: DATABASE ENTRY DATE: 2001-12-06
gacttttaccttgaagcctgtgaatctggaagcatctttgagggtctattgccaaatggcatcaatgtttatgccaccactgcatcaaacgctgatgagagcagctggggaacatactgccctggggagtacccgagcccacctccggagtacgacacatgcctaggggacttgtacagcgttgcttggatggaagacagcgatgtccacaacctgagaactgaatcactcaagcagcagtacaatctcgtcaaggaaaggacatctgtgcagcacacatattactctgggtcacatgtgatggaatacggttctttagagctgaatgcccatcatgtgttcatgtacatgggttccaatccggctaacgacaatgctacatttgtggaagataactcgttgccatcgttctcaagggctgttaatcagcgggatgctgacctggtttacttctggcagaagtaccgcaaattgcctgagagttctcctgagaaaaacgaagctcggaagcaattgcttgaaatgatggcacacagatctcatgttgacaacagtgttgagctgatcggaaaccttctctttggctctgaggaaggcccaagggttctaaaggctgttcgtgcaactggcgaacctcttgttgatgactggagttgtctcaagtctatggtacgcactttcgaagcacaatgcggctcgctagcgcagtatggaatgaagcatatgcgttcctttgcaaacatctgcaatgctggcatctctgctgaagcgatggcaaaggttgctgcgcaggcttgcaccagcattccctccaacccctggagttccacccataggggttttagtgcttaaatcataggtgaagaaaacttagcaaatattctcagctcctgcaatatacccaagttatctttttctcttgcccctgtagtttgatgatcgattgggggcagtagtgcttgaaccgtaggtgaagtctgaagaactgtgcattatttcagatgctccaccatcccaaatcatctaaattgttctcgttctctggtgtacataccatagcaggaaaattgatatggcaatattacctgccatcattgctgtacatacttatagcttgctatatgtagtttgtagctacatatataatatgataaatgcattgctgctatttt

SEQ ID NO: 17578 - DNA, 878 bp, Oryza sativa
  ref <308>: DATABASE ACCESSION NUMBER: AK068012
  ref <309>: DATABASE ENTRY DATE: 2001-12-06
tcagctcttcttccagccctagcccccctcccccccgcgccgccaccacctcgctctccgccgccgccgccgccgtctccaacttcaagatggtgctctcgaacgacatcgacctgcttaacccgccggcggagctggagaagctcaagcacaagaagaagcgcctcgtccagtcccccaactccttcttcatggatgtcaagtgccagggctgcttcaacataacgactgtattcagccactcccagaccgtggttgtgtgcccgggctgccagaccgtgctctgccagcctactggtgggaaggccaggctcacggagggctgctccttccgccggaagagcgactaggttaggctgtgtggcttgttgttactgggacagaaatgccctgctgaacaatactatcccgttacccttcctgatgtgtactccataaattttgttaattatgcctacctgtttactgccctgcatgatgtagcaatgcgttatgtatcttgcattttgtgctggagaaagctacttcgtataatgcgtgcccctccaccttgttcaattctctctgtatcaaagattttggtttttggttttagccttgcgttgctcatgagactaatttgcttagctgcaaaatattttgttacagtgccaagtacctggatatattgtcatgcatttccttcttagaatgacatcaagggcacaaagtttcatgttacacttgtatgatatacaggtgacatgttgtacagataggtttgtttatcttataccatgtagttagtgattgggttctgtgtacaggtaacagtctgtaacttatcacctttaatttcgtcaatacaaatgctacgtggtggggctgattggtgttgc

SEQ ID NO: 17579 - DNA, 1356 bp, Oryza sativa
  ref <308>: DATABASE ACCESSION NUMBER: AK068013
  ref <309>: DATABASE ENTRY DATE: 2001-12-06
gggagaatccctctcctcccgtcccgccgccgccgccgacgacgacgacgacgtccagccctcctccgtaatcccccacttgttgggcctgcaccttgtggtagccactctttaatcaatggagagcacagagcccctacaggatatcatgtgcgagtttcgtgcgggtaagatgtcccttgatggaacacgagtgatcccagacacacgcaagggtcttgttcgcataggaaggggtgaagaaggcttggttcattttcaatggcttgatcgtggacagaatctagttgaagttgatcaaattgtcttccctgaggaggctgtctttgagaaggtaacacaatcttctggaagggtttacatcttgaagttcaggcacgatagcaggaaattcttcttctggatgcaggagccaagtgctgatgacgactcacaaatatgtcgccaagttaatgcctacataaaccgaccattagatggtgaggcagtttctattgaagctgaaatgtcacatgaagacacagctgatgatgacatctcctccagagctgggaatttagttgatcagagcatgactgctgatttagctggtgaggtgacatctgctgctgggccagtacggttggaagacctgcagagaatactgagtgctatacagccatcagatgctgtggcagaccctgatgctggattaggattaggagacatcttgaagcctgatttggtgttaccactcatggaaactttgcccattgaacagttggcatcatatcttccagagggcccatggactgctggtgatattcttgaactattgcaaagtcctcctttgcggcagcaagtagaagcgtttacccatgtgctgcggactgggcaaatagatctagcacaatttggagttgaccctagtaaatataaattcacagtagcttcgttcctggaggctcttgaagactccgtggcaaaagcttcaggagctggagacaaggattcagagtcccagagaggcggtggaaatgatcccatggatgagagttaatgtcaaaatggtttggtttgaaaacttgatgaaacacaaagcgggactggacttatgttggcacgcacaggcctatttctagtcatttgatctgattatagatgcttgataggtggcatagacattttgaagctggctttattctgcactgcctgtgctgttatgtgtatacagggaggatacggtggtctagcctattttgcactggtgtatgctcagtagagtattaaaggtactggaccattgttaagtgtacttgggcgtcgtcgtcatataatggatggatggatcggctgatcgatcagctgggttgggcg

SEQ ID NO: 17580 - DNA, 2337 bp, Oryza sativa
  ref <308>: DATABASE ACCESSION NUMBER: AK068014
  ref <309>: DATABASE ENTRY DATE: 2001-12-06
ggaaaagcacaaggaagaggccatgaggagcggcggcggcggcggccgagcaactcgcggttagcagggaacggcgcctcagtgcaccgcgccgccgcggaactcttgcgatgctccacctccacggcaggacggcttctccgactcggctcctcctcttgccccttctctcgccgcttccctcacgcccaaccctaacccggccctggcacccttgccgccagcacctctcttgctgccactggtgccgcatccggggaagcaagtgcagcaggagaatgctgaggaaggagaagaaccgaggccaacgccgacagccatggaaaagaaggtggtagagccttcagagaagaagacatttgtggatttgaaatcaatgtggggtagagctgaaaagaaactaaagcctatagttgacagcaataatatttctgagcattcagttgtgaggaaagacactgaacctactacacatgcacctgcaactgagaagattgggtgtagtagagcatgtgaagttggatttgcaggaacagaaactcatgtgccctatgaaagtatagaagtatcaagacctcaagatatagatggcaacatagaaatatccaaacctcatgttgcaatttcagaatctaaagaggaagattggctagaagatgttgatgaggatgttggttttctaccacatgatcctggaaagaggattgccatctcagattatagtgtgaatcagcaagatgcagtgaggatgaagtatattgcacttgggccttgtcgaccaccactagagcaatttcctcaaagaaattgtggaggtaaacgtcgtttcataagtagctggtttgataagtatagttggcttgaatatagcgaggaaaaggatgttgcattctgttttgtttgctacttgttcaaagatagaactaattatgttggtggggatagttatgtgaatgagggctttagacaatgaaaccatttggatagatttgataagcatgttggttctgttagtagtgcacataatctagctcaagagaaatataatatgtcgatcattagacctaatacaacaattggtgagaatttaaggaagagaagcaaacatgacaaggttgtttataaggcccgcttaacttactcacttaagtgcttgagatttcttttacggcaagggttggcttgtcgtgggcataatgaaagtgaagaatcactcaatagaggaaattttcttgagcttctaaattggttggctagaaatttcaaagaggtcaacgaggttgttctaaagaatgctccaaagaattgtaaaatgacatcccctaagatacaaaaataacttattggatgttgtgctagagaaactactaaacttctcatggaagatcttggggatgagttttttttaattcttgctgatgagtctagcgatgtgtatcaaaatgagcagttggcactttgcttgtgttatattgacaagaaagggagggttgttgagcgctttcctggtgttgtgcatgttgagaatactacagccttgatacgtagagatgcaacaatcatttagcttgtctaaagttcatggtcaaggatatgatggggctagtaacatgaagggtgaggttaatggtctaaagaagctgattatgaatgaatctccttctgcttattatgttcattgttttgcacatcaactatagttaactcttgtggctgttgctagggagaatggtgactgtgtttggttttttgagcaacttggatatttgttgattactattgggatttcttgtaagaaacatgaaatgcttcgagttgctcaagctcaagagattgtagaagctttggaatttggtgaaattgaaagtgggcagggtctgaatcaagagatgggtttaggtaggccaggagatacacattggagatctcactataaaacagtgcaacatattcttattttgtatcgctcaatccggaaggtcctattacaagttggaaaagatgacttaaacataactttgcaaaggagggagcaagatattgtgaatgcggttgagctcattattttgacaaagatgcaattggagatgttgcggcaagacgatgggtgggagaatttttaaaaagaagtcacctctttttgtatgaagaacgaagtcaaagttcctcatatggatgctagatacaagcagtggcggacccagcataaaaatttagctatggcggatcatcacaccagaacgaatattttaaaaataaagtagcattttattatacacaaactataatatgttcgcacttattagaatatatgctattaacgatgattataatccc

SEQ ID NO: 17581 - DNA, 2070 bp, Oryza sativa
  ref <308>: DATABASE ACCESSION NUMBER: AK068015
  ref <309>: DATABASE ENTRY DATE: 2001-12-06
ggttcctccgctcgttgcgccaagacgagtcgcggctgaacaggggaggggaggtgacgagcagagcagagcaggggaggggaggggatcctggctgactattcaatatccatggcgcggtgcatctccttcctgtctacctcctcgtccttgccatgtgccacaaaaccgccctgctgctcagtgtcctctgtcttaccctcgtctccgtcctctcatcaatgccgaggtaggaaaacgagttgcgggtcaattagggcgctgcgggaggattggagggagagatccaaggccatccctcctggtggcgtctacccagccaaggaccactgcagccaatgtgggctttgtgacacctactacattgcgcatgtcaagaatgcctgcgcattcctaggagatggcatgtcccgtgtcgaggatttggagccattggtccatgggaggggcaggaagcaagacatggatgagatgtacttcggagtgtatgagcaactcctatatgccaggaagatgaaacctgttgaaggagcccaatggacaggaatagtgacaacgattgcggttgagatgctaaaggcaaatatggttgatgctgtggtttgtgtacaaagtgacccagatgacaggcttgctccaatgcctgttttagccaggacgccagatgaagttattgcagccaaaggtgtgaagccaacattatcacctaatctcaatacgcttgcgttggttgaggcagctggtgtgaagcgtcttctcttctgtggtgtgggttgtcaagtgcaagctttgagatcagttgagaagtatcttggtttggaaaagctttatgtgctcgggacaaactgtgtggacaatggtacccgtgaaggacttgacaagtttttgaaggctgcaagcagtgaaccagagactgtactgcattatgaatttatgcaggactacaaggttcacttaaagcacttggatggacatattgaagaggttccctatttttgcctgccagcaaaggaccttgttgatgttattgccccatcatgctacagctgctttgactacacaaatggcttggctgtaaggtttccatcgttttaaagttgaatatttgtactcttgctatagcagatattcatattttggaaaggaaccatctggtatctggctgtattattccttctgctcattgtcacttcctagtacttagttgtgctcgtagggttggtgtttattttcgttggtctgatcaaatctgaatggccattatatgtcccttctatacagttgcccttccattctcggtttgctcccagagataattaatatacgtttgataaagaagtgcaggatttagtggtgggctatatgggtgtaccaaagtaccctggagtttccatgacacagcaccctcaatacattacagtcaggaatgatcgtggaagggagatgctcagcctagtagagggcctcctggagagtacacctacagttagcagtggcgtcaggcaaccatttgttatcgagacggttaaagctgatgatgaagcaaaacaggggagaggaccttctcagccagctccgacatttgtcggcaatgttatagccttcctactgaatctgattgggccgaaggggctagagtttgctcgctactctctggattatcacacgataaggaattacctccatgtgaatcgggcatggggcaagcaaagagcggagcagcacattccttcctatgccaagaagattgtggaggcgtacgacaaggacggacgcatcgagtcgatgctccagtagcatgggacgctagtctgcattctagattattattatttttcctcatatcgacttgttcattctagtcagtatatcccgtagttatgtacattcctgagcacacagccagggtttaggggaatttcctctttactaattttttacatgtcttatctgactgtcttcctgggagaatctcccgataaaacagtcgggggctaggggaactatacatattacgtgtacattgatcaaatatgaaatttcttgtatagaattggaaaatggtaagtg

SEQ ID NO: 17582 - DNA, 789 bp, Oryza sativa
  ref <308>: DATABASE ACCESSION NUMBER: AK068016
  ref <309>: DATABASE ENTRY DATE: 2001-12-06
gctcgatctctgcctcctccccccaccgccggagaaggtcgccgccggcgagcgagcgcgcccgccggagttgtagccgcctctctcccccccgcggcagcctgacgccttcacgcagcgtgatctccttccccccctaccgctggcggggatccgtgctctgtcggtcggttcagttggtggactggtgaactgaaacttattgcttggtgctagtgtgatggcgtacgagattagcgagatcaaaaaattggcataggcctggtgggctttggcatcctattctcattctttggcgttatccttttctttgataggggcttgttggcgttgggtaatattttcttcttgactggaatcggcttgttgcttggttggcaatctatgtggcagcttttcacaaagaaggcaaacattaagggatctgttcctttcttccttggtctgtttcttctctttgtccgatggcctgttgctggcataataatggagctatatggatcttttgttctcttcagtggttatggacctcctatccaggccttcctataccagattccagtcattggatggattctgcaatacccattccagctgtttggtcagttcaggcgtaaacgtgcatgacaactcacggcagaaattacccttcgtacgggagcatattttgtgatgttaatacggaaacctgctgtgtaccatctgccacgatgcagtttaattcttgtgtgcatattcatactttcgcctttctaatctggagtttatctggcttttgctcattttgct

SEQ ID NO: 17583 - DNA, 1485 bp, Oryza sativa
  ref <308>: DATABASE ACCESSION NUMBER: AK068017
  ref <309>: DATABASE ENTRY DATE: 2001-12-06
ggcctccctcccctctcctccctcctccttccaaatctgcagctcaagctggtgttggtggtgttggtggtggtaggcggcggcgtcgccttctcctcctcttcttgctgaccccgcctgactggcttccttccccttccacacctgccggatcgggtggctgggttggttgagggtccaagaaagaaagattttgggggttcgggggtgaacccccctccccatgccccaagtgaggaaccagaatctgggcatggtggctgacacggagagctcggggtcactgggtggcagctcaaatgctgcttctgacaaggctgttgatgggtctcttgacaaaagatctcaggaaaaggctccaaagaaaactcataaagctgaacgagagaaacttaagcgtgaccagttgaatgacctttttgttgagctcagcagtatgcttgatcctgaacgacaaaatagtggaaaggctactgtgttaggtgatgctgcacgagttctgcgggatcttgtttctcaagtagaatctctcagaaaggaacagtccgctcttctaactgagcgtcaatacgttggttcagagaataatgagctgcaagaagagaatatcatgctcagagcccaaatattagaactgcataatgagatttgtgcaaggatgggaaacaaccgcctcaatcaaagcaatcttgcgatgtcacaaccagtagccaacaatggcagtaactcagcaactcaacccgttccacatcacatatggggcaatggtccgaatttagctatggtgcacccaacaaacacattatctccgttgcacaatcagcaccatcagtctgctggtgccagccaggtttatgcgtcacggcctcaggagctgcagctctttccagggacctcagtatcaacagagcgagaacgatcccgagctggaagtggaagcaccccggctacttcttcaggcctgacggattctttgccagggcagcttcgcctcagcctcccgcaatcttctcaagaagaaaacagcagcggcagcaagaaaggtcgaaaaaagggctagccggccagttgacacttgacagttgctaaaaaagaatcgataaatcgatacttggtgaatggtgatagttacacactcctgtaaatactgcgaagcgcttactgatacctactgtgatagttgccctctgttgtaatttgtatttgtagtgcttgctctgaaacttagatcacgtttgactatagttttccacttccagtccttttacggatatatgttgccatattacagagttgtttaccaggaagagagaaaaatgatgcaattcgatagcagtgttaactgatgataattatatgatccctgtcaccaagtcatgaaaatctgatcttgtatgttcatgggcagcttgtttcagcattacaagttgaagaaatatttgtaatctgttgcaaactgcatgtttatggctatgagaaatgatc

SEQ ID NO: 17584 - DNA, 1432 bp, Oryza sativa
  ref <308>: DATABASE ACCESSION NUMBER: AK068018
  ref <309>: DATABASE ENTRY DATE: 2001-12-06
gttttcctcctctctcttcccctccctcccttccctcttcgtccctcctcccctcccccccgccgcgatcgagacggcggcgaaaccaacaccggaatccgaggggggatccgccgcggcttcgctaccctagcccccgccccttctcgaatccgcgccctaaaatcccctttgcctccccaccccacccccgggcgcgccgccatccccccccgcccccgcgagcccctcccgatggatttggatctgtggatctctaaggtgaaggagggccagcacctcgccgagcacgagctccagtccctctgcgaatacgtgaaggagatcctcatcgaggagtccaacgtgcagccagtgaacagcccggtgaccgtgtgcggagacatccatgggcagttccatgacctgatgaagctcttcgcgactggggggcatgtgcccgagacgaattatattttcatgggtgattttgtagaccgcggcttcaacagtctggaggtcttcaccattctgttgctactaaaagcgaggtaccctgcacacataacgcttctgcgtggaaatcatgaaagcagacagttgacacaggtgtatggtttctacgatgagtgccaaaggaagtatgggaatgcgaatgcatggcggtattgcaccgatgtttttgactaccttactctttcagcaatcattaatggcacggttctttgtgttcatggtggactttctcctgatgtgcgcactgttgatcagattcggacgattgatcgcaattgtgaaattcctcatgaaggtcctttctgtgatctaatgtggagtgaccctgaagaaatagagacatgggctgttagccctcgtggagctggttggctttttggatcacgagtgacagctgagttcaaccatattaacaatctcgatctagtttgccgagctcaccagctggttcaggaaggcttaaagtacatgtttcaggacaaaggccttgtaactgtgtggtccgctcctaattattgctacagatgtggaaatgttgcttctatactaagcttcagtgagacaatggaaagagaggtcaaattcttcacagagacagaggagaataaccagatgcgaggaccgaggactgctgtcccatatttcctctgacttcatcaattgtacaattttagaagtcatgtttttatctgtaagggttaaagatgaagcagacctatttattgttgtaggtccaggtcatagtgcaatctaatgcgtatgatttttctgttcttttaaccacatgtacaatagaccatttggagtgtcatcactcctgtattccttctgtggcgttgtcaagttttgtttctgatttatttcgggtcgacacagtttgccacacaggaggtttgggccgttattgtgttatatttgcagctacagcttcccactc

SEQ ID NO: 17585 - DNA, 2041 bp, Oryza sativa
  ref <308>: DATABASE ACCESSION NUMBER: AK068019
  ref <309>: DATABASE ENTRY DATE: 2001-12-06
gaaagacgagacgacttttgttagtactgtttgcctcctcgtcctcctcctcttccctcctccatggtgccgcacccgcacagcaccacaccacctgcctagcgccaagctccaacagaagccgctagcttgaggcaagtccaaggaaggggggaagaggcaggaggatgggatcccccaagatggccaagagcgcgatgaagcagggcatctggcgccggaggatcggcgcgcccttcgccgccgtcctcgtcgccgctgtcctcgccgtagtcgtcttctccggccagttcgccaagggccccaacgcttcctcgcaatttgctccggtacaagttgacaacaccctgcggcccacgcgcgataagccggtctccgcagatcaagacttggagagaacggtttcttcaaagctagaaggggaggacactgagcaaattagacttgaggatggacagtctcccaacaaagaggcagcaatcgaagagcagaaaccatcccaggcggctgctattgatcaggatgacaataccttaaatcctgggcttaaacaagcttctggagatgaaaggagcgcaggaggatctgactcattgagcaaggaatctcctccacaaagtcaggaaggagacggaggcacagcagagtcaggtgcggaaccgtacatcaagtgtacggctcaatctgacataaagatctgtgacctctccaacccccggtttgacatctgtgagctgtgcggcgatgctcgcaccattggacagtcctccactgttgtgtatgtcccacagaaccgtgcttccaatggtgaagagtggattatccgagcacagtcccgaaagcaccttccctggatcaagaaggtgaccatcaaatctgtgaattcctcagaaccagaaccaatatgtatctccaagcatcacatcccagccattgtcttcgcactaggtgggctaacagcaaatgtctggcatgacttcagtgatgtccttgtcccactgttccttactgcccgtcaattcaacagagatgtccagcttatcatcaccaacaaccagccctggttcatcaagaagtattctgcaatctttagccgcctcacgcggcatgagattattgattttgattcagatggccagatcaggtgttacccacatgtcattgttggtctcaggagccaccgagaccttggcatcgacccaagttcttctccccagaactatacaatggtagacttccggttgtttgtccgggaagcctatggactgcctgcagctgaagtggacataccctataaggctgacaaagatgaccctgacaagaagccccggataatgctgattgacaggggcaaatccaggagatttgtcaacgtggcacatgttgtacaagggctggattggtttggttttgaggtggtcaaggccgatccaaagatcgattctaaccttgatgaatttgttcgccttgttgactcctgcgatgcaatcatgggcgtgcatggtgcgggcttgactaacatggtgttcctgcggtccgggggagtggtggtgcacattgtgccatacgggatcaaattcatggctgatgggttctatggtgcacctgcacgggacatgggtctgagacatgtcgagtacagcatcagtccagaagagagcacactgctggagaaatacggttggaaccatactgttatcaatgatcctgaaaccatcaggaagggcggatgggagaaggttgcggagttctacatgtccaaacaggacattgtgctcaatatgacaaggtttggacctagcctgttgaatgcaatagagttcattatgtaagtttgtgaaatgaggtttttgtgtttgttttagctacagcattctacagtcacgaaaaaaatacacttttttgttggccataggtggaataggtattgttgttttagtgctgcttctgtataggattgtcggtgttagatttgaataaccatgatcaactgttacaggaaagatgacaataaacctgtgtgctgagttttcttagagcc

SEQ ID NO: 17586 - DNA, 3783 bp, Oryza sativa
  ref <308>: DATABASE ACCESSION NUMBER: AK068020
  ref <309>: DATABASE ENTRY DATE: 2001-12-06
tttgggcattaaagctggaactgacaaggagatgggagggaccatcagcttccaggtcgctcatgtatagttttatctactcattcacaggaaaatgagccagtggtcagtggctctctgacctgtcaaactatggtagtagctagaatatgctaaaaggtactgtaactctatggtttggtgccaagtataaatgatacctgtttaaatgagaagagaggtaagcatcacttgcatacttgggccaggtggcattggagaccagtttaatcaaaacaatcggtcacagaactgataccaggtttgcgagctatcacaattcacgactgatcaatatgcactctttcactcatttcttcacaactgaccatctttttgtttattgctgatttaatgaagaagagccaaatgagttggaattgttctacaatggatgataacctgattgtcctgatataagcactgacgtaaattcccttaggttggttcgagcaggataatggggcatgggctcatggatgtcatggtctgtatcaagtccgaccggcttataggttgctagttgaaaaaggcaagagagaggtgataagcatcttgccacattggcacgtcccaagatggtgaagatccaatttataggcttttgtggaaatataaagttcagctgaaggtgtgagttttctagtggcatgtcagtaattgtagtgccggctcatgctgttatgcattggaggcatattggtcagattgcttttccggtgcagactgtaggcgggcatatgatactgtcctctcccgccgttaatttgtcaagaaagcaacatgcataagattgattatattggcaattactgccaacagggtgtgttgagataaatgttgatggtgctcaactgcgcattatgctgaccaatctcaaggtgtctccagtgtggtgatctaatcatctaaggaggcttttatcgcggtaatgtccaagtggccttgaaaattaagtggagttgataggaggcctaagtgtccatcaaacctgcaggctgcagcagcaccgctcctcttctctcgtgttgcttgcttcttctacggagggatcacactccagtttcaggctctacaggaccaaaactaaaacagcagttgcatagcctttttgtcctgttgagttgaggaagatgttgccccttgaacacaagctggatggatactgaattgttgtgcttgttgcttttaatcgtggaagctaggagcttcaagatttattgttcctcttgcttctgaccttgcaagctaggagcttgcactgcaggtgaattgcgagttatgggagtagttcttctgggtttctttggccaactgataagacgacgagctgcttgtctgcgctggaagcaagccggccgagcatcttaccgctgcagctagcaccttgacaatttctcagttctacagctttgtttatatatgttaatgcatgaaatacatgaggatgaacgcccagttgttgcaaggcctgtgttctgatggcatatggaagtatgttcttctatggtcattccaaggcaatagacatcatgggatattgacttggggcgatgtttatgtcgataaagtgatcacagaaatcaaaggagatctttatgatagccccattgatagcaagaaccagatagtaatgtctactttgtacaacaatgaccagtaccaaagctatccactgtgccccattgaggcagcattactgagcatgtccagccatacatactctctaggagaagagcttattggtaaagtagcgcttacgggacaacattgctggatttcttcctatgagttctcttcaacatttatgtataaggacatggtttcagcaacattatttttcacttcagtatcacgaggactggcaacttcagtttgcagccggtatcaagacaattctgtttgtaccagtggttcctcatggggttcttcaactgggctctttagatttggttccagaaagttcaacatcagtggcactcatcaaggatttgttctataagctttatgatgcctcaatatctggcagtccttcaggcacagggtttggttactcaaatactgggagacaacctgctgcaatgctaccaatggattctccagatgttgtgccccataatttttttcgttccataaagagttcagctcagctcttgaacaatgatcaccttagtctcctacatgcctttcctgtgttggagtttgcatcaacagaagatagcattgtaagcatttatgacactagtctaacagcttgcgcggttgaacccttggatggtaatgacagtgatatttggaccaatgttcatgaagagctatctcaatttactcgctgcaatacagcctctgaggcagataaggcaaacataagctatatggataagttgatcaattcagatagcaaaatgagctgcagatcagtaagtcatgcggaagatccaggatatggtaatatcgatcactttatcctgacagaaatggaacgtgaaaatcaagagcacattaacaactataccagtgtaaatgattatgctgtgacttcaaatccctcatttcattcagagctgcacaaaactcttgagccaatctccagggaggaacgtgaagactgcatgtggcatatcagatatagacagcaagaatctacaagctctgcgctccttcaagaaaatggaaataaagcaggattcgacaaacaatgtgaaaacaacgattatgcagagctgttactagatgctataaatgaccaggttatttgggcatcaaacagtgaatcttctcattcaactgattctccagtttcatgcgcaacacaaattcagaaagatgaccatgtaccgagactagatgaatcatcagttccgaatttcccaggtggtcaagacttttcacttatctcaatcgacgaaggcttcatgagttgtacaatgactggttcttcccttacagaaactaacaaggccatcttggttgaagaagatttcattagtgatccaattgaaggcatgcacagggaaacagtcgaaataaaggggagatgcagaaaaactgggctccatagaccaagaccaagagacagacaattgattcaggacaggatgatggagttgaggcagcttgttccaaatacatcaaagtgcagcattgattctctcttggacaaaaccatagcacacatgcagtttctccagtgtgtatcagagaaagccgataagcttgagaaaataataaacagcgagggatcgaccaagaggcaaccgggaagctgtcctctgaaagttgaagtgctcgatcagccgggtcatctcctcctgatcgagatggtgtgtgaggagtacggtgtgtttcttgagattgcgcatgtgatgaaggaccttgaggtgaccatactgaaagggttgctggagagccgttcagacaagctctgggctcgctttgtcatccaggcttcacaaggcttcgaccagatgcagattctatacccactgatgcacctgttgcagaagcagagatggagctgagctctaccatcatacatctaccatgggtctgcatgttgatcattgtgggcttgttcaataatagtatgttaggctccggtttgatagaataatctactgcatgcatactgctgtcgcctgctttcttgctagaatgtatgtaaccacaggacatgaatgtatgttataaacttgtaacaaaatacagatataggctatcaacaagcattgcaaattggcatcc

SEQ ID NO: 17587 - DNA, 927 bp, Oryza sativa
  ref <308>: DATABASE ACCESSION NUMBER: AK068021
  ref <309>: DATABASE ENTRY DATE: 2001-12-06
gaattcttacagctagttactactagcatatactttatatcctctttatctctaataagcttaatttgacacgtacgtacggcatgcatactccatcaatggatcagccggcggcgtcgaatggtgatgaggcgcctcgcatggagatgtgcccgtcgctgtatcgcgctgcacggagcgggcgagcggaggaggtcatggcgttgcttctgcagcaacggcccggcgatggtgcagcagcacatcgtcaagtcgctggcatcattcagcacagacagtgcaacgtactcgaggtgacggcggagaggaacaccattcttcatgtcgcagcggagaaagggcatggcgagctgatccaggagctctaccataggttcatcagggacaatagtctcctctctcgccggaactcggcgatggacacacctctgcactgcgcggcgagggcagggcacgccggcaccgtgacgatccttgtaaatctggcccaggactgcgaggagaatatcctgggatgccagaacgcggccggggacacggccctacacatggcagcgaggcacgggcatggcgccaccgtggaggctcttgtcgtggcacgtgcgaaggcgaccgtgttagttagcatgaaaggttcggatcatgtgatgacgacctgacagcttgcatgcatgtagttgttgaggttagtttggattaggttagtctatccatgcggatcaggttagcctttcctccacatgcgataacagatgtttgttagagtttgttttctgttttctgttactgcatgcagtcgtttcatcaatctcggcttcggttgttctcagctgcgccgaactctgtatcgccacgatgggggctgttcccatcacatatatattaacacgaaggcgacgcacaggattagtgcgatcgtttccaccc

SEQ ID NO: 17588 - DNA, 805 bp, Oryza sativa
  ref <308>: DATABASE ACCESSION NUMBER: AK068022
  ref <309>: DATABASE ENTRY DATE: 2001-12-06
gcctcttatccgcacaggagcctcggactcggacacgatgctggcgatgtccgtccaccccgccgccacgccggccctcgcctcgcgcgcccgcatctcccggcccaagctttccgccgcctccccctgcaccacctcctcctcctccactccacgcctcgtccacctcggcagcaggaggcttccccttcgctcgctccgtggcctcgccgccgccgccgcttctggcgccgtcgaagcggaggagggagaagaggagaagcaagtcggaggtggggatgcgagcgccggcgaggaagcgcaggagtacaaggttaaggtgcctgaaaggcaggatccaatgcttgttctgaagttcatatggatggagaagaacattggcatagccctcgaccagttggttcccggctatggcagcattccgttaagcccatactacttctggccacggaaagatgcctgggaggagctaagagcaaagctggaggagaaagagtggatctctcagaaacagatgatcatccttctgaatcaggccactgatatcatcaacctttggcaacagggtggtggcagcttgtcaacctaagaggatatctcaattctcccatccttgagaaccttgtttctttttttcttgctttggttacacggatctttgttgttacatgaccctgtagatcgattcaaactgttttcggatacggttttgtttatggaaatgaattgtgattgatctctgtaaggtaaacgatttgggctccatcatccgcagggaagattgctaatacctcttgatactact

SEQ ID NO: 17589 - DNA, 1453 bp, Oryza sativa
  ref <308>: DATABASE ACCESSION NUMBER: AK068023
  ref <309>: DATABASE ENTRY DATE: 2001-12-06
ggagagagagagagaaagaaaagtatgacaaggaaatgaaagaaatgagacaacaaccttgttagccttcctcttccatcctctcctctccacttcttgttctatcttcttcttggagagctagcaggaggagcaaagcagtaggggagagagaagagagagtgagccaggggggaagaaggaaggaagaagaagaacactgctgccaatccgaggaacaatccaacgggggcaacagaaaaggaaattttctgctcctgcggttgagttggtaaaatttgggaggtgatggcatcgaattcatcggctgcagctgcggcggcgttcttcgggattagcagggatggggaccagcatgaccagattaagccgctgatatcacaccaacagcaccagcaccagcagcagcagctggcagcgtcactgaccggcgtggcaacagcggcgcctactgcggcgtccagccaaggcgcaccgccggcggcgccaccggccaagaagaagagaaatctaccaggcaatccatccaaccaacccaagtacccttttacgatttcagccatgcatgcatacatatctgttctccgagatcttgtctcgattgattggagtcttatcatttgttttctgacagtgaaagcatcttatcgatctcacaggcgcgcttgatgattttctttttctctctctatctagtctctatacttaattgttgcatctgttctttggtttcttgcttccgaaatatcattcctcatcagtgctgaattgcctgtttcttttttatgtagactgaattttgtgaactggttctttgtctttttgtttttttacccagttcgtacttcgtcatctatcttttccttattccatttcttcagtctggaatctggatcccttccctaccatgcatctaggcgtctaccagttcaataaaagcgaatagacatgaacaacttggctttcatcagtttgctcctagtacttcatttaaagctctgtactgtcacctgaaagaaagagaattaattcaggtgaagaatacagaaagtactccgtctttcatggttaaactattcttttttttcccttgtcaaggagtatcgatctcttgcgttttagttagatcaatcagtagtcccagaattcccagttcttccatgagaagttttaagagcatgggcatagttccatatatttcgcaagataaaacaaaatcagttcatttttcaagattccatgcatgtacatgagctgttatcctcttcagtagtatagatcaatattcttttttcttcccccaattatgagaagcaaataggagccatggcacacaatccatgtctattcccttgttctctatatctcttcaagcaaagttcttttttcctaaaatctcatgcaaatattcccttctccatggtctagtttgtctctacctctcagccccacc

SEQ ID NO: 17590 - DNA, 1117 bp, Oryza sativa
  ref <308>: DATABASE ACCESSION NUMBER: AK068024
  ref <309>: DATABASE ENTRY DATE: 2001-12-06
gatgtactcctgtttcccccaattccttcccaccaccggccacctctagcgtatcgcctggtccttccatgccatgcctgctggtcccccaaccccccatctccaagctctttctctccctgctggctccccatcttcacctcgtggcggcatctggtcatgcacctcggccacagcgcagctcgagcagtcgacggggtggagtggcctcggcagcggcacggattggactcggcgacggtggtatacttccggtcagtctctcgtccggatctacttccgacaagcctctcgtccggatctagggccttgcagcggtaatcactggatctggggtctccgcggctggatgccctctcctgcttcgtcgttgcggtggcaatcaccagatctggggcctctgcgcctggattcggttgatgggagttttggagcgaggatggaggtgtgtttgagaataatcacccctcgtctgctgactcgtccccatcgcccgaccggtccacggggttccaggcaacatgcatcgcggcgtctcggcatggagggtgcacagtgttggggttcagctacggcagcttcgtggtgttcgttgcctgctgtggggtgctttgtgttgtggatagtgggcgtggaccagaagctgattatgtgttttcaccgcgcgaaattggatccaagagtggggatggtgatgcagatggcgtggtaccagcatcaagcatgtgtgatggagctgtgcatttatattgtgataggaactcagaaacttcaactaccaagacaggagatcaagatgtctagaatggcattgtgaatttgtgatcctcaatacaattgaagttgttcacggagctgctcttggcacgatggcttctttggtgatggagcagagctcttagaatgtcttttgatcacaccacaagaacgaattttatttgtggtaccagttttgtttgtatatataggaggataggatgtatgcagcgttcttgtggtgttcggatgtaaaattgggggttcttttggtgttcggagagcgatttgggtgggaatcggagtcggaaaaaaaattgctacggatgcgatctgagaaagagaaaaaaaccgtgcgggg

SEQ ID NO: 17591 - DNA, 3239 bp, Oryza sativa
  ref <308>: DATABASE ACCESSION NUMBER: AK068025
  ref <309>: DATABASE ENTRY DATE: 2001-12-06
gctcttttccgtgatcgcacctcgcccacgcgccccccgccacacacaatctctgcagctctccagcttcgttggaactcgcgaatctctctccgatcccaggtgaagcgcgagcttggcgttggaggggagatcgatcagggccaggatgccgtcggtttcgagggccgtgtgcgtgcagagggcgagcgggaataacggcaggaggtgcagagatggggcggccgccgccggccgccgatccgtcgtggcgcagagagcgcggcacggcaagccggaggtcgccatccgctcggggtccggcggctcggcgcggggcgggcattgctcgcctctcagggcagtggcggcgccgatcccgactaccaaaaagagggtgttccacttcggcaagggcaagagcgagggcaacaaggccatgaaggacctgctgggagggaagggggcgaacttggcggagatggcgagcatcgggctgtcggtgccgccggggttcacggtgtcgacggaggcgtgccagcagtaccaggcggcggggaagacgctgccggcggggctgtgggaggagatcgtcgaggggctccagtgggtggaggagtacatggcggcgcgcctcggcgaccccgcccgccctctcctcctctccgtccgctccggcgccgccgtgtcgatgccggggatgatggacacggtgctgaacctggggctgaacgacgaggtggcggcgggactggcggccaagagcggcgaccgcttcgcgtacgactcctaccgccgtttcctcgacatgttcggcaacgtggtcatggacattcctcatgcactgttcgaggagaagctcgaagccatgaaagcagtcaaggggctgcacaacgacactgacctgactgccactgacctcaaagaactagtggcacagtacaaggatgtctatgttgaagctaagggagagccatttccctctgatcccaagaagcaactgcagctggcagtgttggccgtgttcaactcatgggatagcccaagagcaatcaagtacagaagcataaacaagatcactgggctgaagggcactgctgtaaacgtgcagaccatggtgtttggaaacatggggaacacctctggcacgggtgtgctcttcactaggaacccaagcactggagagaagaagctttacggcgaattccttgtgaatgctcagggtgaagatgtggttgctggaatcagaactccagaggatcttgatgctatgagggaccacatgccggagccttatgaagagctcgttgagaactgcaaaattttggagagtcactataaagaaatgatggatattgaatttactgttcaggaaaataggctttggatgcttcagtgcagaacaggaaagcgcacaggaaaaggtgctgtaaagattgctgtagacatggttaacgagggccttgttgagcgccgcacagcacttaagatggtagaaccaggtcacctggatcagcttcttcatcctcagtttgagaacccatcagggtataaagacaaagttattgccacgggcttacctgcatcacctggggctgctgtgggccaaattgtattcactgccgaggatgctgaagcatggcatgcccaagggaaagatgttattctggtgaggacagagaccagcccagaggatgttggtggcatgcatgcagctgttggaattcttacagcaagaggtggtatgacctctcacgctgctgttgttgcgcgcggatggggcaaatgttgtgtgtcaggatgctcaagcgtccgtgtaaatgatgcgtccaagattgtagtgattgaagacaaggcgctgcatgaaggtgagtggctatcgttgaatggatcaactggtgaagtgatcattggcaagcagccactctgcccaccagcccttagtggtgatttggaaactttcatgtcttgggtggatgaagttaggaaactcaaggttatggcaaatgctgatacccccgaggatgcaacaacagccagacagaatggggcagaaggaattgggctatgccggactgaacatatgttcttcgcttcagacgagaggattaaggctgtcaggcagatgattatggcttcaagtcttgaactgaggcagaaagcactagatcgccttttgccttatcagaggtctgactttgaaggcatcttccgtgcaatggatgggcttccggtaactattagactcttggatcctccacttcatgagttccttccagaaggccatgttgaggatatggtgcgtgagctatgctctgaaactggagcagctcaggatgatgtccttgcaagagtagaaaaactttccgaagtaaatccaatgcttggtttccgtgggtgcaggcttggtatatcataccctgaattgactgaaatgcaagcccgtgccatctttgaagctgctataaccatgaccaaccagggtattcaagtctttccggagataatggttccccttgttggaactcctcaggaattggggcatcaagtggatgttatccgtcaaattgccaacaaggtgttcacagacatgggaaaaactattggctacaaagttggaactatgattgaaattcccagggcagctttagtggctgatgagatagcagagcaggctgagttcttctcctttggaacaaacgacctaacacagatgacatttggttacagtagggatgatgtggggaagttccttcccatctatctgtctcagggtatcctccagcatgacccctttgaggtgcttgatcagaggggagttggggagctggttaagctggctacagagagaggccgcaaagctaggcctaacttgaaggtgggcatctgtggtgaacatggtggagagcctctgtcagtcgctttctttgcgaaggctgggctggactatgtttcttgttcgcctttcagggtcccaattgctaggctagctgcagctcaggtgctcctctgatgatgacgcccttctctttaccggcaaccagatcgcctgctgttggtgcacctggtgaagaataataaatacatagccatggaatggtggaaactctgctgcctgtcaaaggcgccgttgtatgtagtatgcatgttcgcatgtaagcctatgtggtggtagttttctgaaaatttcgcttgaactgccatggtaatgtaccaaacagcgatgacgacgaagaatcgaataaaggtggtgattacct

SEQ ID NO: 17592 - DNA, 995 bp, Oryza sativa
  ref <308>: DATABASE ACCESSION NUMBER: AK099034
  ref <309>: DATABASE ENTRY DATE: 2002-08-28
gactgcgagtgaccggaggcagcgtctcctcctcctcctcctgcggctgcgtctacgagcgcgtccatggcgtccctctccccttccctccacctcccttgcaattcaaggactggctttgctggaaagacacaagggattcgtcttcgtgttatccctgctggcagagttggttttgtcagaacaacagtggagtgcaaagaatctagaataggaaagaagccgatcgaagtgccatcaaatgtgaccctcacgttagaggagcagtttattaaggctaagggtccattaggagaattatcactaaactatccaggtgaagtaaaagtggtgaaagaagaatctggtaagctgagagtttccaagactgtggagaccaaaagggcaaaccagatgcatggccttttcaggaccctgactgacaacatcatcgtaggtgtgtcaaaggggtttgataagaagcttcagctagttggggttggataccgtgcagcggtggagggtaaagatcttgtgatgaacctgggattttcgcacccggttcggatggctgttccaggaggcctgaaagttaaggtggaagagaacaccaggatcattgtgagtggctacgacaagagcgagatcggtcaattcgctgcttccataaagaagtggaggccgcctgaaccatacaaggggaagggcatccggtatgccgatgagatcgtcagaagaaaggagggcaaggctgggaagaagaaatagaaaccgagtctttgttgtactttgggtttcatacttcattcaattttttttccgatgtaatccctctcttattttgtgaagaagaaaccaaaccagtaagaaagaacatgttctttggatcttccgtgacttgtagagatgcgatgaaacatgaaactgttttcatcaacacatggtctgcttagcgtgattgcgatgctaccaagaactcccagcaacatatatacatgatgatacaattgataagc

SEQ ID NO: 17593 - DNA, 2558 bp, Oryza sativa
  ref <308>: DATABASE ACCESSION NUMBER: AK068026
  ref <309>: DATABASE ENTRY DATE: 2001-12-06
gggtcggtaaacaatctcctcggccggcaagtgtgggagttcgaccctgacctcggcacgccagaggagcgcgccgatgtggagaaggcgcgccgcgagttcgccgagcaccgcttcgagcgcaagcattctagcgacctcctcatgcggatgcagcacgggaagacggctagctactttgggctgagtcagagctgtgcgctaaactgaacctaattcacactaaactacttcctccgtttcacgatttcgctaaagaaaactgtcaaaagctggaccttctcgctgtcaagcgtggagagcacgaagacgtcatgggggaagctgtgtggagctctttgaaacgggccataagccgcgtttgtaatttgcaggcacatgatggacactggcccggggattatgcaggacttatgttctttttgcctggcttgattataacattgcatgtcagtggagttctgaacactgttttatcatcggaacatcagaaggagatgcgccggtacatctataatcaccagaatgaagatggagggtgggggttgcacattgagggccacagcaccatgcttggctcatccctgaactatgttgctttgagattgcttggggagggtccaaatggtggagatggatgcatagagaatggtcgaaactggattttagatcatggaggagccacatttacgacatcatgggggaagttctggctctcggtacttggagtatttgattggtccggtaataacccagtgccaccagagttattactattgccgtatcaactgccgtttcacccaggtcgaatgtcgagctatatccgaatggtgtttatacccatgtcttacatttatggaaaaaggtttgttggcccagtaacagttgtgctagagctaagaagtgaactatacaatgacccctatgatgagattgactggaacaaagctcgtactcagtgtgcaaaggaagatatgtactatccacgttcatccaaactggatatgttttggtcctttctccacaagtttattgaaccagttttgttgcgctggcctgggagaaaactgagggagaaagctctggccacttccatgaggaatgttcactatgaagatgagtgcactcgatacatctgtttcggtggtgtacccaaggcattaaatatccttgcttgctggattgaagatccaagctcagaggcattcaaatgccatattgcacgcgtatatgattatttatggatcgctgaagacggcatgaagatgcagatttacgatggcagccaggtgtgggacgcaggtttgacagttgaggcccttgtggctactgaccttgtcaaagagcttggaccaactcttaaacgagcgcattccttccttaagaattcgcagttgcttgacaattgcccccgagatttcaaccgctggtatcgccatatatccaaaggtggatggacatttacaacagctgatgatggctggcaagtttcagattgcacggcgacagcactgaaggcatgtctattgttatcaaggatatctcctgaaatcgttggtgaaccactggaaattgatgcacaatacgatgctgttaattgtctgatgtctttgatgaatgataatggtggcttttcagcatttgaactcgtaaggtctaatacatggctggagcatattaatcctacagaggcatttgggcgtgtaatgattgaatatccgtatgtcgaatgtacatcatcatcaattcagtgtctagcattattcaaaaaacttcacccagggcaccgcaaggaagaggtggaaaattgtatcagcaaaggtgctaatttcattgagagttctcagagaagcgatggttcatggtatggttcttgggggatttgtttcacctatgccacatggtttgcagtgacaggattagtttctgcaggcaggacacttgggaatagcgctacagttagaaaggcatgtgactttctcttgtcaaaacagcttccttcgggtggctggggcgagagctatttgtcatgtcatgacgaggtttacacaaatcttaaaggcaaccgacctcacggtacgcacactgcgtgggccatgattgcactaattgatgcagggcaggctgaaagagatccagtgcctctgcatcgagcagccaaggctttgctcaacttgcaattagaggatggagaatttccacagcaagaaattgttggagtctttctccaaactgccatgatcagttattcccagtacaggaacatcttccctataatggctctcacagggtatcgccgccgagtactgcttgcaggcaacatataggagcatgattttaagttatgccagctcttggcatgttggtttgccaataaagttacatttcacctcccctagcagcagtactctctactgttctagcgtttgtattttgtattttctaagaaaaaaatgttttaccgcatttacttagttccctttgtttgtaataaaacatggaacatactgcttccttgtagttacacgtgcgttctaataagaaacattattatatct

SEQ ID NO: 17594 - DNA, 1373 bp, Oryza sativa
  ref <308>: DATABASE ACCESSION NUMBER: AK068027
  ref <309>: DATABASE ENTRY DATE: 2001-12-06
gctccatcctctgctgcactggcacgaacgtcgccgggatcccgacccggttcgtccctcccaagccccaacccgaggagcaaagccggggcatggcagaaccgtgaataagccgcaacctctgtggcggtttccgaccaatccccttcttctccacccaaccaggtgagaaatgcgattgggcgatggcttcgctttcctcgcgctataaattccgcgggcaacaataaagaattggagcggagcagcaagtggtgggagggagaatccggaatcccaaagcaacagcagctagggtgaagggagggagggagggggagagggagaaccgcggcgatgtcgtcgtggaactcggtggggatggaggtgctgtaccaggtgctcgggtgggtcgccttcttcgcttggtccttcagcttctacccgcaggtcttcctcaacttcaagcgcaagagtgtggtgggtctgaactttgattttctggtgttgaacttgacaaagcactcatcctacctcatatacaatgctgctctattcttcagccccttcatccagagacagtatcatgagacatatggtgataaagagatgattcctgtcgcggcaaatgatgttgccttttctgtacacgcggttgccttgacagcttttaccctttttcaagtattcatctacgagcgaggaaaccagaaaatctccaaagtctgcatatcaatcactgctattgtgtggacagctgctattgtttgccttattgtagcttggccaaaaagtaactggctctggcttatagatgtgttcaattcaatacaggttgggatgacagcaatcaaatacattcctcaggccatcatgaacttcaggaggaagagtacaattggttggagtattggcaatattttacttgatcttacaggaggggtgctaaactttggccagatgggtgtgcaatcaatagatcaacacacgctagtgaacttctatggaaatattgggaaaacccttctttcattggaagtcgttttcttcgacatcttattcataatccaacactatgtgctgtaccctgtcaaacgagatgagaatggtaaggctatcatttctgaaagggtagctcctcttatcaggccttcagacaagcctgaagaagatagtgtgtgatatacctattgtatttcaccttttttatggccctgattacattcgcttcagggtatagtcccaactatccattcatatgaaacaaatgcatttttcgtaaaactaaattttgtacatatttgtttacggattaatgtaaagatgtagatacaataggcctttgatactagtcttaaaacaatgtttgtgattatgtaagtgtaagtatactt

SEQ ID NO: 17595 - DNA, 2693 bp, Oryza sativa
  ref <308>: DATABASE ACCESSION NUMBER: AK068028
  ref <309>: DATABASE ENTRY DATE: 2001-12-06
gtttatatttccagcagtcaacgatcaagtgtcctttgagcaggagcacgctgaagaagaacggcggtttaataaatttagatgtttaattgaacaaatccaaataacaggagccagatcaacagcagtggatttttactctgagctatgttcacaagctgatcagataatggagaaaatcgagaggcacttcaaaaatgaggaaacaaaggtacttcctcaagctaggattcatttttcatcagagaaacaaagggaacttttatataagagtctctgtgtcataccgttgaagttattggagcgtgttttaccgtggtttgtatcgaagctgaatgatcaggatgcagaagcttttcttcagaatatgtttttggcagcaccttcctctgaagctgcattggtcactcttctctctggttgggcatgcaaaggtcgctcaaagggcacctctaactctggaaaattcatatgcttgacaccaagggcactgagcagcccattggatgaaaatgggtttaaagactgccagttatgtccatgttctttacaatcagatatttgttctaggccagccaagaaatggaatgacacagaatctagtaacataagcaactgctcacaaacggctgatatagcattgacatgtaaaaacagaccttgtcacattcctgggttaagggtagaaattagcaatcttgctgtcaattcgtttgcttctgcagagtccttccgatcgctgtctctcaattattctgctccttcattgtattcaagtcttttttcatgggagacagatgcagccttttctggcccagataacatttcaaggccaattgacacaatattcaaatttcataaggcaattcgcaaagatttggagttcttagatgtggaatctagaaagctcatagatggggatgaatcttcccttcgccaattcatcggaaggtttcgtttactgtggggtctttatagagcacacagcaatgctgaagatgaaattgtatttcctgctcttgaatcgaaagagacactgcacaatgtcagccactcatatactcttgaccacaagcaggaagaagaattatttaaagatatatccactattctttttgagctttcacaattgcatgctgatttgaagcatcctcttggtggtgctgatgcagttggagcgaaccacattcatccatataataggatcgattggtccaaaaagaataatgaacttttgacaaagcttcaaggaatgtgcaagtctatccgggttactctgtctaatcatgtccatagagaagaacttgaattgtggccactatttgataaacatttttctgtagaggagcaggataagattgtaggccgtataattggaagtacaggagctgaggttctgcagtcaatgttaccctgggttacatcagcgcttagtctagatgaacagaacaatatgctggacacatggaggcaagtaactaagaatacaatgtttgatgaatggctaaatgaatggtggaagagatcacctacttcttctggcccttcaagcgatgcctcccatccagaagaagatcatttccaggaaaagttcgatcagagtgaacagatgtttaagcctggttggaaggacatcttccgaatgaaccagagtgagcttgaggctgagatacgaaaggtttctcgtgattctactcttgacccaaggaggaaggcttatctaatccaaaatctcatgaccagccgctggatagctgctcagcagaaatcgccccaacctcagtcagaagatcgcaatggatgtacagtattacctggatgttgtccttcataccgggatccagagaatcagatttttggctgtgagcattacaaaaggaaatgcaaacttgttgctgcatgctgcaataaactgttcacatgcaggttttgtcatgataaagttagtgaccatacaatggaaaggaaagcaacggtggaaatgatgtgcatgcaatgcctgaaagttcaaccagttggtccaaattgccagaccccttcttgcaatgggctatccatggcaaagtattattgcagcgtatgcaagttttttgacgatgaaaggagtgtgtaccattgccccttttgcaatttgtgtcgtcttgggcaaggattgggtattgattttttccattgcatgaagtgcaactgttgcctgggcatgaaattgatagagcataaatgtcgagaaaagatgctagagatgaattgcccaatctgctgcgacttcctatttacatcgagtgcagcagttaaaggtctaccttgtggccatttcatgcattcagcttgctttcaggcgtacacctgtagtcactacacctgcccaatctgctctaaatccttgggagatatgacagtatactttggcatgcttgatggcttgctggccgcagaagagcttcctgaggaataccgggaccggtgccaggatatactttgtaacgattgtgaaagaaaaggaaggtctcggttccattggctgtatcacaaatgcggcttctgcggttcatataacactagagttatcaagattgatagagctgattgttcaacatcagattaaccaggcgagattttccctctcatattcgaaattccttttgaatatatatattgttgtaaatatacatcaacttaaagaaatccatgcg

SEQ ID NO: 17596 - DNA, 2398 bp, Oryza sativa
  ref <308>: DATABASE ACCESSION NUMBER: AK068029
  ref <309>: DATABASE ENTRY DATE: 2001-12-06
ggcttctcccctttattttctctccctttcctctcggtgcgcttcccttcctaggcttagctatagctcatctctcctctcctccacctcgaccttctcttgctttcctccacttttgttgctctcagcttttcgccttttcaccaatccccgcaccgccacagatcgagggagagtgagctctcgcgtgccacggctcgaggtggtcgtgcgtgatttgatcgatatccatggcgcacgatccgagcctagggtacgcggattacttcgcggcggaggtggatggcaccggcgccacggagttgtatgggttgcagcagcatcagcagggggttggggtggcggagatgttcggggtgagggggctcatgccggcagcgcacgcgcacgagcagagcaagggtgtgggcgcgctcgtcgtcggcggcggcggcgtcgatgatggaggcgcgacgacgctgccgacggtccacttcggcgggctcggcgagctgcaccaccaccaacaccggcagagccaggcgccgctgtccctctcgctccacaggccggaggcggccgcgacgtcgctgctgatgcagcagcagcagcagcacctccaccaccagccgtcgccgccggcgggcgcggcgtcgacgtggcagctgcagcagggtgcgtggcatctccgcggctcaaggttcctcctcccgacgcagcagctcctgcaggagttctgcagcctccccgtgaagagcaccaccagcccatcatcggcaagcaaggcaaccaaaccgccgcaagaagaggccgccagcggcggaggctcgtcgtcgtggaccgcgccgacgcagatccagtccatggacgcggccgagctgcagcggctcaagggcaagctctacaccatgctcgaagaggtggataggaggtacaggaggtactgcgagcagatgagggcgctcgcggcgtcgttcgaggcggtggccggggagagggcggcggcgtcgtacacgcggctggcgtcgaggacgatctcgaggcacttccggagcctgagggacggggtggtggcgcagctgcaggcggtgcggaagcagctcggggagaaggacacggcggtgcccgggatgaccaagggcgagacgccccgcctccgggtgctcgaccagtgcctccgccagcacaaggcctaccaggccggcatgctcgagagccacccatggcgcccccagcgcggcctccccgagcgcgccgtctccatcctccgtgcctggctcttcgagcacttccttcacccgtacccaagcgacgtggataagcacatcctcgcgaggcagaccgggctatcacgtagtcaagtggcgaattggttcatcaacgcgagggtgaggctgtggaagccaatggtggaggagatgtacgcggaggagatgaaggacgaggagggcagtggacagtccacgcaggcgagcaacccgcagaaccctaaccctagcagctacacgtcggaggtgcgcggcggcggcggcggcggcgaggaccgcggcgagcagaagccgtcgcgggcgcagctgctgcacgacgccggctcgctggcctccgtcgtgagcatcgggcacggcggcgcgggacggacgatggtcgatcaccaccatcaccagagccttaattttggcacgatggaccagctcgacttcgacgcgtacgaggcggccggcggcgggcaggggttcggcgccggcggcggggtgtctctgacgctggggctgcagcagcagcacgcggacccgcacgacggcgtgaacgtcgcgttcgccgccgccgcggcgccgcccaattcgtccggtgtcgccgcggagtacctattcatgggcggcggcgagcatcagcagcagctgcctcaaaccgcccagttcggcgccgtcatggaaggcgacgccgcgtcgcactaccgtggcctcagcgccaccgccgccgggttccacctcctccacgacctcgccgggtgacccgtcgcacatcaaacaggtggtagaccgatcgacacgcgcgccgtacgacggaaccaattgccggcgacccctcctgtacgcgcgtgcgtgcgtgcacaggccgatcaatgtccaatttcgcgcatgcttggggggtggggattaattgggggggagttagctagctagctctagctaggttgatgtgattgacggggacgcgccaccggcaaagctctcgctctcgcgcgcgggcgcgcgggcgacaccggcattggcgcggcgagagaggggggtgcgcgttgtgtccctctcctgtacaagtacgtatacgctgctttggatttatttttgtagtagcgattagacatctcgtcgctcgatggaattaattaattttcttggcagcgcgtctctgtctacgt

SEQ ID NO: 17597 - DNA, 2828 bp, Oryza sativa
  ref <308>: DATABASE ACCESSION NUMBER: AK068030
  ref <309>: DATABASE ENTRY DATE: 2001-12-06
ggctcttagtttcttagccgttcccgtgcgccgccgccgccgccgccgctcctcctcttctcactccaccgccgacgccgtgccaccgctcctacacagacacagtacaggccccaaatcgtcatcctcgaggatatctccccgtccgctcgccactccgactgagttcgccccgccgcccgccgatccccccccccccccccccccgcatactgataaacactttgagggggaataaatccaagaaacatatggccaagaaacgcgaatcctgcaccccggacgccagaggtactccgtggaaggggcggctacgttctcaccacccggcgcttcccacctcgccctcattgctaccctcttcctcagccaagaaccagaagaagaagagggagcaggaggcccaatcgttcaagaggcgagctgccccgaagaaagccaaggatacgggtaaatgcggcagccggagtcaggacgctgcagagaagcccctgttgcctgctcctccccgtcggtccccacgcctcgctggcaatcccccggctttggtcgacggggtgtgcaaggaatctatggtaaggggaaagcagtcagcaattgtgcctttccgaagatccctacggctccgtcataatcaaaacagtcaaaatgcttttagtatggaccagaatcatgagagttcatcaagaaggagccagaaaaataccgtggtaaagctttctatgaggatggtaagccacaaggattcacaaaaaatattttgtcaagattcccagggcattcctcccaggataagggttccagatctatcatgcaaaaagactcagaaggaagagctgaattccaattgttgtgagaagctggcaagaaagaggaagagaggaacagaagaaagaatgtcctcatcaaagaggcagagtcataaggatcccaaatcattgtccctaaaatgccaagaaagtacacctaccaataagcctagaaacaccagtcacaaaaagggtgaaaataactcttcttcaatgccacagcctaaattttgtgatggaaggttgatgaatgctgagagaaacaataaagagctaaatgggagtgaaagacgagaaacacaatgtggtttaaataactggacagaagagcaggacatggcattgcgcaaagcttacttcactgctcgaccatccccaaatttctggaagaaagtttaaaaaatgggatgattcatcaatggaccttagttattcatgactcattacgtgtcaattctgttgcaatttgccttcagttctcccttcttacagagactgccgtacggcagacatcaaataaaagggtaaacacatgttgaaaatctaccatagtctccaacacactattggtgggtgataaataagctaaacaatagactatgcatttcctgattatgtgatgggttgttacaggtgtagggttcacttgtcatttgtttcttaattactcccaaattcccaattgatcttgcactgtaggaaaaaacagtaatgatgtagtagtttttttatccatacaatatctaagatgcaaagttcatgtcaaataactaggtacacagatttgacaatggttaaataagtaaattgtatatgctggtccgtagcccagtaacacggcatgcattgcaattaatagcacttagaggagattgttagtatctcctttgttttcagtatacactgacactcaaaggaatgtggcaattaaagtcatatagcaaggattttttagtgtcaaactatttttttttcagtacttctatctagtgttgttgcaactagatttagtacaacttgttttgctttcagttaattttccagtgctatttagcatatgttgtcataaatgtggcagcagtgcccagtggacaatcctagttggacttctttgaaatacttcaatggcaagcttaatgtacatttctaccttaatcatttattagttcagcaatcgctgacttaaaccatttcaggttcctggaaaatctgctgaagagtgcttgagcagagttcatgctgatctttcaacaccgactccaattgctcctcgtcctagaacaagtaaaatgaaattttctcctcttggacatttcacattgtctgatccaaaacatccaaacgtcctggaaccttccttcagaagacggactgccaagcagaagagcctagcagcacagaagacagtgagacatttactgaagaagcagtgcctcactgaccaaactcaagaggctgatcacttctcaattttcgagacatcaccaactgttctaccggtggaattctcttttgaggattctcctgggactcctaacagttcagggaaaaaactgttagcaaggttggaaactgtaaagaatgttggcataaaccccgctgaaccgagcccagcagttctgaagcctataaaaaatgttatcttacatgagaaatatgttgaccgattgtcccgcagagaaggcacaacaaggcctcgtaaaaaagctgcagggtccaaagctctggattctgtcaagactcaacaggcaggtggtgtgaaggctgcaaggaatgctctcatcacagaagcaacagactttataagccatttcaagaagatgcaagcaaatccccttgcgcatgttgtagaagacgacgaagatgatgagattgatggtattgagtgtgatactagcaatcattgatacttgattcgaagctgcctgttgtacataaagttttaaaactgcagctggatagcatcttatcaagctttagttctgcaatgatatgcatatgttttgcctcagctgtttt

SEQ ID NO: 17598 - DNA, 3654 bp, Oryza sativa
  ref <308>: DATABASE ACCESSION NUMBER: AK068031
  ref <309>: DATABASE ENTRY DATE: 2001-12-06
ggtggtttctctactccacagtcaccacaacagtggagtactagtgtttactgtttgcctgcttcgtctccgggcattaaagtccccggagctagcctagcggtgcttgtctctctctctctcattttggtgtctttgaattcaatttttcatcacctgttggttctgctggtgttcacttcatttcttgctgaaaccgaaatgcttttgaagcactaggaggctgctcgagctctcggacatggcggtggtctccggtccggacaagggccggggagcggaggcggtggttgtggtggccgtgcgggccgccgccagggacatctccaaggccgccctcgtctgggctctcacgcacgtcgtccagcacggcgacaccatcctgctcctcgccgtcatgccgccgccgcacaactctggcaagaagttctggggcttcccgctctttgcagggggttgtgcgagcgcccacaggagcgtgttgactcagaattcggatgtcgctgatttgtgtaatcaaatgatgctgaaacttcgtgatttttatgatccgaacaagataattacaaaacttaaggttatccctgcatctcctggtggtgtggctactgaatcaaagcgtgcccaagcaagctgggttgtgctagacaaggagttgaaacatgaagagaaacgttgcatggaagaacttcaatgcaacattgttgctatgaagcgctctcggcccaaagttcttcgtctgaatctggtgaggtctcccccaaaagaatcaaaatcacctctcccgccacttcctgagttgagtgattcagttggtgaaaccgaaagcagtatcaacgaacagcgatgtccgattcgtgaaccggctgtgacaccaagtagcagtccagagtcagaaacagcttttggtagcactgatgttggaacatcctccgtttcaagctcagaccctggcacatctccatattctgcttcagaaacgaatagcacattcaagaaagaggcaaccaaggataacttccagcactctgatgtcaatgtatctgattctgagagtgaagcttcaactcctccagcagcatcatcccttcagccatggatggctgacattttaaaaggatctgcgtcctcaagattagcaggaaaccgtcctagaagaactcgtactcctaccgcagatgctttgctcgagaagatctcgaagctagatctcttggctgaaatcagtgcaatcagaagcaggtctgacttgaacttcagaggaaatgtgagagatgttgtttcattgtcaaggagtgcacctcctggaccaccgcctctgtgttcaatttgtcagcataaaacacctgtatttgggaaacctccacggtggttcagctacgcggaactggaacttgcaactggtggcttctcccaagcaaatttcttggctgagggtgggtttgggtctgttcacagaggtgtcctacctgatggccaggcaatagctgttaagcaatacaaacttgctagctcccaaggtgatgttgagttttgctcagaggtggaagttctaagctgtgcacagcaccggaatgttgtaatgctgattggtttctgtgtcgaagacaagaggcgtttgctagtttacgagtacatttgcaatggatcgctggattcccatctctatggtaagctaattattattctgcaaattctatgtgactgatgaatatagcttagagcaagtttaatatatagccaactactagctccaaatcatctataaccaatctaatagctcattcatacaatagttatctataaaccattaataaatggtcccacctctcatacacacacaatattagagttcgtgctacagctgaccacaaatatgtagcctgtttttcttctctctcttctcttctctcctccacatgtgtttatagctgacttgtagcctgctattggagaagagtgcattggtcctgttgcaataactctctgttgatttagcttatgtcatggccatgttggagtaaaaagcatgagtgttaccttttcaaaccatctgttactccttaggccgtaacaaagagacgttggaatgggctgcaagacagaaaattgcagtaggagctgcgagagggctgcgatatctccatgaagaatgtagggttggttgcataatccatcgtgatatgagaccaaacaacatccttgtcacacatgattttgaaccactggtatgatattccatccctatattatgttggatcttagtcgatggatatgaagatgcataataaacaagactggtcatcttctttccattgaaatgctgttctgtttcaatagatagtaaaattcagtactacatgattaattgatcatatatgcatgcatgatgctgtgaagatgtgccgtacttgtcattctaattggcatcagtggtctttagcctcaacttccttccacataatgagggtgaagtatcgtcatatcgtgtgcaggtcggagattttgggttggctagatggcagcctgatggagacatgggtgtcgaaacaagagtaattggcacatttggttatctggcacctgaatatgcgcagagtgggcaaataaccgagaaggccgatgtgtactcatttggggttgtgttagtggaacttgtcactggacgcaaggctgttgatattaacaggccaaagggccagcagttcctcactgaatgggtgagttcgttcacctagtattgcactatttagtgctatatcatcacattagattatgttaagcttggatatttacttttctgacaagtgacaaacgctgataacctcctttttcttatagtacaatggtaagtatgttttgagcctgatggcctcagtagtgccagactgtcagtttccactttcctctgttgaattgactcatccacagttccacactttttcctgatgataagtggcatctctgaattatcattcctgttttgatccatttgcaacaggcacggcctttactggaagagtacgcgatcgacgatctgatcgacccacggctaggggaccggttcagtgaaaatgaggtcctgtgcatgctgcatgcagcaaacctgtgcatacggcgtgaccctcattcgaggcctcgcatgtcccatgttctacgcatactggagggcgacatggtggtggaatcaggttgcgtttctgctccatgcagtgaagctgggagcaggagccggcgaatgcttctccaacaagagcagcagagcagcccggctcagcaagattcacagatcatggttgatggtaaaccacagtcctatgtggcgaggagaattgcctgggatagagatacgcagagcttgtcccacagattctagaatctccatctgcacaagaatgcagccaattctgtgcagcctgtactgatgcaattcttttctgctctgctcaaggcctgcagtgtgtgtacagtagtagtggtggtggtggtacagtagtagtaggcttacattatcttgagctctatctaggcttgtaagtgcctgttttgtgtcatgaacgggggaaaaccatccatgggtgttttatgggagggattgttttgcttgtttggaatctcatgtgttgggaacaagatagacaagattgggtttgc

SEQ ID NO: 17599 - DNA, 3409 bp, Oryza sativa
  ref <308>: DATABASE ACCESSION NUMBER: AK068032
  ref <309>: DATABASE ENTRY DATE: 2001-12-06
gaatccctcctcttcccctctcacgcgccgccgccgataatccgccatcgccgcccatgctgataatcgccatcgctgcccacgctgcacctcgcccttcgcctccccggcggcaccaccctcggcaccgtcgattaatccctctatccccctcacgcgccgccgccgatcttcaccgtcgcgccgccgacgcccttcacctctccgccgacaccgcccactcctccgccccgacgcagcccgcgcctccgcgcatcgcccttcgcctcgccatcaccgccgccgtcgattgcctccaccctctttgacgcccatccccgccacacgcagctgcctcgccggggatgacctcgcgtcggtgacagtggtccagtgcccaatctgcttctcggtctgtgttgacactactgaggtctacggcgaggctactcccctcaggtcttatttcaatcccctgcctacggtggtgtactgttcgcatgcattgtagtgttctgttgaatttcgagtcatttttctcactaagaaatggtaggtgataagatatcaggtacttaggttttattgtctctcaaacatcaggtagttcggttgtgtgtttaacgaaatgaagcataatataatgtataatcttgtgacaatgtattagatctaacaatggtttttttaggagtattaatttagcactgttattagatcgaacaatggtttttttaggagtattcaatttcaatgtaatctggttcttgatctacaaagggttcacgtgtactgtgttggcttggggtccagtctccttctcctgcacgtgatgtgtgctgaatacagcggagaaataatggactgccaacatgatcggacaattcattgcttcctttagtttaacttgcagtgtgaatgattttcctattaagaacgcattaattcagaattaactgaaagaaagatattgcgtgtttaattaaactatccacagaatctgagtaattcaattcattttcttcacgttcttttcaagaatagtctctgatatttcgtattagaattgcatgcatatatacaaccctgtctaattatatctgttcaaaataattttagccagcttgacaagcaaaaatttctcagtagcctcaattggcaatatcaccacacttctaggaggaggaaaggctgctccgcgggcttcgtagggatcccggcgagctcgcccccgtgactcctgcttcctctggtatggcgaaatcagttatgcctcctctggggcttagcttgtgccttctgttttgattaggttaggacaaatttgtgagggctttgtggtctaacatttgctctgtgcaggcgaatttttcgtcggccctataataattgagttcaactaatctaccctttagagcaactcaaatatcgatctgtcttttgttaatccaagcaacacatatgctgcaatggataagaacaaagaatatgatgctgttataatttacatgtttagaaaaaaaaactaatgcagtaaacaccattattcatggaataaaatgaacaaatggcgacgattgccatctatgaatcaatgataatttacccttgctatggatataatgtcctgtatatttcagaatatgtatataacaaagttaaaacctctgaatgtacacgaagtgaagtcgtctaattgccgcccacactgccagcttcttatcccaacctgaatttcagagatagctccatttcataaattgtctgaactttgactgtgaccacaaatgattgaatcattatttccttctttttttgtccagtcacttgaatcaggacctagcatacatattcagacaggaggtctacggcgaggcagtggtgcggtcacaagttccaccactgaacgggctaactgagaccatggaatgatcatgtcattttgaaggatcggcaatggttgtaagcatcggcagattcgattcaccgagaagttcttcctcggtgacactgttgtccacaaggttggtaggttcctcttcttgctttcctcattgatgtgtgattccatttagtatgctatacaataaaacactgagccatgttgtctgaatagccaaatgcagtttgtattgcaaagagtaggctgtaaattcactgaatcatgtgtctcatgttttaccggtttatatttactgataggatgattctatttttagttagtggttttctcaacaaacaaaagttttacatgaagtattgatactttcacatataatagtttactgatgggaggattttattcttagtttctggttttgagaagacaacaagttctcagcttttttctgaagttctgatggatggcacagttagtactatggcattgcaatgggattattgaagcactgtaatgagctggtaatagttttttttccatctttgcaagaggaggcaacctatggagatggtgggacatttgtacttatcttttagccttaatatggacctgagttctcactgtagggagtgcaacaattccctgtaaccaaaagtatgaagtggacacagtacagttcaagaacaggttcttctccacgaaaataaattggcaaggctaccttagagttggaaaaaaaatctgggattgcaagagcattgcaagggagaacttctgaaaaggaattgtgagtacaaagaagagctcacaacgagtacagacttcttgcattgcattaacatatgatttttttaaaaaaaatcctgcaaaaggctccagttttcctcatatttgttgtattctatagttcagactttttgtgaccacgttttgaggatgggttaagttcccaagcacctcaatctgatgttgtacaacccttgacacaacataagcaccagctgtctatttctttggacaacactgtgtcaagcgagtggagatatggtaatcacggtgtgtgcatgaaagcctcttaggtgaactctctcaatattgttagagctgtactcattttttatttatcagagttgtttctcagctactataccgcttgattggaatatttaccatgtgcatgtaggttatcgttatctttagtgcccatattatttggcttgggcaactataagaaactaatcaggaaaggtaagcagcttattctgcacggtcttaacgaggttatcccgaggtgggcttgcaacaggagagaggatggtactatttcttcccactcataggatctgtcatctttatttgtctagcgaaggcttttttttatctacagaaagtactgcataacaaccatttttgttggtcttgcctttgtttgtttcatctgtatgaaatttgacttataaagcataacatattgtggtattgcctatgattttacttgcaaggaataaaatgtgctccgacaatagtatc

SEQ ID NO: 17600 - DNA, 2979 bp, Oryza sativa
  ref <308>: DATABASE ACCESSION NUMBER: AK068033
  ref <309>: DATABASE ENTRY DATE: 2001-12-06
gaccaatccccccactcccggtcccctcggattccgcccatgccgccttcccgccgagagccctagccaagcccgctcgctgcttgctaacccccctccgcgcgcgctcacccgagtcctagggttccagcgagcggcgaggaggtagctcgttcgcgcgcgcgtcaaatcccatggcgggcgccgccccgctgcgcgactccctccgccgcctctgcaccgacgtcggctggtcctacgccgtcttctggagggccacccgcgccgccgactcccagcggttgaaattggtgtggggggatgggcactatgagcgggcggccggagcgccgtcgatctccggcttcgaggccatggacctgctgctcaaggagaaggccgcggcgttgcggagcggcaccgggcgcggtggtggcggcggcgaggggcacgcggctgatggcgccgcgggacacagccatgacagggtggacgcgctcgtgcacaaggccatggcgcaacaggtccacgtcgtgggagaaggggtgattggtcaggctgcactgacagggttgcatcggtggatcgttcacgatattgttgatgagtgtgaggaagaagatgaggtattgctagagatgaagggccagttttgtgcaggaatacagacaattgcagtgatacctgtccttccacgaggcgttattcagcttggctccacaaaaatggttatggaggaagcagcatttatagatcatgtcagatctttgtttcagcagctgggtagttcaactgcagttgttccgtgtggttcctttgtacaagattcgattatgagaactccatttcacaaatcacttggtgtgcctacctcttcgcactcggaagaccttgctggtggtggaaatacttataatgatgacatgattaaccaccagttcaggcatcagaagtcaccagcctcgacaattcagtcatttaaccctgtacaacagttctatgctgggcctactttctgtcgtccagtaactattgcatcacgttgtgatctcttccaacctgaccatggatcaacctttactttgaacagtcagtcagaggacaatagatcgacagctttactcaaaaatagtgtttcacattctaaaacatcaaatgatgccttttcacacgcttttaaccccctcaatgaacccaacgtctccatttcaggcagaagagagtgtgtaagcatagaacaacatggttcttgccgtaatggagaaatggaaataacaataggccgcactgcttcttcaagttgtacaggcaaaacaaatattatcaataaagtggatgatttgctgagtcaggattgtttggtaggttgtcaggcaagcaatgccacatctgtgaacagaaagtttcagacaatgtccattgttgataatacaaagcttcaagatggttcttatgcaattccacatgctgcacttgttgactctacccaatattcagactgctttcaatcgcttcttggcacaatccaaggtagttcttccagcaattcaaatgcaattcatgtggatacttctcataatgctgtccatggaaagagtaacttttgccctttaggagataggaatgctgctaattcaagtgacttggctgaacttctggcatcgccaataccattagagttgactgggggaaacgatttgtttgatgtactgcaacttcagcagaagccaaatggttcaaataatagtgaagtaaacaatcgtcaatcaatgccttatggttcagagcaagctgttaagtctctgattggatgtgtggatgatgatttcactggattgatcacagaagctgatccagaccagctcctggatgcaatagtttcaaagataatcacagggcacaagcagaacgtggataccagtgcttcttgtagtactacagtggcaggctttgacagaccacttcattctgattgccacctatataccacaggaccatcatcagggccaatattttgtaattttgccagtgttgctcctgtagcaattaaaactgaagggcctgctgcaggttccaggcaatcatcttctagtatagataaatctgcaggatgctctcagacacaggaaagttacaaatcacagataaggctttgggttgagaataaccatagtgtaggatcagatagtctttcaactggacaagcatctgacagtctttcaactggacagtgtaaaaggagtgatgaaataggtaaatcaaaccgaaagagatctagaccaggggagagtgcaagaccgaggcctaaagatcggcaaatgattcaagaccgtataaaggagcttcgtgaaatagtacctaacagtgcaaagtgtagcattgatacattactggagaagaccattaagcatatgcttttcttgcaaaatgttgcaaagcatgctgataagttgaagggatctggggagccaaagattgttagtcatgaagaaggtttgctcttgaaagataactttgaaggtggtgcaacctgggcctttgaagttggtacgcgatctatgacatgtccaatcatagtagaggatctcaatccaccccgtcaaatgcttgtggagatgctttgtaaagagagaggaatcttcttggaaatagctgatcaaattagaggtttagggttgactatcttgaaaggtgtgatggaagttcgtaaagataagatttgggctcgctttgctgttgaggcaaacaaggatgtaactcggatggaaatatttctttctcttgtccatcttctggaacctagcactgggagctctattttgtcagcaggtgttgagaacactagcctgccgcgcgatagtttctttccatcgtctattccagcctctggtttctccaactgcttgtgacacgatgtaccatacctcagcaagtggagcgctgtgagtgggtaaagtttcacctgccgtgaccttttctccctgccttgttctagctgcc

SEQ ID NO: 17601 - DNA, 2636 bp, Oryza sativa
  ref <308>: DATABASE ACCESSION NUMBER: AK068034
  ref <309>: DATABASE ENTRY DATE: 2001-12-06
gatgaggagttagaacaactctagtgtagcctacagagtgaaaccaaaagagagaaggaaaaaaaataacaaaaaggagtagatgcagttttagttcttattattctaatcttctctcttgttgcaatttctttttagaatccttgggatcatctctgtccccgttctgggtggtttctgtcatactccaggaactgtcttgttctagctctttgcttggtctgaaagtcgatttctgcacaggtactgcgaaagctttgggaatagtattgcagaaagcgcagcaatctgaagcttactgtccaagccagtttgcagctgaagccaaagactgaatctttcatcagggtttgataatatcaaatacccttgtgatgacagagttaatcagtttgtctcgtcatctacgtgatgattcttcttcagtctgtctcttcttctgcttctgaagacgatggccacattcttctcctcttccaccaatcagagagacctcaccggcggcggcggcgacggaggcgacatgtcgttccagcactacccaccgccgtctaacccttactcggactcgtcggccggcggcctgatcccgctcccggcgagcatcgtgtcgcatagccacattgcgcacggcggcggcgacgagccggcggcgttcagggaagcggcgacggcggacggcggcgagatgggcctgcagacgcagctgctcatggcgcacggcgcggcggcgcggggacaccagggcgggctatcgcttagcctcggcacgcaggtgccggtgtctctctaccagtacaggccggcgggcatggcggccgcctcgctgctcagcccgagccagtcgtcgccgatggcggggaggagcgcgcagaacagcatctacgtgcagaactcgaggtttctcagggcggcgcgcgagctgctcgacgaggttgtcaatgtccgcgacgcgatcaagcggaagggtgacaagaaccagggcaaggattccggcgagtgcaagggcggtgacgccgccggcgacgacaaggccggctcgaacccgcaggagcaggagagcaattcagcccccgagctctcgccgtcggagaggcaggatctccagaacaaggtcaccgcgctcatggccatgctcgatcaggttgatcggaggtacaggcactaccaccaccagatgcagatcgtgatgtcgtcgttcgacgcggtggccggcggcggcgcggcgaggccgtacacggcgctggcgctgcagacgatctcccgccacttccggtcgctgcgggacgcgatcggcgcgcaggcgcaggcggcgcggcggggcctcggcgagcaggacgcgtcggcgcagggcggcggcggcctctcccggctgcgctacatcgaccagcagctgcggcagcagcgcgccatgcagcagttcggcatgatgcagcagccgcagcacgcgtggcgcccccagcgcggcctcccggagtccgccgtctccgtcctccgcgcctggctcttcgagcacttcctccacccgtatccgaaagattccgagaagctgatgcttgcgaggcagacgggattgtccagggggcaggtatcgaactggttcatcaacgcgcgcgtgcggctgtggaagccaatgatcgaggagatgtacaaggaggagttcggcgcggagatggactccaactcgtcgtcggagaacggcggcggcggcggcggcaagggcaaggacgaggcgatctcgtcggaggaccgcgacgagttccagagcccgtcgagcgccgccgcggcgaggcacgccggcgtcgcgggccagctcaacaacccgttcaagtcggaggcgatgggcggcgccgccctggacgtcggcgtcggcgtcgtcggcctgtccagctgcctcggcggcgccatgggcacgtacgccaccggcctcaacctgaaccaccacgtgcaccaccccggcgccggcggcaccagcctactgcacgacgcgctgcaccaccaccaccacggcggcggcggcgacgccaggttcgtctcctacggcgacatggccgacctcggcggcggcggcggctacgacggcggcagcgtgtcgctgacgctgggcctgcagcactgcaacaacgccggccccgtcccggccgagcagcagggcctgctctacggcagcgccggcgacttcgactacatcaacggctccgacgaccggcagcggttcggcccggcgtcgcagctgctgcacgatttcgtcgcgtgatcaaagcacggcgcgcgatggatgcatcgtctgcggcggcggcggcggcggcggggaataacgcaagacggcgtcagaagcctgggccggccggccggcgccgtcggcgagggtatacaggtatacaagcaatatacacgtacactcgtgtgttgtgttgggggggtaagtaaagtgatcgaagtaggggtgatcaggggtgtaattgtaaaactgtatatgagaagggggtgtagcttgctgtaaagatagattggtatttttgctagcttgcagatttctctactgattgatgcatggatcattcatatatatatatgtggtgatgtgttgggtcagattggaccagatgttcaatggattactgtgaattgcagct

SEQ ID NO: 17602 - DNA, 1368 bp, Oryza sativa
  ref <308>: DATABASE ACCESSION NUMBER: AK068035
  ref <309>: DATABASE ENTRY DATE: 2001-12-06
gatacgccacacatataacactgctgttgtctagctaggcagatagcaacacatacagggaattaagcttctagccaaagcatcttgcagccatgaagatcgagcgagatttccacatgatgaaaggggacagtgagttcagttatgccaagaattcaaggatccaaaaaagagttgttcttgctgccaaaccaatagttgagaaagctgtacgggaagtgtgcatagatcttcatcctcaatcaatggtcattgctgaccttggctgctccttcggtgcaaacacactcctcttcatctctgaggtgatcaccacaatatatgaggactataacaacaccatcaaggagagccccatggaggtccagttcttcctcaatgacctaccaagcaatgactttaaccacatcttccaatcactagagcagttcgagcagttgataacgcaatattgcgcttgcaaagggttacaacctcccccgcactttgtcgcaggcctgccaggttccttctacactagactcttcccttgtaatagcgtccatctcttccattcctccatgagcgtcatgtgactctctcaggttcctgagcagcttgatggcagcatgaatgaggggaacattcacataggagcgactacaccaccatccgtggcaaagctctaccaaaatcagtttgagaaagacttctcacggttcctccagatgagatgcatggagattgtgcccggaggccggatggtgctgacggttgctgggaggaagagcaaagatgtgttcaatgcaggagggacgaccacgatatttgatttgctttcacaagggctacgtattcttgttgctgagggtcgtgttgccaaggagaagctggactctttcaacattccagtgtactgcccttcagctgatgagctgacgcagctggtgcagcagtgcgagctgcttgacataagtgacattcaactcttcgagatggatgagaaccgcatgcatgactcggagcaagcagagggcaccaccgccgctcacacagcgggacagagcatgtctgcaactctaagggtggcgacagagtccctggtagcaagccattttggggaggacatactcgaggagatcttcacggtgtttgcacgtaatttcactagttatattgagagtgaggttgagaaaagtggcatcaccatcatcacactgtacttgcaggcaaaacactagctagataatggtactatacggtagagtgtcaacaatatatcctggcagagaaacatataaagtttaaatataaggtgattttatagagtaaagtgcgctcatggtatgccagcttggcaagttcggtgaaagttaatgcaagaaattg

SEQ ID NO: 17603 - DNA, 1779 bp, Oryza sativa
  ref <308>: DATABASE ACCESSION NUMBER: AK068036
  ref <309>: DATABASE ENTRY DATE: 2001-12-06
ggtggtctcggggcgctttccaatccaacaggcgcggcctcctccagtcaattcctccctgaccctcctccggccgcctccgcctccgcctccgctcccgcctgctgctccggcctccgcaccaaaccctagccctgggccatcccctgcccgccgcgagatgcgccgccgccctctggccccctgatcctcaccctcctcctcctcctcctcctcctcctctctctcctccttcgccgccgctcgtcgttgcccgggcgtatgggccgccacggcatgtcccgcggcgccgcggccggagacggcgggggatgcctgccgatgcctgttatctcggcggaggtcgcgctcgctgtcatcgacgcttccatttcagtcgccgccttcgtgcagctagcaagaatccacaggcatgatcagcagcatggatggactcggcaaaagatattccattttatgattggcctatgcaacttagtattccttgtgtatttcgtgtctaccatcatcgctacctgtgagagatggctttgttgggtccatggatgtggatttgtactcatggctagtccacagatattgcttcttgcttcttttctgttgctgttgtcattctgggttgacctgtgtcaccagacaaacgatgaagatgaagaggatacgaggagtcaccatgaggctttactggatagaacaaaaaataaacctggcatccgtgctgctgatgttcgccggaggtgttgcccaggagtacagcttggaagccggcaaaaatttgtgattttggtgcttctactgtcatttgttgttacaatcgccttcgccatcctcatctggattggtagaggagaaaatcctattgattcatctctattgaaaagggtttacttggatgtattctcagtagttgttcttgtacttggtggtgcgctggcatgttatggtgcaatactattttcaaagatgagcaaagtgcgttctgaaactggatcatctgagaagcggaaggttgcaagtttagctactgtgtcactgatttgtttctcgtcgtccgctatactagcacttgttaccaatgttccagtgcttgtgtattggtactcagcagatgaatacatcatcaacaatgctatcatattgtttatgtactatttcataggatcatccataccgtcaggatttgttctatgggtcatgaaagatattcctcatcggcagacagtagaaaggcccacacaatcaagagttgttattttgttcagggatagaccatcccctacacaggatccacaatggaggactgccgttacatcctctaacaaggccctcaagtcaagccctatttaaccagaagacaaaccgttgatgtggaaacttcagtctgtttaatctgctagaattttaccaatgcgtcatttgtgcactggcatctagtagctttctgacaggttgttggtacaaagatggatatgtaattcctacttcaaggaaactttagtgatcagaaaagaagggaattacctgtgaatgtagcatggttctccaatgagtgcacagtatgcgtttatccattagaattaactctgggtaaggctttaaggattaacaaatgtaaatagccatagaaatgagagtttttcatggtttggctggctgttcattcagattttccccaccgtcacattagcttcctcaactcattttagttaatagaactggcaaagtaaggtttcagcttgtctatgaggagattttgccttgagaagatctctccatgtt

SEQ ID NO: 17604 - DNA, 1032 bp, Oryza sativa
  ref <308>: DATABASE ACCESSION NUMBER: AK068037
  ref <309>: DATABASE ENTRY DATE: 2001-12-06
cctgccccttttcccccacctacacgccacattctctctccctctcctcccccccattgcggctaccaaatgctcctccagatttgctccaaggtttagctagctagctctggtgccaagaacaagctgaagaacaaagaagaggttgtcaagctgaagctgagaggagaaaagagagatagagagagatggaaggtgatagcttctcagggatggccaatggcggccaggtggacaacaagctgatccagacattccacaagagcttcgttcaggttcagagcatcctggaccagaaccggatgctcatcaacgagatcaaccagaaccacgagtcccgggcgccggacaacctcacccggaacgtcggcctcatccgggagctcaacaacaacatccgccgtgtcgtcggcctctacgccgacctctcggcgtcgttcgcccgcacgatggatgcctcgtcggagggcgattcgtcagggacgctccgctcctccgacggggcaggccggtccggccagaagcgtgtccggcccggctaggatcaggtgccattcttggcattttgatgctcagatcaaatagggtggatgaagatgaagatgaagatgatggtgatgatgccattgtcacttcttggggacttctctagtggtgttactattaggcttagttactcttaatttctttcttgacctcttcatcatcttctctacaaatgcttttgcacgagtgtatcattagggagaagcaaaaccttttactatgtagaagaagctgctatgatgatgagagaaaacggcaatgtagtagttcttgaccatctctgctcatggttgtcagccttactgatactagcattcagttgtttgattcctgactagattcaggttgttgtacatgagagcatatgcagatgcagtgttgcatctctgcaggtgtgccagattggtcagttcatcatctctctcactggatagatttcaatgtctcactggatagatttcaatgtcattcagttcttatatccct

SEQ ID NO: 17605 - DNA, 1995 bp, Oryza sativa
  ref <308>: DATABASE ACCESSION NUMBER: AK068038
  ref <309>: DATABASE ENTRY DATE: 2001-12-06
gactccagtattgttttgttgggtcggcggcggcgggtgagagtggagaatgatgatggctctccgccgcgccgtcggaattggctccgccgccgccctccgctctgccgcctacctccgccgcgcctccccctcgccggcgcggccccatcccctcgtccctccaccgcctgccgcccgaaccttcgccgccccgccccaggtgatgaagaggagcaccaaggacgacgacgacgatggccctcggatcaacaacgacatcacctctccctttgttcgactcgtcactgaccaaggccatagtgttgtccccaggcacgaagctcttcagcttgcggccaggatggacttggacttggtcgaggtccacagaaaatcagaccctcctgtctgtaaaatcatggattttcacaaagagaagtataagaaagacgttaaggagaaagaacgcctaaaaactaagtctgctattgtcttacgcggtggggagaacaaagaagtgcggtttaagggtaaaacagaactaaaagacttgaaggtgaaagcagatggaatcaccagattaatggagcgaggttacagggtgaagtgcatggcgatgccctcaggtaatgaagaagaagatttaggagggccactatctcggttgttaggacttatacaagatgtctgcatagtggaaagtggcccacatttggactcgaagcatgcatacgttattgttaggcatgtgaagtttgcaacaaagaaagctggaaagaaagctagcaaggccatagaagatgtaggcaaaggtgcccgcaagaatgcctctgaattgtcaactgttactgccgatagtggagatgagacaaatgattgtggaaatggggccatctcagatcaaatggacaacgctcctgcttacgtctccaatgaattttccatgcagaaagatgcacatgatagaggctctagaagggagttgagttggtcgaaatcgaacccgggcaactacggtgaaaacatgcaaaatgttgatgctggggcacacagaattagctctagtcagcgggcagcacaaacctcagagggtgggtttggttccaataatgtaaaatctggtatggaaaagcaagaaaaggctaatgaagatgtggtacctgcagaaaccaacagatacgccagccgaagacagcagataagaggagataaccagggtttgagccaagatagatccccgcaaggtcatagaaggaatgaaaatgaagttcgctatccggtcaatgactaccaaagacctctgcagcagaacaaccgacaatcaccaaggttcaacgatggtagattaccacaagaaccaagaagaaatgaaaggggaggccatattccgttgaataacaaacaaggccaatttcagcaaatgaatcatcctgctgaatcagcgggtaatggtgcaggctatcctactccgacggccaagagttttggagttttcagtaccagaaaacctgctacgtctgagttggggaaaacaaatggtgctagtaggactgctaattctgatgtacctaaaagctatggaatctttagttctcctagaagggaatctggtgataaaagctcatgaatgaaactatcagcagataagcctataaacagcaggtctacatcaaagtttgtcgtatttggaattggcacaataagcctcgaaatgtaaggatcagcatgtgggtctcatgtttcagtttttgttgatcattgactattattcattcagcctgagcatatctacgtggcggtggcacggtgagaaagccaactgcaagcttgagaggtactgtactactcctatttgttaagtagcttttgggtccacttgtattgttatcatttgattggaagaatcacacctgtttagactagaatagcccttttacttgtcaggttgatcgaatagtgaaaaataatgtcatgagtggtcggatccatttgattgtgatagcattttttacc

SEQ ID NO: 17606 - DNA, 1757 bp, Oryza sativa
  ref <308>: DATABASE ACCESSION NUMBER: AK068039
  ref <309>: DATABASE ENTRY DATE: 2001-12-06
gagtcgctcgctcgctcgctggctgactgcgcccgcgcccgctttgctgcgctcccccggcacgcgacgacgaaaagaccggcctcaaaagcgacaccacgcagcagacgcagcgcccccgcgcggagaagctagctaggtactcctgtctggttagctagctagctatagctagaagcctagcacatgaacccggcgccgtcgagggcgccgcagcggcagcagcgcggaggggagatgtcggcgcgctacggcggcgggctgcagttcttcgctgacgccccgccggcgggggtggaggggggcgccgcgaccgcgcggacgttcttcccggtgccgggcgggggaggggagcagcagccgccggagcgcgcgatgaggcagcagcactacggcggcggcgggagtggtgcggccgagatctcgctggggcacggccacggccacggcggcaagcaccatttccatcagttcggcgtcgaggcgaaggacggtggcggcggcggcgaccagtcggggtttctgacgcggcacaacagctcgcctcccgggttcttctcgagccccgtcatggacaacggtttctcatcgagtgctagaccagcaggatcatcactcggtgaggttcgccatggcgccatgagcagcagcagcaacaacaacaagaagatgaaggccccactgagcttcgctagcagcaggcagggctccggcggcctctcccagatatccgaggacggcatcccggacctcactgacagcatccatggcgccgctcatcatcatgggcgctccgaggagaacgtctccacccacgaccacgtcgtccgctccttctcctccggtgggttctcgatcgggtcatgggaggactccaactccatcgtgttctccacgtcgacgggcaaatcaggagcgcacggcaacgacgacatcatcgccacccttagcaactacgaatctcagcttgttgcgcccagggagatggctggcgtagagaaatacctgcagatgcagcacgaccaggtgccattcagagtacgggccaagcgtggatgcgcgacgcacccacggagcatcgcagagagggagagaagaacgaggatcagcgagaagctcaggaagttgcaggccctggtgcccaacatggacaagcaaacgagtacttcagacatgctggacttagcagttgatcacatcaagggactgcagagccagctgcagactctgaaggaagacaaggagaaatgcacctgcagctgcaagcaagcatcaaggaacagaccagccgactaaaatgggatgtgaagcaaattgcagtgctggctagtttgatgacatttctccttggtcctcaaaacatgtttgcctggcgacaggaaattaaaggtatagcaggcagcatatagcgtgacaagagcaaagtaatggaggtcatcagtctcttccaaacgaaaggtcgaagtcgtctgatcaaacctttaccagtgaatcgatcagtccagtcttttttcttttgtcagtgtgaccaaccccttttgttgagctgtaaaattaattgaaactagactagaattgttccttcctttaacaaggagctctgctgctctggatgttaggcttctagctgtcctgttgctgtggtaaatagtgattggttcacccagcggttagcaaataatctggttgctggtttcagggtattctccggccaacattagacaagattcagtgatgtgttatgattcatacagatc

SEQ ID NO: 17607 - DNA, 1656 bp, Oryza sativa
  ref <308>: DATABASE ACCESSION NUMBER: AK068040
  ref <309>: DATABASE ENTRY DATE: 2001-12-06
gagcgtccacttccaccgaagtaccgaacaccccgtccccatcatcacctcaccatggcggcagagggagaggaggcgaggagcccgcacgtcgtgctcttccccttcctcgcgcacggccacatcccggccttcctccgcctcgccggccacctccagacgctccgcccgggcctcgccgtcacgctcgtctccaccccacgcctcctcggctccctctccctcccggccacctcccctccgatccggctccacgcgctccccttcgcgcccgccgaccacggtctgcccgacggcgccgagtccctcgccgacctccacgtccaccagttcatcaccctcttccgggcctccgagtccctccgcccggccttcgatggcttcgtcgctggcatccggccccccgtctgcgtcatcgccgactccttcttcgcgtggacggccgacgtcgcgcgcgcgcggggcgcgtcccacgccgtgttcctccccggaggcgccttcggccacgccgtcttcttctccgtgtgggagcacctcccgcacaccctcacggccggcggcgacgagttcccgctgctgcccgacttccccgacgtcgtcctccaccgcacccagatcccgcagtacatgctcgccgcgacgggggcggacccctggacggccttcttccggcgggtcatcccgtgctgccgcaagaccgacgccgtgctcgtcaacaccatccaggaactggagacctccgggctagacatgctcagagcgagcttcggcgtccagacatgggcgatcgggccgatcctcgcggcgccggatccttcgaaatcgcaggacgacgacgacaccagcatcatccggtggctggacgcgcacccgcggcgctcggtgctgtacatctcgttcgggtcgcagaacagcatcagcatccgtcagatggcggagctggcgctggggctggaggcgagcgggcggccgttcgtctgggccgtccggccgccggtggggttcgaccccaaggacggattcgatcccgggtggctccccgccggattcgaggaccggatggcgcgcgcaggcagggggctggtggtgcgcgggtgggcgccgcaggcgcggatcctggcgcacccgtccacgggcgcgttcctgacacactgcgggtggaactccatcctcgagagcctccgccacggcgtgccgctgctcgggtggccggtgggggccgagcagttcttcaacgcgatggtggtggtggagtggggggtgtgcgtggaggtggcgcgcgggaacctggagagctcggcggtggagagtggggaggtggccgaggccgtgggggcggtgatgggggagacggagaagggcgaggcgatgaggaggaaggcgggggagatcgcgcgcgcgatggcggcggcgtgggagggtccggccgggtcgtcggcggcgagcttggaacggtttctcagatgcgttgaggcatcggcgctccgagattcgtgcttgggtgcttcgtgattggtgcagcgcgaaaaccacccgtgtaaatgttgatgtgaattctctttctaatttctgatttctctcggtttagatattctgttagacgtgtatatttatctcggtttggacgtagtatgttcatagtaagaatcacaactc

SEQ ID NO: 17608 - DNA, 764 bp, Oryza sativa
  ref <308>: DATABASE ACCESSION NUMBER: AK068041
  ref <309>: DATABASE ENTRY DATE: 2001-12-06
ggattttttgcattttagcccctgttttgagtggctcatcgcgtttcgctctcgcctccggcggcgcccgccgccggcatcgccgtgggagccccgcccaaccatgctcctcttctccgcgggaagagaaaggctcctagatcactgcgagagctgcccccaacccaatcatcgccgctggccgctgcagccggagagggggggggggggggaaggacgggaggtttccggcgagaagcaagcgcgctacgtctacgcgcggttagtcccgccgtatctcctccttgaaggtgagctccgacgccaaggcagctagctgctttgctgctggctcctgggtccacgctgctgaagctgaacagaacaccgtcatggccccggcagcggcgatgcaatccgaagatgatgatgactggcttttgagttttgacagaggtaacaccataaaaggctcaaaagtaaatatgagtccaatgagctccacaaagttcagcatcaagaacaccacttgatcacctacaggtttcaagaaagccaaactggatcagcctttcctttttctttttcctgattacatgttcttttagtacaattagtccaggcaaaccccttgttaacgaaataagataggacaagggtatgtaatgtatggtcgactgaaagatatggtagtttactaggccaaacaaattgaaagacaagggagggaaggggtgttctttcggccaacctggctaattaaaagacgaggcaagatataggcg

SEQ ID NO: 17609 - DNA, 1181 bp, Oryza sativa
  ref <308>: DATABASE ACCESSION NUMBER: AK068042
  ref <309>: DATABASE ENTRY DATE: 2001-12-06
gactcattgggtttcttgtgctctcatgcatatgtatggtcttctcctgctatcaacgaaaccaagccatcaccaccacgtctccttactgcgaaaaccgccatggaaggaagttctgcaagccaggccaaggccttgttcaaagccactcttcttggcctggccatcctatccatggtgacatgggtgccacacatgtattcctgcattaagatgttcttggtttcggtcccttccgcggcttccaccctcgcgacaccgaggtgcctgttcatcttctccaacatcatcgtcatcttcctcgccagcgagttaaaactctccgagggggagagcttcggcgagtctccgatcccgaccaatcatggctctgatgattccatcagatatagggttgaagctttcactctaactaccaagtcaaacgatgtgattgttaaccatgttgttgaagagcaagttagcacggtaattgtacatgatgacagcctgcaacagctagatcaatgtgaacaagtggatgcttcatcaaccatgtccatggacaaggaatcgagacgagacaacaacaataataacttagcaattggtgctaatgttggcaataatggagaaagtgaggaagtggaagaacagggaggagcaatatcactaggcaaggtaatcgaggaggaaatgattgaggaggaagatgttgggttgccaactgatgagctgaatcgtagagtggaggacttcattgcaaggttcaacatggagaggcagcttgaggcaaggatgcttgtctgctgctactaaatatatgttttgaggcaaaggatccatttacagaccatgctcatgaaatcgaattagagcaagtgtaaggaaatttgatgtgctgcctctaagattgttaattaaataggattatgtgatgagtttgagaagagaagtgatgaaaaagagagaagatgaggcatctcccgtgcaagaggtagcctctatatgtacactataacaaatatgatagcactaattaggggtttgtttattagaggtaacatgttgtatatcttgtctattagtttatgtgtatatgaaatagataaaattagagggaatatatagtcacctctattatcaaacttgcttttattgtcccttaatcactctctatgaatgaatggaataattttttt

SEQ ID NO: 17610 - DNA, 1053 bp, Oryza sativa
  ref <308>: DATABASE ACCESSION NUMBER: AK068043
  ref <309>: DATABASE ENTRY DATE: 2001-12-06
gacttccccctgtcggggaagagccgaagagggtgaggaaaggatggcttcccccttgcgacgactgcgatcatggcgggtttctcgcggcgccacctcgccgtgttctacgtcggcggcgtcaatggcagcggccaggacaaccaacaccctccaccgccttctaccccttgcccgcgccgtccactcgtcgctgccgccgagcaggtacggcgatccccgttcgcctccgcaggcccgtcgtcccagcggcgaagttgagctctctaaactggaaaagacgccctctgaccgtttcgacgagatcgaagctgccattcatgccaatctcgtcaacgacattgaggcctacaaatcaagccttatggcagaccatggtttctttgaaagaatgcttacctctatggggataaaaaagagttacactcgtgaccaaactctatggttgtgcaagctgattctcatcttctttgcctcagggtctgttgggattggatttgccaagatcgatgaccgtctgaaacaggctccatcaaatgctttataactgagcaacaaacatgtctgttgtttggcctgcttaaaattaagctgttgatcacctcgcaacctattctgcatttatcggcctgccctcgacgaggttgaactcgatttatcagtgctgtagattgtctgctgggatggtgtacgtgtgcacgggcgtctgctcggtgtggaaaccgatggtggccgttcagagcttggcgagggcggtgagggcattggagcatgtaggccggagaggatgaggtgagacagcggcgctggatccatggtgggtaacaagaggcaccagcgacaacctgggcagccttgcaccgttgtgcttcagagctccatcaggaactatttcttttactcatagtaaatcttttgtttttgtttagggcagtcaagtcgggcttttttatgtttgtgtttagataattgaacatctactttgaccgacattactactgcagtattgcagcttattaccagatcatgctcacgggttaaatttctttatcc

SEQ ID NO: 17611 - DNA, 1103 bp, Oryza sativa
  ref <308>: DATABASE ACCESSION NUMBER: AK068044
  ref <309>: DATABASE ENTRY DATE: 2001-12-06
ggttctgaaaaaagtgagagactcgtcagtgaccggcacgacatggacgccggcggcgaggaggcgaagcaggagcgccacctggttgctcgtgccggcccgcaagctcttcctcctctcccatcccgacgccgacgacgacctcgccggccatggtcgccctccgctccgacgtcctccacgccgtcaaatccgccgtctctctccatctatccatcggccggctccccgcctgcacgccgcggtcgagtcgctggccgccggactacgcgcgcgcggatcgacgaggaggtccgcaagctcgacgggaagattgctgacgctgaagagaatttgggtgggattgaagtgcgtgaggcccatctagctgaatccttgtacttcataagtgtcaggcagaaggtaaattgtatgcatgcttggcgtctgtatgaagtgcatgacaatgcatccggaagcatcagctgttgccacagctattcttgatacaataagatctggagctgtttcacaacatcctgaagcatatgtcagaaggtctatgtgttgtttgcaacttcttgcaaattgatagcgctgcacctgatgtatgtctcatcagttcttatagaaagaaatcaggacattccaactggtttggaattgatatgcatatgggctcttcatgttgcagaagctgatcctgatacataatgcatatcagaatggaaaaacggaggaataggaaaaacgtaggattctgacaggaatgcaggtgtaaaacagaggattggaaaatacaggaaaaacacaggaataaccgtttgattggaccacaggaaaaacgcaagaatcggatgagagagatagactcaaagaaatttttccaagaggccaacatgaccagtttgcagctctattccgagatcttcagaaatcacgagcactggaatcggtggatcacaattcataccaaggccaggccagcagcagcagcagcaggtctctgccttgtaagctttgataccatcatacattcgcgaacttgatgatcaatgtactggattagaaatataaattcgatcaatgtatgataatttgatcaacgaatatatagttttgtg

SEQ ID NO: 17612 - DNA, 2658 bp, Oryza sativa
  ref <308>: DATABASE ACCESSION NUMBER: AK068045
  ref <309>: DATABASE ENTRY DATE: 2001-12-06
gagtcatcattcccacaccgccggcgagcaagccgattccaccgcgccgccgccttatctgcttcgccggccggcggctgctcgccggctaccttcctatacggcgccggctcggccagggcgtcgcgaggcaaggccgaggctggcctcatcgctcgcagccaaccagcagagcctgccggctgccgccggtgctatgcccgatggcgacgccctcgtcggcggcggccgccgccggaggaacggtggctgcatggggtttcttcggctcagaggactggaactcgtcatatctcgacaagtgcaagcagatcttatgtatagcagctaacaagtggtatgaacaaaacattggccaatgggatatctcaacagtctgaatattaatacagaagctatatttttctgaacttggaggcggcatccttgactgggaatcaagtttcaacccagtgatgtaagtagcaaagaccaactagtgatctgtcgaagctatccttcttgggctgtgttttcccctcttgttgagaatgccatttgttctggtggaagtctgcaagcttggtgtttcatgctggtgtcaggatgacatatggacattctgaaataaaatgaaggattggtgtagctatattccttgaggaatcttgaatctgtctttgaaggcttgaagctgtgtaagactgcattgtcgattcggcaaacttctgggcccttggtctttgaatctgtcttgaggaatcgctgatctgcaactacctgggtccatgatggatgtgtagagagaagcagtgtcggtcgatctgggctgagcctgcttcaatgttttaattggcttcttttttccagacagacatcaattgcagtgacagctttgcagttcacaaacctccatctatattcaccatagaatcaatccaatcacagtaacttgcacagatttacagttaatcaaaatacactgcacttctacaagtaaggtctcatcttccagacaagatgtctggtgtcattgtgcccaagctattccctgaccacgggtactgtgcgacgtatgggtcgaccccttcattgtgcattattgccagcaagctggagttcagggttgccggtgtaaactccggcagcggtgcatctccatcaagatgccgtgcagcttcgggtccactgtctctggcagcgaaccctggtgccagtgctggagaacccagtcaaccaacatctttcggccgtggtgcgcactgttgctgatcggccaccggccacaggtgacctcaagaaggaacgtgccgaaggcgaacacgtcggtgagaggggatgcctttcctgtgcgtgccagctctggggctatgaatcccatggttccaaccaggagcacgttgcttgctttgatgtcacggtggatgacaaccttgtcccacttctcatggaggtagaataagccagaagccacgtctttgatgatttgcatcctctgagcccaatttaaaacagatccttgtatgagaaccggtgtggcccgaactcgacctcccaatcttcccttaattccgcatatctctgctgcctcctcacaagtatcatgactacaatgaagatcaatgctacagcgacaattggcaataggatctgcaagatcttctgcaacctattatctccagggcaagggagcctcggcaacctggagatttcaataggcggagcaggagcattcatagcgaagctccatccaagcacgtagtaatgtgaggtgagcggacctgttgctgccgagaagccaatgtatgcttggtcagtgagcactgtggataggttgaaggggactgagagcagtggccgtgtaggtttggtcactttgatgggagccaaagtgacattgatctgtgtggtctctccatcgtagtccacccacacttggaccggcttgcagttgctgcccgtgagggtcaggttcttcaagagcccaccatgctggtcattgtagaagccgatgtgttgggatttcttggagtggaggctgttgatgtcgatgccgacgtggtagccatcgatatcgtccaactcggtgttctgggcggtgtcgatttccacggcgaacatgtggttgcttgtgctgttgtcgctgctgatgttgaggaggcccaagaactgcgccgccttggcatcggggaagcccttgtttggggcgacgacgaaggccatgccgtcggtgctcgcatcggagtacggggagatgatgccgaacatgaaggccacggagaaggattggactatgccattcgattgcttcttgaaccggagcggagttgggtagaatgcgtggccttggatattgggcatgctgtctgtcagctgaaggagccctgtggtggtgaccatggctgagccatcgagggtgaggttggctgcgccggtgctggcaaagccggagtagacaaagctctcttcgccggagctggcgcagaagggcccaagaaagctaacatagaggataaaaacagcactgaagagcacaggctgattctccatgtgtagcttgtgaagaaccaaagaattgagatgccaaaaggtacaaaggtgtttaggacttggctgtaccgggagcagtccaggtttcactcttatcatatatgaagctaaactgcacgaatcttctgc

SEQ ID NO: 17613 - DNA, 1231 bp, Oryza sativa
  ref <308>: DATABASE ACCESSION NUMBER: AK068046
  ref <309>: DATABASE ENTRY DATE: 2001-12-06
tgccttatctctctttctccctcccgggtctcttttttcaccttgctcggagcggtggtggggagcggcggcggcggcggtcgggagcggtggacggtggtggggacggcggtagggagcggcggcggcctggctgctctaccgccgccgcctcggctccatcgagttcttcccgcgggacttcgacgctgtggagcagcggaggtcttccaagaagtcgccgtccaagaagccgaccaaatcgccaggggcactcgacgggcatccgccgcgcctcgcaccgacgcggattcgcctcgcctcgttgccgcgtcaacacagatcctcctcgcctcgccacctcgctgacgtggataccttgctgcctcgccgacgtggatccgtcgtgcaagcaccgcccgcgggctcaccacgctgcgccgccgcgccccgacaaggattcgtcgtcggcctcctcgccccgtcgtagacatgcctggaaacgccggccgcgggctcgcctcgatgtcatcgtccgctggccgccgcgccccgatgcgaatcttcgagctcaccgccacatcgtgtggacgattgcgtcttggagagagacggcaattttgcgttccctctctcctcatatgcaaaatgcctcctctgtttgctttgtctgttggaggctgttttgcgttttgccttctctgttggagacaatctaaggcgtgtccacagggcgttggcggaagcaccgaccgtgagcttgtcgacggcgaggtgcaggtcatgcgcgacatggcgacacggagggcactgtcgaggcgggcagcggccagaaacgccgtggggaaaggctgggcctccgctaggtcgaggatctcgtcgatctcactgtgcagtcaacgccctcgtcgtcgggcccagcagccgcaagcgacgccctcgctgtcgggccctcgacaccgtacacttgccgccggacgccgccgtcgccagtgccgaggcggaaggggccgagaagaagaaaggagggagagagagaggttattaaagggaggggatgacatgtgggccagcttaactttttttaatttatttgatgactaggcggccacatgtacaccacgtcagcgaaaaccactcttaaaacagccgagggagtcgttttagacggttttaatagtttaagaagtcatcatatttggttttgtggtttaaggatatgaataagattcgacgtatatttaagggagcc

SEQ ID NO: 17614 - DNA, 2161 bp, Oryza sativa
  ref <308>: DATABASE ACCESSION NUMBER: AK068047
  ref <309>: DATABASE ENTRY DATE: 2001-12-06
gacaagctgagctagctaagagcgagcttcattaacatacgagacagagaggtcagtgaaggtagcaatggcggcagcctcctctgttcttcgttgctgcctcctcgtcgcagcactgatgacgctgtccgcaatgggagctgaagccatcacaaggcagtacctattcgatgtgcaaacgacgagcgtgacgcggctgtgcagcacgaagagcatcgtgacggtgaacgggcagtacccgggccccacgctgttcgcccgcgagggcgaccacgtcgaggtcacggtcgtcaactctccccctacaacatgagcatccactggcacgggatccggcagctgctgagcgggtgggcggacgggccgtcgtacatcacgcagtgcccgatccagcccgggggaagctacgtgtacaggttcaccatcaccgggcagcgtggcacgctgtggtggcacgcgcacatctcctggctgcgcgccaccgtgcatggccccatggtcatcttgccccctgccggcgtcgggtacccgttcccggcgccgcatgaggaggtgcccatcatgttcggcgagtggtggaacaacgacacggaggcggtgatcagccaggcgctccagaccggcggcgggcccaacatctccgacgcctacaccctcaacggcctccctggccccctctacaactgctcagcccaagacacgtttaagctgaaggtgaagcccgggaagacgtacatgctgaggctcatcaacgctgcactcaacgacgagctcttcttctccatcgccaaccacacgctcaccgtggtcgacgtcgacgcgctctacgtcaagcccttcaccgtcgacacgctcatcatcgcgccgggccagaccagcaacgtgcttctcaccgccaagccgacgtacccgggcgccagctactacatgctggctcgcccgtacaccaccacgcagggcaccttcgacaacaccaccgtcgccggcgtcctcgagtacgacgacccctgccccaccaccgccgccggcaagatcgtccccatcttctcccctacgctgccgcagatcaacgacaccaacgccgtctccaacttcaccgccaagctccgcagcctggccagcgccgggtacccggcggcggtgccgcagcaggtggatcaccgcttcttcttcaccgtggggctcggcacccacccctgcgccgtcaacgggacgtgccagggacccaacggctcccggttcgccgcctccatcaacaacgtctccttcgtgctcccggcgacggcgctgctccagtcgcacttcgccggcaagtccaagggcgtgtacgcctccaacttcccgtactacccgctgaacccgttcaactacaccggcacgccgccgaacaacaccaacgtgatgaacgggaccaaggtgctcgtgctgccgtacggcgccaacgtcgagctggtgatgcaggacaccagcattcttggcgccgagagccacccgctgcacctgcacggcttcaacttcttcgtcgtcggccagggcttcggcaactttgaccccatcaacgacccggccaagttcaacctctacgaccccgtcgagcgcaacaccgtcggcgtgcccgccggcggctgggtcgccatccgcttccacgcagacaacccaggtgtgtggttcatgcattgtcacttggaggtgcacatgagctggggactgaaaatggcgtggctggtgctggatggcagccgtcctgaccagaagctcccgcctccaccgttggatctcccaaaatgctaggaataaaactcaagatcatatcaatagtcaagattggttgcatttgcatcgcttcacacagaccccacttactgttgtccgatcagatatatattttgctgcttcggtttctcatcgtcgatcgacatgcgtgcttcatttgttgctttttttgataaactgattttctcatgcaattgacagtgtgtttgtcagctagctccggtatttgcatgaagtttcaatttctttcgtattttgaggaaatttgatttctttgattggcagggcttgactcttaggactgcttactgtaactcaaagcgatcgcttgctttgcatcttgtaatgtatcccagtgtattttggtgcaataaaatctagttctggt

SEQ ID NO: 17615 - DNA, 1858 bp, Oryza sativa
  ref <308>: DATABASE ACCESSION NUMBER: AK068048
  ref <309>: DATABASE ENTRY DATE: 2001-12-06
ggctcatcatctcatagttagtaagcttagcaagcatagctagcaatattggcaatggcttccaagtcattgtttctgcttggtgcggttttagcctcactcctactcgttgcacaagacgtctctgctgcgagagaactcgcagaagcaaatgaagctaaagggaagaacatgaaacaagaagtagcttatggccctcaagatgagaagctagcacatcatgctgacggatatggacatgggggaggctatggtggtggcaatctgcttggcgcgcctaaagccatcgccgccgccgtcgacgacgccgacggccagctcctcctcctcctccgagtccccatcgatcagcttggtgccccgcatgacaacgactacttggtctaccatccggatcccccgtctccgaaactggatctgctccccaacccgcctccccctaccctcggtgaccaccagctcgccatactcagctgcggcgacgaccgctacgtcgtggccgccctccacgtctggagtgagttcacttccacgctgcgcctgtacagatcttcttgttcgtctgggagttggacatcggaggaggtgtccgtggaggagccggtgagggacaggctgtgcccgatcccggactcagccaagaggcagctgtaccacgtcaccaccaagaccatcacgctcggaggtgcgaagggcaccgtgggctgggttgatctctggcgcggcatcctcctctgcgacgtgctcgacgaaatgtctccaaggaagctccgcgacatgccgctgccgtggccggccaagggcaattggaggatgtacctcaatggagatgtgtccttttgtcgggacatcgccatcagccaacacaaggattccatcaagtatctggagatggagatcgtttcaccaagaacggtgaccaccaccatacccacctccacctctgcagatcctacttcataccttgaatgggttcgccgcagcagagaacctcagccgacacggcgacgctccgtgttccaccctggttcgtggagaatcactacatggagcatgcctatcccggtcacttcatgggacgactggcgccgtgactgcactgctgaatcgcgtgaagtccatcttgacaccaacccaagtcaccattacgagttgcttcatagcctcatgctcagcaacagcggtgatgaacacagggaggaggctcaaggtcaaggggcaacctcttccttgtccctaggtcgcctgcgtttgtgttacccggccttgagttgcatcgatgatgatgttgtttacctcttgggcaacgctgctggcaggggtgctaagacgggaggaatgatggtcgctgttgacgtcaggaacaaggagctgcgaggagtggccaagcttgaccccgaaaagaacaccctctactccatgcgatgctaccttgcaactgggatctccaaacgcctcaacactaccacagacacaagagttggacgacctgaggaggatgcagaagccgccgagtagaatgtgcgaacccagtgacatatatgcatcatactgcagcctgcctggatgcaaatattatcgtatcagtggtttgttggcttgaatgggggttaaggagttgtgctgttgctgggcatatatagttttgtgacaagaatcttatccaggttgcttactttgggttgatgataaaagtaggagtagacgtgaataacattaatatatgttggcttattttttgaggggatgttggcttatttatgtggcactaattgtctttatgccttgagttaaacacaaaacaatgatccaactctttgaacgtgtttgtttcaagtaatgagttgatgaatttttc

SEQ ID NO: 17616 - DNA, 896 bp, Oryza sativa
  ref <308>: DATABASE ACCESSION NUMBER: AK068049
  ref <309>: DATABASE ENTRY DATE: 2001-12-06
ggctgatgctttttaatcctcttcttccccggcccatgcatattctctctgctttaatggtgtgaaatttcagaacaagaatctagtttccgcatacagagttccagaaatttccgactgttcatctcatcgatcatccgcgattctttttttagtttttgatggtgatcagccacaccgctagctagttgacacatgtatgcagtagcaatatttgttagctgaaaaggaagcaaggaggaaagcagcaaatcagctttgttgccaagctgcttggcagagagacaaagtaattgaccatggcaaaagatcctcatgtctccatctctctcaccggcctcgccatggtcgtcctcctcatcttcagctcctccttcctccaggccgcccaaggatcagacaagaagatggcaatgaagtacgacgtgccggtgaagaggctggtgtaccggccgtcggcgatgcaggcggcggtgatcggcacggaggcggcggcgtacgagccgttcgagctgtgcatgggctgccggtgctgcgcgtcgtcgaacgcgagcagctgcgtggacacgagatgctgctacgccatcgactgcaacatccccggcaagcccttcggcgtctgcgccttctctccccacacctgcgactgtggtgccaccaactgcaccagccaacagcagccatgaccacacacctcttgctgctgctaattcaattcgatctcttccatgatcaatatacttatgcgcctgaatcattcaactgttttctgatgcgattgcaaacgtattaagttttttcagagattcttgggacttagatatcctgacatgagcatgttgatctgaaagtttaactgcatatagaatcttcagaaagggattaattcttgatct

SEQ ID NO: 17617 - DNA, 927 bp, Oryza sativa
  ref <308>: DATABASE ACCESSION NUMBER: AK068050
  ref <309>: DATABASE ENTRY DATE: 2001-12-06
gatttttctctctcccgtgtggtcggagctcactgcagcggcggcggcggcggcgaacgaggggggagagagagaggtcgaggtagagaggaaagggagaggagggcggaggaagatgagcgggaacggcgtgaagaaggtggcggaggtggccgcgaaggccgggaaggcgatcgactgggaggggatggccaagatgctcgtctccgacgaggcgcgcaaggagttcaacaccctccgccgcaccttcgaggacgtcaaccaccagctccagaccaagttctctcaggagccccaaccgattgactgggagtactacagaaaaggaattgggtctaaagttgtagatatgtacaaggaagcttatgaaagcattgaaatccccaagtacgttgacaccgtgactcctcagtacaagccaaagtttgatgcgctgcttgttgagctgaaagaagcagaaaaggagtctctgaaggagtcagagaggatagagaaggagcttgctgaattgcaggagatgaagaaaaatatcagcacaatgacagcagatgaatactttgcaaagcatcctgaggtcaagcagaagttcgatgatgaaatccgtaacgacaactggggctactgaagagtggaggaactctttgtttccctttcttggaagagttaataattttgtcttgtgtcccagagtgtatgtataggggaatccactatcgcaacaatggtggtttccataccatgtggatggggcctgtttaaactcccaaactgattctaccatgtcgtccgtgctgcagttccaactgaatttgcttgtgttggacctcttcattttctagagggttgacccttaagaagtttatgttttattgtttttgtgttcatctccgttctacatgaataaagatgatcaattgttgaaagatt

SEQ ID NO: 17618 - DNA, 2511 bp, Oryza sativa
  ref <308>: DATABASE ACCESSION NUMBER: AK068051
  ref <309>: DATABASE ENTRY DATE: 2001-12-06
gaaggagagggcaaagaggggaaaagaaaaaaaaaagagataaaaaaaaaatctcctcctcctcgccgccgccgccgccgccgccatggacgcctccgccggaggcggggggaactcgctgccgacggcgggggccgacggggccaagcggcgggtgtgctacttctacgacgcggaggtggggaactactactacgggcaggggcacccgatgaagccgcaccgcatccggatgacccacgcgctgctcgcccactacggcctcctcgaccagatgcaggtgctcaagccccacccggcgcgcgaccgcgacctctgccgcttccacgccgacgactacgtcgccttcctccgctccgtcacgccggagacccagcaggaccagatccgggcgctcaagcgcttcaacgtcggcgaggactgccccgtcttcgacggcctctacagcttctgccagacctacgccgggggatccgtcggcggcgccgtcaagctcaaccacggccacgacatcgccatcaactgggccggcggcctccaccacgccaagaagtgcgaggcctcgggattctgctacgtcaacgacatcgtcctcgccatcctcgagctcctcaaataccaccagcgtgttctctatgtggatatcgatatccaccatggggatggtgtggaggaggcgttctacacgacggacagggtgatgacggtctcgttccacaagtttggggattatttcccggggaccggggacattcgcgatattgggcactcaaaggggaagtattactctctgaatgtcccgttggacgacggtatcgacgacgagagctaccagtcgttgttcaagccgatcatggggaaggtgatggaggtttttcgccctggcgcggtggtgctccagtgcggtgcggactctctgtcgggtgataggttgggttgcttcaacctgtcaatcaggggccacgcggaatgcgtgagattcatgaggtccttcaatgtcccgctgttgctgcttggtggtggtgggtataccataagaaatgttgcgcggtgttggtgctatgagacaggagttgcacttggtcatgagctcactgacaagatgcctccaaatgagtattttgagtactttggtccagattatacacttcatgttgcaccaagtaacatggagaacaaaaacacacgccagcagttggatgatataagatcaagacttcttgataatctttcaaaacttcgacatgctcctagcgtccaatttcaagagcgaccccctgaggctgagctacctgagcaagatgaagaccaagaggatcctgatgaaaggcaccatgctgattctgatgtggaaatggatgatgtcaaacctttggatgactcaggaaggaggagcagtattcagaatgtgagagttaagagagagtctgctgaaacagatgccgcagatcaggtatttttctattaaaactcattgaagtaatgttatgtgctggtggtgacagttgttatggttaatgtgtgctcaaaggtgtgtaagcagctatactttctttcatgaatagtgtattctgctgtttgttcctttctgaatggttgttgcatcttcagagagcatattgatattaaatagccgtggactgcgaaagacatcaattgtgagttgatgtgttgtgatgttgaatattttgaattttaatccttgctgtagcgacagttctgaaatttatatactcaacttttcaaattaaacactaaggattggaagagctgaatcatcatagcgaagtaaaggacaactattatgatgtgactatacaacatgaaaatctaatttcatttttctggataatgcatcagtaccatattcgtttgtctgtatcatggtttcttttatggtcctcgggtgttggtattagtttttcaaccttagcccttaattttagttaaggttgtaagatgaatgaagctatataggatccagcattgtttgattcttgagagtcagatatttaattcagatttctcaaatgttctgatgcacatttgcacccggttgggacttatttctaatagtaattctatttgataagtgatttgcataggcttcaaaagtataatttgacagtttgaccattaacttctcttacaatatattgtcagtggcaacaaaaccaattcatgtggaagcacttccgaatatgaatccactggtacaacttttgtacagtaaacttgcaaatataatttgactcattgttggttagagcttacaaaatttgacttttcaagtacatggacgagttagggcaaagggaataccttttctttgcaagtgcaaatctaatttatcaattcactgtggttatgtatatcaaataatttcctcggacttgtgaaagtttgatgctcccatgttctaccgttggtcttttgctgttggtgcagttctagtaaaagaattgttgcattgatcatttaacgtcttatagtgaatcctttattggcacc

SEQ ID NO: 17619 - DNA, 2354 bp, Oryza sativa
  ref <308>: DATABASE ACCESSION NUMBER: AK068052
  ref <309>: DATABASE ENTRY DATE: 2001-12-06
ggggatagcgcgaaatggatttttcaaccgggtttagatcaattacctttcaccttctcgtctagaccagccaaagccatagccgaaactcacggtcacggtgcgtccatggatttcggaccttgcaacgatacgctcgacaccgaactgctacacgtgctgacctccggcgacgaggtccgcatggcggacctgctgggcagagaacgccgtggccatggccactccctgtcccaggtggcgatacgcgtcgacgacgacgacgacggccgcgcgccggcgggagcgagccgcctccttggcgtgacgacgggcaacggcaacacggcgctgcacgtggccgccacccgcgggcacgccgcgctcgcggcgcgtggtctgcgcgacggcgcccgcgctggccgccacgcgcaacaggttcctcgacacgcctctgcactgcgcggccaagtccgggcaccgcgacgtggcggcctgcctcctgtcagagatgctgcgagccggcggcgcggcgtcagcggcgctgccgctgcggcgggcgacgaactgcctgggcgccaccgccttgcacgaggccgtgcggaacggccacgccggggtggtggctctcctcatggcggaggctcccgagctggcctccgtggccaacgacggtggcgtctcgccgctgtacctggcggcgacggttggctccgtggacattgtccgggcgctgctccacccgttgcctgatggaacgccctcgccggcctcggccgctggtccggacggacggacagctttgcattctgcggcaactactggcaaagaaatcgcgcgagaaatactggactggaagccagagggtcgaacactgctaaccaaagctgattcgtcgggcagaacacctctccactttgctatatcatcacaaattgagcggtttgacgtgtttcagctgttcctagatgcagagccctccctagctctggtttgtgatatccaaggatcatttcctttgcatgttgctgctgtgatgggcagtgttaggatcgtcgttgagctcatacagaaatgccccaacaactacaacgatttggtcgatgatcgaggaagaaattttctgcattgtgctgttgaacataacaaggaaagcatagttcgctacatttgccgagatgacaggtttggtatcctgatgaatgcaatggacaatgaaggaaatactcccctccatttggccgccgagtatgggcacccaaggatggtcagtttactcttggagacgatgagcgtcgatgtagccattaccaacagggatggtctaactgctgctgaccttgcttatcgccatctgcaacctggtttgcactattttctggtaatggaacacggttcagttcattagttcatcacaattggttatcacgcagctgcagagaatcgtttcatgtgctgtcctgtttacttggccaattaatctgtcttctttcttgtgataatttttgtgtacagaatcctcgagccgtggtaaagaatctcttctactgcaccagagcaccggttaccctagaaggggatcatgctaggactggcatcccatcggccatggaggatgccgatgctcccaaggacagtggtggcgtgacatccaccggaacagtcgcgtccgtgctgatcgccacggtgacgttcgcggcggctctcaccgttccggggggctacgtcgccgacgaccacccgaacgccgggacggcggcgtcggccgggcggttcgccttcagggcgttcgcggtgtcggacaccatggcgttcctctgctccatcgtgggcacctgcctcctcgtcgtcggcgaggcgagggaggtccggccgagcaggggccgtctccgcgcctaccaggggtcggcgtgggcgctcgtgacggccggggcgcagttcatggtcgccgcgttcgcgttcgggctccaggtcgcgctcggcggcggcgcggacagccggtggctggtggtgttcgtccacgcgctgtgctcggcatcggtgctgctctgcttcccgggcatctgggcgccgttctgcctcgggaaggtgatctggaggcgcgccggatggcgagggctcacgaatcttcaccggtgtccgtccagtttggaagagttcttgtggtgtttcgtgacaagcttcttggccaaaactctcttgcggacattcctcccggtgcttatcgcggtcaccttggtcgtcgccatcgtgctaaatattgcaaagcccaactgctgagtcggcaagaatttgaggatcggaagtcgttagtactagttggagtatattattatagcgtatgtgttgaatgagttttgacgtatttgcctgcc

SEQ ID NO: 17620 - DNA, 2365 bp, Oryza sativa
  ref <308>: DATABASE ACCESSION NUMBER: AK099035
  ref <309>: DATABASE ENTRY DATE: 2002-08-28
ggccgcggcacaccctcccacccccacctccgcctccgcctccgcagccatgcagatgcaggcggccaccaccaccaccgccgcgcgccgcctcgcgccgaagccgcagccgcaggccaaccggtgccgcccctcgagcgtctccgtcgtcgcggcggggaggtcccggaggaggagcgcgcgctcctccctcagggcctccgcctccctcgaccaggaggtcaaggagcgcgcctcccccgccgctgggaagagtggtcaagcaactagaagagatgtgaggaatatagcaattgttgctcatgtcgatcatggaaagacaactctggtggattcaatgttaaggcaagccaaggttttccgagacaatcaagttgtacaggaaagaataatggactcaaatgatctggagagggaaaggggaatcactatacttagcaaaaacacttcgataacttataagggtactaaaatcaacatcatcgatactcctgacattcagatttcggtggggaggtggaacgcgttctcaacatggtggaaggagttctcctagtggttgattctgtagagggacctatgccacagacaagatttgttctgaagaaagctctagaattcggacatgctgttgtagtggttgtaaacaagattgacagacctactgctcgtcctgagtttgtggtgaattcaacatttgagctatttatcgaattaaatgcaactgatgaacagtgtgattttcaaacagtctatgcaagtggtattaaagggaaggctgggttatctccagaaaatttgggtgacgatcttggacccctttttgaggcaatccttagatgcataccagagccacgtattgagaaagacggtgcactgcaattgcttgtgtctaatactgaatatgatgaacataaaggacggatagcgattgggcgactgcatgcaggagaactgcagcgaggcatggaagtgaaggtttgtacaccagatgatgcttgtagaattagcaaaataagtgagcttttcgtttatcagaacttcagccgagttccagttgataatgttagtgctggtgacatttgtgcagtatgtggaatcaatgatatcatgattggggaaaccatagcagataaagtttctggaacacccttgcccaccatcaaaatagaggaaccgacagtcagaatgtctttttccatcaacacttcaccttttgtcggtaaagaggggaaatatgtcacaagccgtaatctccgtgataggttatatcgtgagcttgaaaggaacttagctatgaaagtagaagacggggaaactgctgatacatttcttgttagtggcagaggcacactgcacctcactatattgatagaaaacatgcggagagaaggatttgagtttatgattggacctccaaaggtcattaacaagacagttgatggaaagctgcaagagccttatgagatagctgctgtggaagttccagaggaatatatgggttcagttgttgagcttttggggaaaaggcgtggacaaatggttgacatgcaacctagtgggccagagggaacaacattactaaaatacaagattcctactagaggcctcattggactcaggaatgcagttttgacagcatctaggggcacagcaatactcaacacaatttttgacagctatggcccatgggctggagatcttagttcacgtgatcaaggctccttggttgcatttgaggatggaagtactacatcgtatgcacttcttaatgctcaagaaagaggtatactatttgtgagtccaggacaggatgtttacaagggccaaatagttggtatccatcagcgaccaggtgatttagcaattaatgtgtgcaagaaaaaggctgcaacaaatgtccgctccaacaaggaaactacagtggttctcgatgaagcgttaagctacagtctggacgactgcatagagtttattcaagaagatgagctagtggaggttactcctgcaagcatccgcatgtgcaagaacccgaaagtttcgaagaaaaaccgataatgcagtggaggttactcaagcatcctgcaattttttggagctgctttgctttgcaagagcagactcagatataagattactcaattttgcaatgattataagttgccaaattattatctggattcctcattggacagagaagctttgggtagtattctaggctgcagatacatattctttcacagcgatatcagctgtgttacatgtttgtaggccacatagataccatatatacaagattcatgcaactatactccttgcaatgatctttacaaccaattaatggattacatatattactttactg

SEQ ID NO: 17621 - DNA, 2361 bp, Oryza sativa
  ref <308>: DATABASE ACCESSION NUMBER: AK068053
  ref <309>: DATABASE ENTRY DATE: 2001-12-06
gagattcgcctctccctcccgaggccttggccggcgcgaggtcgaggagaggaagctcccatggcggaggaggcggcgcaggagcagcagacggaccccgccgcctcccgccccgtccgctgcatcgtcaaactcggtactcgcgcgcgctccgtcgctcccttgtttcctctctgctcctctttagcagcttcgatggcgcaggtggagcggccatcacgaacaagggagagctggagagcatcgacgcggcgagcttgcggtcggcgtgcgcgcagctgcggcaggccatgtcccacggcggcgcggcggggaaggttgtggggatggactggagcagacggcccggcgatccgaccggcccggtcgtggatgtggagggcttgtcggagatgggaggcttggggctcgactccaacttcgtcgtcgtccatggtgccggtatgcatggctcctcatctgaactaacaactgtgcctatctgtcattttgtattgctgatgagttcatgagcagaactgggggatcggtggtcggttgggatctggagacgataggatcagcttgattgctgtattttggtttcagaatactactacggctaagtgaaaatttggtgcgaaactgtgaaccaagtaccattctcaatgtgtatcaatgacaagcaattgtaaacattgttcacgacctgcttaaccggtctatattcggaacgtagctgaccttcgtggaatatatttgaataaatctgttttgattggtagacaccctgaaaatatagttttagatcatagaccatcgggcccggcttttatagaaagccagaagcggcacagtggtgggggagacccacttacaagagttcagcacaaaaacacagaaacagggcagaaaccaaaccatgccaagggatacaaaggggttgaagctaagcgaccaaaagcaaaagacaactcaggcacctctaaacaactcaacagataacagctaaccaacagcaccacagaaaaagcatcagtgcttaccctactccagctctgggaggaccaagggaggagactgcttccataagtttgctagccatggcctccagcttctcagcatccttcctgcttaggactttccactgcatcaataaagatttgatttgaaaatgtagtcctaggcaaccaggggagaataaagaaaatagctcacacttcatgatgcctgtaatactggccgactataattggcctgttgtagtttaaaggatacagcccacgattttggtggtgtaatagctgactacctacatctgctacctcagggtcttttggtcacttccaagcaagtagatctggagtccataaagggggtcttcattcaacacttgtgaaggctggctttgtggctacaagaatttcagtcacttctctcaaccaggagattgttagagctcttgcaagagaaggaataccgtctgttgggatgtcaccgtttgcttgtggatggtctactaagcaaagaaatgtgagaaagcaaacaattaactaaatttcttctgtttctttggacatggacttgacattgcaaagttcttgaagatctatgtctaatcctatcaacagagatgccctttgattttttaccttccagttttgcacttacagcttgaatcagtggatgcttctcaaatcatgctatcactccatgttggctttgtccctgttttgcatggagatgctgttcttgatgaattgctggactgcaccattttgagtggggatgtcattatacgccatcttgcacagcttctgagtccaaaatatgttgtatttctgacagatgtccatggagtatttgatcgtcctccatcagacccgaatgcagtacttctcagagagatagcggtggatgaaaatggcagctggtcgattgtaaaaccagcattgaaaggcaacaagaaaggagtggagatatctgtagctgcacatgacaccactggcggaatggagaccaaaatattggaagctgctgcgatagctaggcttggagttgatgtgtatattacaaaggttggtacagaacattcactgagagccttaaaaggggacacgagctcagaagattggcttggaaccgtcatacgatcttccagatagaattcttggcctatcattttcgggagtaagcatccattggcaaatattttatcaccattattgtaggacgattgtgaagctatgagctgatcacctgtcaaatgattcatggggttattattgctgaatctcatagcagacaatgaggcagagctcggtgttatgctacaagtaacagtcctacgacattataataagtaaccttattttgtttgct

SEQ ID NO: 17622 - DNA, 2143 bp, Oryza sativa
  ref <308>: DATABASE ACCESSION NUMBER: AK068054
  ref <309>: DATABASE ENTRY DATE: 2001-12-06
tggggacgtgccgctggtgccagtgccaacgacggcggccgacgacgacgcggcggcggggtcgccgtcgccgtcgccggagatggagatggaagaagacggcggcggcggcaaggtggtgtacgtggcggtcagcggcaacaggaacaaggcgctgccgacgctgcggtgggcgctgcgtcgccacgccccggcgccggaggggaggaagaagaccgcgctgctggtgctcgtgtatgtgcaccggccagccaccatgatcccaatcttcagagcaaaggtgccttcaattgttctcaaggatgaaatagtcacttcttaccggcagcaagagaggaggattactgaaaaatttctccaacaatacctggacatctgcacatctgaaaaggttcaagctgaggcattcatgattgcgaatgacaacattgcgcatggcctcataggggcaattcaagagcataagatcagcacactcatcatgggagctggcatatatgggaaaacaagcaatctattctccatcaggcccaggactacaagcatccccatctctgtgaatagtgatgttcctactatggcaggttctcacataccttggttcagcttcattcctccttggcaccatgatgaccgcagcagcgtcacatcttcttccttcctcaccgactcgcaaaccatgaccgacaatgggcttgatccagaaaatctagaccaccaattcttcgaaaatgcgatgcccatgttcgattatgacagcttcagccttatcagacatgaatccctccatggcctaaatgagatagctagccagatcatactgtctggccattcacagtacttgcgccagttgaatttcgatgtaagctgcaatgaggaagtaagaaaccgccagttcattcacggtatcgactcgatcctcggagtcgattcgatgaaccttgagaaggtgtactggaaggcctacatggaggacaagacaatcaagtggatttatctactggagtacatccataagattgtatcagtctcactgaagcaaatccaggagcagcatgatggtgcctctagtggcctgacacttgaaggcctctcagatgctgcaaccaagcctatcaatcgattgctcacatttgcgtcggcggtcagtaaggtgaatggttcgccggagaagctcttccatacgttgcagatgcacaaggcattgtcagaagcttctccgatgatccaacaagccctcttgggagaacagaaagagttcttcgtcagagagcttcacagaattcttgacacgctggaggactctgcaagggaaatacttggtaagctgaaagtccagattcaatcacatgattcaccgatcataccaggaggcagtgtacacttggttacaacatacctcatgagatatatcacattgttggcacataacaccagctcactgaacaccattctaggtcatgatcatagtgaccatctgttggcagctgacggaatcaacttgctgttgccaagccacctaatttctggcttgatattcgatcttggctcgatgcttcagaagcagtctaagctgtacaaacctgaaggattgcagtacctgttccttatgaacaatgagcattttattcttcagcactttgagcgggaagacataaaacttatgataggaactgagtggattcaaaagtactgtcataacatcaaccgatacaaagtgaaatatatagaagcaacatgggctactgtggtatcttgtttggacaagaagatcagcatttcactaaattttctgcaaccttcacccttgaaagaatttatttcctctttcgaaacagagtatagactccagatgcactggaaggtccctgatccaaagctccgtattgagctgagacaaactgtctgtgactatgttctgccagcctattgtgaattcatggagaagcatccaaatttagagaaatcaggggacaatcttgaagatatcaggaacaaattaaatgaactgtttgaaggatgagttgatacttttatgattacaaaaacaaattcttacttgttctcttgttccttcaattcatgcaaggaaaattgtaacacatactaattcaatgattgttaaattaacttttcattatgc

SEQ ID NO: 17623 - DNA, 2094 bp, Oryza sativa
  ref <308>: DATABASE ACCESSION NUMBER: AK068055
  ref <309>: DATABASE ENTRY DATE: 2001-12-06
gtacggaggcgtaataataatcaggttgagctccagcatccggggcacggggaggaggaaggagggatcgggggatccatggcggacaccggcggacggccggaggtgtcgctggccacggtccggtcgccgggccacccggcagcttctacgacggcagcggcggcggcggatctcggccacgctgacaccgggcaagagaagcccaccgtcgagagcgcccaaccggcgaacggtgccgctccgatgggcgagtgcggcacggagtacaggggcctccccgacggcgacgccggcgggccaatgccgtcgtcggcacgcacggtttcgatgatcccgctcatcttcctcatcttctacgaggtgtccggcgggccgttcgggatcgaggacagcgtgggcgcggccgggccgctgctcgccatcatcggcttcttggtcctccccgtcatctggagcatcccggaggcgctgatcacggcggagctgggcgccatgttcccggagaacggcgggtacgtcgtgtgggtggcgtcggcgctcggcccgtactgggggttccagcaagggtggatgaagtggttgagcggcgtcatcgacaacgcgctctaccccgtcctcttcttggactacctcaagtccggcgtcccggcgctcggcggaggcgcgccgagggcgttcgccgtcgtcggcctgacggccgtgctgacattgctgaattaccgggggctcaccgtcgtcggatgggtggcgatctgccttggcgtcttctccctcctcccttttttcgtcatggggctcatcgcgctccccaagctccggccggcgaggtggctcgtgatcgacctccacaacgtcgattggaatctgtacctgaacactctgttctggaacctcaactactgggattcgatcagcacgttggccggcgaggtgaagaatcccggcaagacgctgcccaaggcgctgttctacgcggtcatcttcgtggtggtcgcctacctgtaccctctcctcgccgggacgggagccgtgccgctggacagggggcagtggacagacggctacttcgcggacatcgcgaagctgctcggcggcgcgtggctgatgtggtgggtgcagtcggcggcggcgctgtcgaacatgggcatgttcgtggcggagatgagcagcgactcgtaccagctgctgggcatggcggagcggggcatgctcccgtccttcttcgcggcgcggtcgcggtacggcacgccgctggcgggcatcctcttctcggcctccggcgtgctgctgctctcgatgatgagcttccaggagatcgtggcggccgagaacttcctctactgcttcggcatgctcctcgagttcgtcgccttcatcctgcaccgggtgaggcgccccgacgcggcgcgcccatacagggtgccgctgggcacagccgggtgcgtggcgatgctggtgccgccgacggcgctgatcgccgtggtgctcgcgctgtccacgctgaaggtggcggtggtgagcctcggcgcggtggccatggggctcgtgctgcagccggcgctgaggttcgtggagaagaagcggtggctgaggttctccgttaacccggatctcccggagatcggcgtgattcgcccgcccgccgcgccggacgagccgttggttccgtaggacgcccagaaatcagttaggccctggaactggaaaatggacaatttggattgcagtccaactatagggagaaaatagaagtcctgcagaatcatgtatacgttgcaacaaaaagaatttaatccaacgaaatccactgaaatcaacggaagcactattctgttggaattttggagaaatttttccatgagttcaaagctctttctttgttttgaatgaagactgtgagttcaaacctcgtcttcacatcttattgctgctcatgcaatcccgtgcttgtcatgtattgcattaaggcattttttttacaggaatcatggcaccttagttacatgtgttgtaaactttcaatttgtgttttttttacctttttcatttaggatttaaaaaggtggtgcactaatattaatattcaattgg

SEQ ID NO: 17624 - DNA, 1651 bp, Oryza sativa
  ref <308>: DATABASE ACCESSION NUMBER: AK068056
  ref <309>: DATABASE ENTRY DATE: 2001-12-06
ttggcgccgcgcggtgacgagacgacgcgagtagtgcgaggtggagaagacgagccgacaccaccaccaccaccaccaccacgagaggaggaagccgcgggtctcctcgtcttctcctctctctctctcctcaaccagctgtctcgcggtcgccggcggcggtgaggggaggaagcggggctgcctcgcgcggcgggaggtctccggagagggaggggtgtcgtgctgatttggggggctgcggcggtgtcggcggcgatggggtgggcttcctgctgcaagggggtggacggggttctacctggccggaggaagaagaagaaggagacgacatggcggatcttctcgctgaaggagctacagtcagcgacgaacaatttcaactatgacaacaagcttggtgagggtgggtttggcagcgtctactggggccagctctgggatggatcacagattgcggtgaaaaggctcaagagttggagcaacaaagctgaaactgaatttgcaattgaggtggaggttttggcgacagtgagacacaagagcctgttgagcttacgtggctattgtgccgaaggccaagaacgcctgatagtctacgattatatgccaaacctgagcttgcactcccaccttcatggacagcatgcagctgaatgccatcttggttgggaacgaagaatgaagatcgctattgattctgcagaagggattgcatatcttcatcaccaagcgacaccacatatcattcatcgggatatcaagtcaagcaatgttctgttggacaagaatttccaagcacgggttgccgattttggttttgcaaagctcattccagatggtgcaacccatgtcactacaaaggtgaagggtacactcggttatcttgcaccggaatacgccatgcttgggaaggcctctgaaagctgtgatgtcttcagctttggagtactgctgctagagcttgccagtggaaagaggccagttgagaagctaaaccccactacgaagctaactatcacggagtgggcacttccacttgcccgtgacaaaaagttcaaggaaattgctgatccaaagctcaaggatgtcttcgtcgaggctgaactgaagcgaatggtgcttgttgggcttgcatgcagtcagaacaaacaggaacagaggccgataatgtctgaagtcgttgagctgctcaagggagaatctgctgagaagctttccaacttggagaatgatgagatgttcaagcctgatctgaccagctccttccaggactcatctcattcgtctcatcctgatagttcagactgcatcacagaagagaagaactcaaaagcagatacaatagacgaggcagttgattcaagtgagacagtaccttcagctaggtagtttgatgcatagaattataagttatctgtcattcatcagcaggagttattggtttccttccgtggagcattgtgtgtttacctctgcatgcgtgtttatgccttgtttaccggcaggtttgggtgcttcccttgtcatctcacagatatacttatctgtgtgtatggttaattgttacaatctgttttcggtatggttgtaccatggcttgtaaaattctgcatatctggtgctgatccaaagttaacatgttgttccc

SEQ ID NO: 17625 - DNA, 1136 bp, Oryza sativa
  ref <308>: DATABASE ACCESSION NUMBER: AK068057
  ref <309>: DATABASE ENTRY DATE: 2001-12-06
gagtcacgatatcctcgaaaagaaaaaaaggggagaaaagaaaaaaaaggcaaccacctgaagcgtccgttgggtccaggaattacgtcgagcacgacgcggcgcccagctgtaccgtctgaccagtaggccccacctccccgccgtcgacatgcacccgccggccgccgccggaggagaccacgccacggcggcgccggcccccgcgaccggcgcagccgcagcaacagcgtcggactacgcgcactacccgaggctctcgccggaggacgtggccccgcccccccctccgtcctaccacgctgccgcctcctccgcgccgccctactcgggcaacccctacgtctcctcacccgccggcggcgtcgcgcccgcctccaagaatacaatggatacggtgaaggatgttctcggcaagatggggaagaggtttggagaggcggctcgcaagacggagaccctcaccggcaacttctggcaacacttgaaaactggaccaagcattacagatgcagcaatgggcagggtttcccagatcaccaaagtcatagcagaaggtggatatgataaaatcttccatcaaacatttgatgtcctccctgacgagaaactgaagaaaccatatgcatgttatctgtcaacctctgctggtcctgtcatgggtgtgctatacctgtccaataaaaagctggcattctgtagcgataatccacttgcttacaaggttggagacaaagatgagtggagctactataaggttgtcattccccacacccaactgagatcagtgaatccttcaacgagcagaacaaatgcatctgagaaatacatccaggtggtttccgttgataatcatgagttctggttcatgggcttcgtgtactatgacagcgccgtaaagaatctgcaggaagcacttcaggaggctcagaatctacgagcttagtgatgtccatagattggggatagcaagcccaacatattacagtttgtgatatactctgtgtttcatcaaattggcagtcgtctgtattttgttggataggtgttggcatttcttgcaatgtgtaccgacttgaaacggtttttgatatgtgacatcatgatctctcgatagttactctctgttgttgtcg

SEQ ID NO: 17626 - DNA, 1988 bp, Oryza sativa
  ref <308>: DATABASE ACCESSION NUMBER: AK068058
  ref <309>: DATABASE ENTRY DATE: 2001-12-06
ggcactcctccctgcatgcaagctcctctatctagctagctactctactctactcgatcaagatcaagatctatcatggacgcagcagcagccatggagaagcagcagcagccgggcgagaagaagatcaccggcggcgaggaggaggaggaggaggaggtgatcagcagcgtccggtaccgaggatggaagtcgatgccatacgtgatagggaacgagacgttcgagaagctgggcaccatcggcaccaccgccaacctgctggtgtacctcaccaccgtctaccacctccccagcgtccgcgccgccaccctcctcaacttcttctccggcaccaccaacctcgcccccctcctcggcgccttcctctccgacaccttcctcggccgctacaccaccatcgccgccgcctccctcgcctcctgcctcggcatgcttgtgcttaccctcaccgccgccatcccatctctccaccccccaccttgcactgcctcctcttcctcgtcgtcgtgccagggccccacacacggccagctcgccgctctcctcgccaccttcgccttcctcgtcgtcggcgccggcggcatccgcccctgcaacctcgccttcggcgccgaccagttcgacccgcgcaccgactccggccgccgcggcattgccagcttcttcaactggtactacttcaccttcaccgtcgccatgatgctctccgccaccctcatcatctacctccagagcaacgtcagctgggcgatcggactcgccgtccccgccgccctcatggccatctcctgcgcgctcttcttcatgggcacccgcctctacgtccgcgtccgccccgagggcagccccttcaccagcttcgcccgggtcatcgtcgccgccgtccgcaagcgccgcgtccccgcaccggcctccgccgacgacctgttcgacccgccgcaccagagcaagctggtggccaagatcgcgtacacggaccagttccggtgcctggacaaggccgccgtggtgacgccggagtcgagatcgagcccgtggcggctgtgcacggtgcagcaggtggaggaggtgaagtgcctggcgcggatcatcccggtgtggtcggcggggatcgtgtacttcatcgtggtaacgcagctgggcacgttcgtggtgctccaggcgctgcagatggaccggcggctgacgaggtggtgggcgttcgaggtgccggcggggtcgatggtggtgttcaacatgatggcgatgacggtgtggatcccggtgtacgaccgggtggtggtgccggcgctgcggcgggtgacggggaaggagggcgggatcagccagctgcagcgcatcggggtggggctggtgctgtcggtggcgacgatggtggtggcggcggcggtggagcagcggcggcgccggctgggcgcggtgggagtgaagatgtcgttcctgtggctggtgccgcagcaggtggcggcggggatgtcggaggcgttcgcggcgatcgggcagacggagctgtactacaggcagttcccggagaacatgaggagcgtggcgggggcgctcttcttcctggcgttcgcgctggccaactacgcgagcggcttcatggtggcggcggtgcaccggaccacggggtggctggcgcaggatctgaaccacgcccgcctcgacctcttctacctaaccgtcgcggccatcgcggcggccaacgtctgctacttcctcctctgcgcccgctggtacaggttcaagaacaccaccatcgccgaccacgtcgagctgccggattatcatcatcatcagcccggaaccgccaacaccatagcctccaaggtttaattaattttattatcacaatcgatcactctactgtagatggtagatagatttagaggtacgtcatcgatcgatgcatcaccatacacagtaggagtataatatctgtatgtatcagacgcaaaaacactataatctcttcttcctcctct

SEQ ID NO: 17627 - DNA, 1111 bp, Oryza sativa
  ref <308>: DATABASE ACCESSION NUMBER: AK068059
  ref <309>: DATABASE ENTRY DATE: 2001-12-06
gactcgagactcgagagaggagagctcgcccgctagggtttcgcgggagatggcgcaggcggtggaggagtggtaccgtcagatgcccatcatcacgcgctcctacctcaccgccgccgtcgtcaccaccgtcggctgcaccctcgagatcatttcgccctaccacctgtatctgaaccccaagctggtggtgcagcactacgagatctggcgcctcgtcaccaacttcctctacttccgtaagatggatttggactttctgttccacatgttttttcttgcacgatactgcaagcttcttgaggagaactcattcagaggaagaactgctgactttttctacatgctcttgtttggcgctactgtcctgactggcattgttctgattggtgggatgataccttatatttctgagacatttgccagaatcctgttcttgagcaattcattgacatttatgatggtttatgtatggagcaagcacaatcccttcattcatatgagcttcttgggtttgttcacctttactgctgcttatttaccttgggtccttctggggttctctattcttgtgggaagcagtacatgggttgatttgctgggtatgattgctgggcatgtgtactacttcctggaagatgtatacccgcggatgactgggaggcgtcccctgaagactccttcgttcatcaaggcgctatttgctgatgacaatgttgttgtggcaaggccacccaatgctgggcttggcgctggagcaaggtttggtgctatgggtgcagacccccaggcccaatgatcaattgccattcgaaggcagttactgattcgagagttcttttttttttttcatctgttcaaattgcgaaattgtacaagcaatgttcccgtgtatttatacaggctatagatcagagaattattgtgcataagaaagcatttagtagtatctggggcagctaaatttcttaactggacacgaagggtgaaggaaatggtttacgagtttcaaccggctggacaatgccgccatctttggttgcagaaactgatcctttttgcgacgattgacatctgaccgggatacttttcaatgtggtagtctattggt

SEQ ID NO: 17628 - DNA, 924 bp, Oryza sativa
  ref <308>: DATABASE ACCESSION NUMBER: AK068060
  ref <309>: DATABASE ENTRY DATE: 2001-12-06
ggtcgcggctctggggatcggctcgtcttcccccctcttctttggttggcttcgtctccgcgcactcacacaccaccaccaaaggggaacggaagcgaacccctcctccgccgccgccgccggagatcgcccgctgtcccgccaatccgccgctgcggcctctggttgtcgtcgcgaagccggcgcctgcgctcagctgggatggcgtcgagtggagatccatcggcagtcgtcgtgcctaggaacttcagactgctagaagagcttgagagaggggagaagggcatcggtgatggatcagtaagctatggaatggatgatgcagacgatatctacatgcgctcttggacaggcacaattattggtccccataacactgtccatgagggccggatataccaactgaagcttttctgcgacaaggactacccagacaggccaccaactgtaaaatttcactcaagaatcaacatgacctgtgtaaacccagagaatggattggttgaccaaaggaagttcagcctgttgtcaaattggcgccgcgagtacacaatggaggctatcttgacccaacttaagaaagagatggcagcatcacacaaccggaaactagtgcagcctccagaggggacattcttctagaagcaggcgcccgccactcatctccgcatgccatggatgaaccattgtaattctctttctatatatcgcatgagatttgagccgtctgaacatttggtgcaaatgattgtagctgaacttcgctggtactaccttgtacgtggtccgtgtacgtcctgtgtttgtgtcgtgtctcgcttgtttggttaacagtttgccagtacggcattacctcaagagacaaaactaacgaattggggtaaaatctttgtaatgaatctagtgatgctctgcagatttggc

SEQ ID NO: 17629 - DNA, 2292 bp, Oryza sativa
  ref <308>: DATABASE ACCESSION NUMBER: AK068061
  ref <309>: DATABASE ENTRY DATE: 2001-12-06
gctcttcttcgtggactccaagacgaaaccatcgcttcccctcctctctcgctctcgccggagttagatgcgcgtgagctcgtgtaggagagcgggagcgagcactaccgggtgagactccggcggcggcggcggccgcgatggcgtccatctccggcgcggcggcgcctccgtcctcgtcggcggcgtgcaggctgcggctgcggcggcagctcctcctccgcccctcccacctccgcctccgcgccccccactccatcgcggacctctcccgctcctcctcgtcctcgtcggagcagcagccctcctctaccccggcggcgccgctcgcctccaggccggggcagaacggcagcacccgcggcgcggtggagaaggacccgatcaagctgtgggagaggtacgtggagtggctgtaccagcacaaggagctcggcctgttcgtggacgtgagccggatggggttcacggaggagttcctccgccggatggagccgcggatgcagcgcgccttcgcggcgatgcgggagctcgagaagggggccattgccaaccccgacgagggccgcatggttggccattactggctccgcgacccaggcctcgcccccaactccttcctccgcaccaagatcgagaccaccctcgaccgcatcctcgccttctcccaagacgtcgtctccggcaagattaaacctccgtcatctccagctggccgatttactcaaatactctcaataggaattggaggatcagctttggggcctcaatttgtttcagaggcacttgcacctgataaccctccattgaagatacgatttattgacaacactgatcctgctggaatcgaccatcaaattgctcaactaggaccagagcttgcatctactcttgtaattgttatttctaagagtggaggcacacctgaaacccggaatggtctgcttgaagtgcaaaaagccttccgagatgctgggctggatttctcgaaacagggagttgcagttactcaagaaaattctctgttagacaacactgccagaatagagggatggttagctagatttcccatgtttgactgggttggtggaagaacatcagaaatgtcagctgtcggattgcttccagctgcattacagggtatcgatatcaaagaaatgttagttggcgcagcactaatggatgaggaaaccaggaatactgtggttaaggaaaatccagcagccttacttgctttgtgctggtattgggcatcggaaggaataggaaataaggatatggttgtacttccgtacaaggatagtttgctacttttgagtagatatttgcaacagcttgtcatggaatctcttgggaaagaatttgaccttgatggcaatcgggttaatcaaggtctaactgtgtatggcaacaaaggaagcaccgatcagcatgcctacattcagcagctgagagaaggtgtacacaacttcttcgttacttttattgaggttttgcgtgataggcctcctggtcatgattgggagcttgaacctggagttacatgtggtgactatttgttcgggatgttgcagggaacccgttctgctctttattctaatgaccgagaatccatctccgttactgtgcaagaagttactcctagggctgttggagcgctggttgctctatatgaacgtgctgtggggatttatgcttctttagtaaatatcaatgcctatcaccagcctggtgttgaggctgggaaaaaggcagcaggtgaagtgttggcacttcagaagagggtgctgactgttctgaatgaggccagctgcaaggatcctgccgagccgttgacgctggatcaaatagcagagcgctgtcattgccctgaagatattgagatgatatacaaaataatccagcacatggcagcaaatgatagagcgctcatagcagaaggcagctgcggttttcctcgaagcatcaaggtttaccttggagaatgcaatgtagatgaggatatgcttgctgcttagaatttccggtcttggatgtgtgtaaaattgggtgggctttggaataaaaggaacgacgcctatggctgggccatgcattgttccaatgagcaattagttttttattcggttgcaaatggcatgactgccgcaaccctgtactttagattatagattttctgttttaattacagacaaataatgatcttgtcatcccgtgccctttttcaacttccaaccaagaagatggtacaattatttccaatcaaacgagtggaaagttaattccagcacc

SEQ ID NO: 17630 - DNA, 1517 bp, Oryza sativa
  ref <308>: DATABASE ACCESSION NUMBER: AK068062
  ref <309>: DATABASE ENTRY DATE: 2001-12-06
tatgaaaggatgggcatcaaccaaaacaagctcctccgccctagaaggcctggatttcagtttattgaggagggaaaactttcaaggcaagctgagctgcagagaattaagaatcaatttggtgaagcacaagctaaagaacttaaagtaaaacaagctcaacttgcaaaggcaaaggcagaagtagtcatgaacccgaacttgattgaagttgctcctgggaggcctccaaagcaaaagcagaaggaagagattcctgaaattgagccatgggatgcaaaaattttaccttctacaacatacgacgatttctccatggagaaggttaatatggaaaaaatcactatatatgtagagcatccagagccactggagccaccagctgagcctgcaccaccaccgcctcagccacttaagctgactaagaaggagcagaagaaactcagaacacaaaggcgccttgctaaagagaaagacaggcaagaaatgatcaggcaaggcctcttggagccaccaaagcccaaggtcaagatgagcaatcttatgaaagtactaggagctgaagctacacaggatccaacacgtatggagttggaaatacggactgctgctgcagagcgtgagcaggctcatgtagatcgcaacattgctcgcaagctcactccatcagagcgccgtgaaaagaaagagaggaagctttttgaagatcctaacacattggagactatagtttgtgtgtacagaatcagagacctgtctcatccgcagacacgttttaaggtggatgtaaatgcacaagagaaccgtcttactggtgctgcagtcattgcggatgggatcagtgttgttgtcgttgaaggagggaagaagtcaatcaaaaggtacaataagctgatgctgaaccgtattgactgggctgctgcggttgatgatgatgatgatgctgatgaggaatcagacaagcctgtgaatagctgtgcattggtctggcaggggagtgtggcaaaaccctgctttaccaggttcagtgtacacaattgccgtagtgaggctgctgccaagaaggtgtttgcagatgcttcagttccacactactgggacctggctgtcaatttctcagaagattcatcttgagctgagcttctgttcagaacatggaggcgcctgctgttgaaacccctgcctagggattacgatgttcaattctcatgcagtaagtgatgagtagtagctaatttctcaccgtgggtaagtgtcctcttcaagttacgtacaagccttattacttgctctggaagcatttgtggactgagtaatacttcgtactgtcatgaacatacccttgtaagggactgctgatcttttcgttgcgggatttactcatgtgagctagaaactgaatgcatggaggaactgttgaaatttttgcagtataagcttccaactatatctggactgctcaggccttgaatattgttatgggaattgtgttaatgaaagtatgtatgcattttcgt

SEQ ID NO: 17631 - DNA, 1348 bp, Oryza sativa
  ref <308>: DATABASE ACCESSION NUMBER: AK068063
  ref <309>: DATABASE ENTRY DATE: 2001-12-06
gctgcagcaagcagctagctatagctaagctctgagcgatccatggccatgaagtgcctcttcctcttcttcgccttcctcgtcgccttcttccccggcgccgccgtcggcgccgggctgaaggtcgggttctacaacaagacgtgcccgtcggcggagcgcctggtgcagcaggcggtggccgccgcgttcaagaacaacagcggcgtcgcccccggcctcatccgcctgcacttccatgactgctttgtcagaggctgcgacgcctcggttttgatcgacgggaacgacaccgagaagaccgcgccaccaattacccagcctccgcggattcgaggtgatcgacgccgccaaggccgccgtcgaggcggcgtgcccgcgtgtcgtctcctgcgccgacatcctcgccttcgccgcccgcgacagcgtcgccctcaccggcaacgtcacttacaaggtccccgccggccgccgcgacggcaacgtctccatcgcccaggacgcgctcgacaacctgccccctcccaccttcaacgccacggagctcgtcggccgcttcgccaacaagtcgctcaccgcggaggacatggtggtgctctccggcgcccacaccatcggcgtctcccactgcgactccttcaccagccgcctctacaacttcaccggcgtcggcgacgccgacccggcgatcagcgccgcctacgcgttcctcctccgcgccgtgtgcccctccaacagcagccagttcttccccaacaccacggtggacatggacgtgatcaccccggcggcgctcgacaacaagtactacgtcggggtcgccaacaacctgggcctcttcacgtcggaccacgcgctgctcaccaacgccacgctcagggcgtcggtggacgagttcgtcaagagcgagacgcggtggaagagcaagttcgtgaaggccatggtgaagatgggcggcatcgaggtgaagaccgggacgacgcagggcgaggtcaggctcaactgcagggtcgtcaacaagaggagcgccaacgctgagctcgagctcgagctcgccgccgccatggatgatggggatgaagtggcagcgagctaattaattaaggtggtagtagctgatctgatgtcgcgtgttcttcagaggtttcagcaataagtttgtgatcggtgttgttacttgttagatgtatgctgctgctgtttttaacgagaataagagttgctggagaagaagtttttttcttcttgttgttttttaatttgttttctgttttggcttgtgtttgggtgagtgctttggtgtgaacctgtcatgaaatcaaggaagaaatttggcgaaatgttgccg

SEQ ID NO: 17632 - DNA, 1834 bp, Oryza sativa
  ref <308>: DATABASE ACCESSION NUMBER: AK068064
  ref <309>: DATABASE ENTRY DATE: 2001-12-06
gagttctatctgtctccaatttactgtggttaattaggttgcgatttgcaaggatagaggcaaagattactatctgcaacactgacttcttttgttgttgaaggaaacatatgctcttactttcagttcagatttttcttttcattttctccgtttgcaatttgcagttctgttgttgttgcagacgatgatggtgtgtgtcggaatgcattagcccatagttcttgtcgatgtggtcttttttttcctctctctttctcttgattgatatggaatagttacacagttgaaattgttacagatggccacaccagtgcctgtcacagaatgctatgatcctatgatgttatcaacattgttaaccaaacaccagtcaacttcaaatatctgaggattcagagttgtgctcataaattcagaattgcgttttgactctcatgctgaagcaattactttgagttttgaattgtgatattgtttgatgaattgaattctgttggcaacaaacaacttaatatctgaacatttctgcattatctgttcagattctaggagatggcatcagcagcaatgtctactctgaacctgagttcatctcctctgaccaagcagcagctccgatttggagccagcacactcagtgcagaacacgtcagtggcttcagctctgcaaggccagctccatcgttgtgctgctccagctctcactggcgagcggtcaagctgagaccgagacggcggccatggcggcgcgccgggaaccgggtcgtcgcgcaggccggcggctacaaggtcgccatcctcggcgccgccggtgggatcgggcagccgctctcgctcctcgtcaagatgtcgccgctcgtctcggcgctgcacctgtacgacattgcgaacgtcgatggtgtcaccgccgatcttggacactgcaacacgccggcgaaggtcgccgggttcaccggaaaggaggagctcgccggttgtcttgccggcgtggacgtcgtcgtcatccccgccggcgtgccgaggaagccagggatgacgcgggatgacctgttcggcatcaacgccggcatcgtgagggagctcgtcgaggccgtggcggaccacgcgccggcggcgctggtgcacgtcatctccaacccggtgaactccaccgtgccgatcgccgccgaggtgctgaagcggaagggcgtgtacgacccgcggaagctgttcggcgtcacgacgctggacgtcgtgcgcgccaacacgttcgtcgcggagatgaagggcctcccgctcgccgacgtcgacgtcccggtggtcggcggccacgcggcggccaccatcctcccgctgctgtccaaggcgaggcccaagacggcgttcaccgatgaggaggtggaggcgctgacgaggcggatccagaacgtcgggaccgaggtggtggaggccaaggcgaaggccggcggcgggtccgcgacgctgtcgatggcgtacgcggcggcgaggttcctggaggcgtcgctgcgcgggctcgacggcgacgccgacgtgtacgagtgctcgtacgtgcagtgccaggcggtgccggagctgccgttcttcgcgtgccgggtgaagctgggcagggacggcgtcgaggaggtggcggcggcgggggcggagctccgggggctcacggagttcgaggcgcgcgcgctggaggcgctcaagccgcagctcaagaagagcatcgacaagggcgtcgcctacgcgcagcagcagccagcgacggtggcgatgggttgaaatttgacatacttttcgcagcattttgcgagtgattaccatttgctgaatgcatttccgtgcc

SEQ ID NO: 17633 - DNA, 982 bp, Oryza sativa
  ref <308>: DATABASE ACCESSION NUMBER: AK068065
  ref <309>: DATABASE ENTRY DATE: 2001-12-06
gacccgggctccgccgccgccgcctcgcctcgccgccggcgcgctcgctcgctcggctggtccgcgtagtgggctgccttccatagtcggctctggaggagttttgagggagggaggcgcaggcatgggcgaggaagaagaagaccccgactggctccgcgcgttccagccaccaactacatcgacggtgatgctttcttcgggctccgatgattctcctgactcgatagacttaagtggagacgttggagctgttgggaggataataatttcaaacagtcctaacggaaatcaggaattgttattggacctaaaaggaacaatatacaaatcaacaattgttccatccaggacattttgcgttgtcagtgtaggacaaacagaagcgaagatagagtctatcatggatgactttattcaattggaaccccaatccaatttatttgaagcagagactatgatggaaggtacccttgatggattcacatttgattctgacgaggagggtgacaagcttcctgaaccgcatgcttctcaaaacgatcaaaataatgaagatggggatcaacctaaggcaaaaaccaaaagaaaagctgagaaaccggcagggaagggacagaagaaggcgaaggttgcaggaaaggccactaagaagggtacaaggaaaacccaaactacgaagagaacaaagaaggcgaagaaatagacctgttgcgaaaccgggacgctaccagtaaagactagagaatccaactccaaatggatcagacttgagaaattccaaatgttgtatgatctgggttatcagtgtagcataatgtacttcttttaggcgtagaatgaaattagaagggatacacatgattgcaaaatccatttttatgtctatgaactctctgtctatcctcatttgtatgttgtataactatcaaatagccaaatttgaaaaagtctggatatcaaacacttgccattcatcttt

SEQ ID NO: 17634 - DNA, 1235 bp, Oryza sativa
  ref <308>: DATABASE ACCESSION NUMBER: AK068066
  ref <309>: DATABASE ENTRY DATE: 2001-12-06
ggggaggaggcgaggaagaaccgaagaagcagcagagcagagatcacctgcgattgcgaggggaggaggcagcgatgtggcggcggcaagtgggtgcccttcttctccggcaccgatccacgccttcctccaccctccgccaccatctccccctccccgtccccgaccagagcccacctctcgcttccaatcttctgctccgcctcttcacttctcaatctggagaggggggtgatggtgccaccaagcccttcattgctttcgtcttagggggtcccgggagtgggaaaggtacgcaatgtgtccggatcgcttctgattttgggtttgctcatttgagtgctggtgaccttctacggagtgaaatttcaactggcagtgagaaaggggagttgatcttaaatataataaaagaagggaagattgttccatcagagattactgttgaactgattagaaaagctatggaatcgagcgatgctaaaagggttcttattgatggtttcccaaggtgtgaggaaaacaggatcgcctttgaaagaataactggaacagaaccagaccttgtgattttctttgactgccctgaggatgagatggttaaacgtttactaggccgtaaccagggacgagtggatgataacattgaaacaatcaagaagcgcctaaaggtgtttgagagtctaaatattcctgttgttgactactacacttcaagaggaaaggttcacaagataaatgcaaccggaactgaagaagaaatctttggagcagtccacaagctgttttcctccttaagtctattctctctcattgagggcattgggaagcgtgcaaatggtgggaaaagtttgcatctgcagcatgcatggacgacgattggtcatgatgctttttctacagctgcagcccggcgatagattaagcgccggctactctctctctcctgttttctcactcttccatgtaggatttatcttagatgaatagtactaccgcctgctgactgtaacctattatacctgctcttatgctacccaattgcttattggttattctctagtaccaaactggctctgtatgcttgccagttgccgtgtacttaggatattttaatcctacgagtcaaactactctctatatgcctccttgtttacaggtcaataaattgagagatgctaccaagttgttttcaagcaacattttgtcatatattaaagctctcaattatgtct

SEQ ID NO: 17635 - DNA, 2398 bp, Oryza sativa
  ref <308>: DATABASE ACCESSION NUMBER: AK068067
  ref <309>: DATABASE ENTRY DATE: 2001-12-06
gggcggcaacccacacccctacccctacccccacaccacaccacaccacactagcacatccctgtccccctcaattcccgtaatggtgttactaacgaggcaggaagccggctcggcagctgtggcatcaggaagcggaggcggcggcgacggcgatggcgtgctacagggaggaggcggcgtgctggatctaatgggttaggcggcaagaacgggcatgtccatgtctggcgaggaggcgaggacggtttcgctctcgtttccgcggttgtcgtcggctccctccctcaagcgagaaaagcaagaagcgcgctgcctccgccaaggctgccgacgaggcctccaccaaccgcacccgcgctacctcccgacgccaacccctccgctggatccccattgctgtatcgttctcctcggtgaggtggggacttctctagggtttggggattaggggatttatagggttcctctgccctccctgcgtataggaacgaatcagaatttggtttttctttatttttttctttacttcatgcgatgggattttgcatggtggttctgctccagatctggaagcttcaatggcatgggtatcatgtgagaagctccttgctggtggatgccccttgttcttctgttccagatgtacaagctacagggcgacacgagctcctgctccctgcactccataggttagcctgcatcgacgaggaatacttgaggacgccaggggtgaagaagggtgtagcctttgggagccttgccgccagatccgccgtatccagcggccccgcgcgtccccgacatccctcttgccgtggtctagggtgctgcgatgtcgtcttgccgtggtctccattcggtttgttctccatactattttaattggacatagtttttttgagtaattggacatagtttttttgagtgctcagactgttgtgggatctattcaataagctgtaatgacttgttgtctttccaattgctgaaatcttggaggttttttttcggttaatttggctgaataacaatgttatgcgatgctgtttgtgctttgattcttcaggtactaattagagatattggagccattgtttaattactttacgagcagttcaggtactttactagcaattcaagtgacaaatttggttcactaatctagttctagcagtacaaacaatttcagcttttcctagttttagagttttgattctggcatgaattgtatggggaatatgattaattcctgcacactttaggatgaaggtctggtctcatttcacttgagcagttcttgcacttcttttctttcaattgcgggaatgttcagatcattttttgcttaaagtacctgattcgttcttagtttgtgtgtttgttggcctaaatctttcttccaattgcacagctctggaactcttgctgaacagaatagcatgaatgattctagtgtagggaagttcttatttttattttttgttggatcatggaattcagcactaattatagactaacagtgttcttgagttttcaggcatatctctgataggctagtgttatatggttattatggggctcatgagttttgaattttggtcacgattttcaggactgcaaaatatgcagtgagatgtgtaaactctgagatatgtcatatttttacagcatgtgtacagtattcgtcgtagttttctgaaattagtactgcatgtcctgtgagatgtgtaaactctgagatatgtgatatttttacagcatgtgtacagtattcgtcgtatttttctgaaattagtactgcatgtcctgattctgaattttcggatagatgaaaactcaaaaagctcgatcgaatagcagttttctaaatttttgttgttcaaaggagcacatcaattgaattctttttttctgaacttctgactagatatgttcgctgttgaacatacccttttttctctgtatatttttgacagaacagacatcttcagactaagactaaggtctaaattttactgaaatgattaacttctaatttttgcaggcatcagcatctacagtgtgcactcttgcaggtggatgcacatcttgatggaaactagaaaagaacatgagaagattatgccagtggtgatggtgccactggaatggcatcctcgacatgtccttcgtcaacgttcgtcgccggcagccaacacaaagggtcagcccaggacgaccacaccacaattgatgacaggcttcggtggcaggcgatgcgatgccctctggattgtgctttttttttgggtaccgggtgtatatgtgtttgtaacgatgatggcacgatcaattgtaaaaacaaagtccattatacccgtattcgtgcagtaaaatatttactaccttatatatc

SEQ ID NO: 17636 - DNA, 2230 bp, Oryza sativa
  ref <308>: DATABASE ACCESSION NUMBER: AK068068
  ref <309>: DATABASE ENTRY DATE: 2001-12-06
ggttctcccgcggctgcgcttccggcttaaaccctagctctatggccgccgccgccgccgcctcctccatggcgaagcgcaagcaacgcaaggcggcgacggagcaggaggtagagaaccacgacgaggccactgtcgccgcggaggcggggcccgagaatgacgggcacacggcgcacgccgccgaagaggctgcggccgctgaggagggtgtcgagcgcgaaggaggaggcgagggcggcgcggagggggaggagggcccggacgctgcagccaggggaggtgaggagggcaaggaagaggaggagagggaggtgagctttgacgagcttggcttggacgagcaactgaagagggctttgaggaagaagggcttggacaaggccaccccgatccagagagaggccatcccgctcatcctggaagggaaggatgtggtcgctaaggccaagactggctccggaaagacctttgcttaccttctccctatgctgcatgagctattgaagttgtctgcagaagggcgtatccgaaaatctgctccaaatgttttcatccttgtgccaactcgcgagttatgccagcaggttcataatgaggcatcatctctccttgaattctgtacatccaaattgaaggttgtgcaagtgaatgcgagcatgtcagacaaagatattaaagttgcattgtctggcccccctaatatacttgttacaactcctgcttgtgttgcatcatgcatatcaaagggcattatccgtggatcatctatcaaagaatcactatcaatgatgattctagacgaggctgacctcctcctatcctatcgttgtgaagatgacataaaagctctcgttccacatatcccaagaagctgccagtccatcctgatgtctgcaacgtcaagcgctgatattgagaaactgactaagctacttctgcacaacccttttattctgacccttacggaggttggtcatgcgaaggatgatttgatcccaaaaaatgtgcagcagttttggatatcatgtgatgctaaggataagatgctttatatccttgtactcctgaagttggagcttattcagaagaaagttctcatatttgtaaactcaattgactcggcattcaaattaaggctgtttctggagaagtttgggataagatcttcagtgctaaatgctgaattaccacaaaattcacgcctccatatcattcaggcattcaatgctaggctatttgattatctgatagcaacggatgacaataagtctaaagaggagaggcaagccaataagggaaacaaaaaggattctagggtgtcacgcaagcagttgcagcaaactttagatgctgaattcggtgttgtcagaggaattgacttcaaaaatgtattcacggtagttaattatgacatgcctccagatcctgctgggtatgttcacagagtaggaaggacagggagagcaaataaaactggtgcatccatatcgcttgtttcaccaaaggagaatggcatttttgaagatattgaaaatatgttgaaagatgttgaaaatagagacaccagttgcatttcacctttcccattacttacaaaaaatgccgttgagtctttacgctatagagctcaggatgttgccaggagtgtgacaacccgtgatataaaagaagcacgtcgccaagacataaagaatgaaatcctcaactctgagaagttgaaggctcattttgatgagaatccgagagaccttgatttgctcaaacatgataagttattgagcaacaaggaaatccctgcacacctacgtgatgtccctgagtaccttattgatcccacaacaaaagaagcaagcaatgtagtcaaactttcaagggctgctatggatatcgataagccacggaggaggaaaagaatgggattcaagggaggatctggcagaagtagtgatccccttaagactttctctgctgaggggaaatcacggaggcgagggaggaaggaaagagacggagaacaggatagaagaaagaggaagaaggtggaaagctaatcttttgtgaagcgttcactgccaagtgcgcacagttttgtaggtttctggtatctcgtcctgtaactttgtagcatctccagatatagggggataacaatgtcaagctttactggatgctgcgtgtgctatgctatgcacaccattatatagacagacgagtagagagtttgttt

SEQ ID NO: 17637 - DNA, 1735 bp, Oryza sativa
  ref <308>: DATABASE ACCESSION NUMBER: AK068069
  ref <309>: DATABASE ENTRY DATE: 2001-12-06
gtagggtagtagactagtagtaggcgaaagaaaaaaaaatccccccaaacgagagaagcggcagcgacgacgacgacgacggcgacagcagcagcggcggcaggagcagcagaagcaaccccctcctccgccgctccgccccatcggatcgaggccgccctagggtttcccccaggctccgcccctccgcttcccccctctccgccgcgcgcgcgcggggagccaccaaaccctaggacggcaaacccggcgcgatcgcccacggtggaggcctcgtcggcggccgagaggagccgctccgggctcgggtcggggttccggtacctcaccggcgccgcctccgggtggtgggaccggtggatggtcatgggagccagcggctccaagctcgagaaggccctcggcgaccagttcccggaaggcgagcgctacttcggcctcgagaacttcggcaacacctgctactgcaacagtgtcctccaggcactatatttctgcatcccgttcagggagaaattgctggaatattatgcaaataacaaaactcctggagatgcggaggagaaccttttgacttgtttggcggatcttttcatgcaggtaagccagtcaaagaaaaagactggcgttattgctccaaaacgctttgtccaaagagtaaagaaacagaatgaactatttcgcagctacatgcaccaggatgcacatgagttcttaaattttctgttgaatgagcttgttgatattctggaaaaggagtctaatgctgcgaaggactcccctcaatcatcatctcctgaaaaggttccaaacgggccagttcaacctttagccaatggtgttagaaaagaaccaccggttaccttggtgcataagaattttcagggcatactgaccaatgagaccagatgcttaagatgcgagacagtaacagcaagggatgaaacattttttgatctgagtgttgatattgagcagaatagttctatcacaagctgcttgaaaaacttctgctccacggagactttaaatgctgaggacaaattcttctgtgacaaatgctgcagcttgcaagaagcacagaagagaatgaagatcaagaaggctccacacatattagttatccacctaaagcgcttcaagtacatagagcagcttggtcggtataagaagctttcataccgggttgtattcccaatggagctgaagctcagtacatctgatgatgtagataccgagtactccctctttgctgtcgttgtccatgttggaagtggccccaaccatggacattatgtaagccttgtcaaaagccacaaccactggttgttcttcgatgatgaaaatgtcgagatggttgaggagtcgaccctgcaaacattcttcggttcttcacatgaatactcaggcaacacggaccatggatacatcttgttttatgagggtcttggtgggaagagttagattgattttcttcaccttccctgttcttttcttttttttttctttggagcatgcaagaataccgttgtatttacacagctatttcattacctccatggaaaattgttgatctcagagattgtgagtatgaacatgaggacgctggattttgggtggttttagtgtacagagcataatggaaccttgctcctagtggtgaaataaggtgtaaatcattaagtacgcctgacttttttttttcgtcagcattgacatctttaccaaagaatgc

SEQ ID NO: 17638 - DNA, 1461 bp, Oryza sativa
  ref <308>: DATABASE ACCESSION NUMBER: AK068070
  ref <309>: DATABASE ENTRY DATE: 2001-12-06
gggcggcgcatccccaatcccgctcccgcacgcgctgacgccggaaactgctccgccatcagcgctcccatcacaacagcctcgccgatctgccccgcaggtgccggctcgccgcagtctacatcgccgcccactccgtcgtcatcgaatccgtcctcgggcaggaatcacgtcgccgccggtgccctccgcgccgatctgttcctcaccgccaccgatccccgctgccggctcgccctccaccgaccccccgccggaagcccttctgtcgccaggtctccgccgatgcattccacgccgagttgctcctcgccgccaccgatccctgctgccaggtcgctgtcgacgccttccgcaccgagctgctcctcgccgcgccgccacggcgacgacgatagactcctcagcaagttgctcctgccgaccacctagctagctagctaacgtctcgacgatgtgtttgtggctagctagagctctgatgcggcagcttgtatggtgtggctggaagacgacgacgcagcgtgtgcgagaggatgggagtcacaagctccagccttaagggaggggaaggagcataaaaaaaattgagggatgaaaagagaaataaaaagttaaaaacagagagaagacaaaatagaaaaaaatttggaagattggaagagagattcagaaaatttaattcagtggctcatgaccgttgttctaaagataggcctgcagttcgctaccgaggtgcaggatagctaggaaggagataactggagcagtacttgtgtcatagactgatagacagtgccgatcgacgagacagttgcatcgaggatactgggcttttggtcccatagcttcaaacaaaaagaccgctttgtagtttcaatctggaaatccattttcgttggtcccatgcggtgaagaaaattgggctccactctgcgccggcaaccccggcgagcaacctctgcaccgccacctcccccgtcgtctggtctccaccaccggtaagaaattgcagaaccccacgtttaatttaattaaaaatcttttctgttcagagctgcagattaggtgtttaatttcttcatggcacccttcatgcagaaggaattactcaaatcagacacaagtgaagctatttgagggatcactagctgtaccaatttctttccagttacattggtgaacaaaattgatataggtactgcaactagatcagtcgcacagaactttctccaaattggattggcctcattcctgatgactacataaacatcatggaaaaaattgtatgcgatgtgtgtttgatgttaggaagtatgtgatgtggatttgggtgatcttaccatcttgttggcttttacatggcatgattgacagtgtgtaaataaaattatttagtgctctgtaaaaatatatgttgcttgttgatgtcttaatgggcatggataacattgtcatctt

SEQ ID NO: 17639 - DNA, 1905 bp, Oryza sativa
  ref <308>: DATABASE ACCESSION NUMBER: AK068071
  ref <309>: DATABASE ENTRY DATE: 2001-12-06
gagtcctcgctcgccgggcgtctccgtcacgaacaagcgccgccgccgccgccgccgctcgccggtgctacggaagacgcggccgcttcttattcggaggcggcgaggagagggagaggggcttcatctgctgctgcttcggctaggagcctaggacgccatggcttcctctccgacgacagatggattaactgagtcagtggccaaaaggaagggctctccttgccaacaagatgatgattgccaagatgacaaacgaataagatcaggtgcagaccttctagaggacattttttggtacattcattccttaatgccacttcgagatgctgctcgtgctgcttgtgtgtctcattcatttttacgatcttggagatgctatccctaccttatgttcagtgaggagctactccgattgcaggagagtgcatttagtgatgatgagagaacgagaaatctcatcagcaaagttaaccacattttacaaaatcactcaggcattggcgtgaagaaactagagcttgttttcttggatagtactgatgtggacttaagttatattgacagttggcttcacaaggctgtcacacgagggattgaagaactcaccctgatactgcctataaacagcaatgcagaatacagcttcccatgttcgcttttatctgatggtaatggtaactcgattcagtatcttcatctctctcgctgtgccatccgccccactgctgatcttggttgcctgagaacattgacaacgttgcatctatattccgtgcgaatcactgggtttgagctagagtaccttctttccaattcacccgcattggagtggttgataatgatggattgtaaagagatagttcagttgaagataccaagttgctgaagcggctccatactctttttgtgagtagatgtcaaatgctgaaagtggtagagagctatgctccaaatatcgccacctttcacttccggggtcatgttcatgcagtgcgaatgttgggtttactgcaagtaaaagaccttgagatgtcatgttcagatcactctagcattctctgctatgctctcaccaatcttttgtctattgtcccaaatgttgaaaaacttagaatatcatcacaaacacagattgtcagtacacaaactgtaccagggaaatatcttcgcctcaagcacttgcatatatctcttaacaggtccccaaactttgattatctttctcttgtttcttttctcgatgcctctccttcactcgagactttcatcttgcatatatgggacatatacataccactgggtcatatggggcatccttggactcttggagactctgaacagctgaggcagatgccaggacaccgccatgacagtctcaagaaattcgaggtcgtcggttcctgctacgcgaagggcttggtcgagctaacatgtcatatccttgagacgacatcgtcgctcgatcgtattaaactcgacacctgtggttatgttgggctttgtgcttccggcagtggcagatgttacccacattatacagaacaaatcatggaggcctgtaattcagtcttggctatcaggacatacatcatggggaaagttccacctacagtgaagtttgaacttgttgagccttgcagccgttgccctgtacagtagatgctaagttattaccggttaccatgcccatatgttttttttaaccatttttttaaaaccctacggattgccgacataacttgttgagaaaggatcattgcatcctagtcaatatctttaatatatttattcacccataaattactccagcacttgttgagcaattgttgtacaggttacatatttgttgtacagatctctagtcttaaaataagacatcactgaaaaactttacctctgagt

SEQ ID NO: 17640 - DNA, 2174 bp, Oryza sativa
  ref <308>: DATABASE ACCESSION NUMBER: AK068072
  ref <309>: DATABASE ENTRY DATE: 2001-12-06
gtccgaggagtccactccagtgatccgcgctcgcttggaaatccgagccgcggcctcagatccaattttccgagtcaaaattctgggaggaatccatccaatccgcggaggaagcttccaccgcgcagatccccaaaccccggcccatccccgtcctccaatccacatcgatcccctgcagattcgaggcggaaatgggggaggggatcaacggcgacgccggcgacctcgcggcggcgccgtacgaccagtggctcccattcagccccgccgggggatccccgcgcccatccgcgcgttacaagcatgctgcggaagtggttcgtgaaaaactctatgtggttggtgggagtcgtaatggccgctatctatcagatatccaggtctttgattttaggacactcaagtggtcagcattaagtgctgctagagattcaagtcagttgaatatcgaaaataataccacagacccttcattccctgcactagcaggccacagtctggtcaactggaaaaaatatattgtggttgtagctgggaacaccagaacatcaacatcaaacaaggtttcagtttggcttattaatgtggaaacaaatagctggtcttctgttgatacatatggaaaagttccaatatctcgtggtggtcaatctgtatccctggttggttctcgactgataatgtttggtggagaggataacaagaggcgacttctgaacgaccttcatatacttgacctggagacaatgatgtgggaagaagttaaaacagggaaaggtggtccagctcctaggtatgatcattcagctgctgtttatgctgatcagtatcttttgatctttggcggttcctctcactctacatgctagtgatatctaccttcttgacttgcaaactatggagtggtctcaacctgacactcaaggcgcgcacataaatcctaggagtggtcatgctggtaccatgattgatgaaaattggtacatagttggtggcggagataacgcaagtggttctactgatacaattatgatgaatgcttccaagttcgtttggtctgtagtcaccagtgtgccagcccgagatccgcttgcttgtgagggtctcactctttgctcaaccacagttgatggcgaaaagtttctggttgcctttggtggttacaatggacaatacaataatgagatatttgttatgaaacttaagccaaggaatttagtgcaacctcgtctgctccaatcaccagctgctgccgccgcagctgcttctgtgacagctgcctatgctgtaataactgatgagaaaaccagagacattgttgcaacggatgatttagatgtgaagagagttcagccttcaggttcttccaaacaaattactactgaacttgatgcacttaatggagagaaaggcaagctagagtccagactggcagaagttcgtgatgaaaactcaaaactaaaggatagactagatatggtaaagttattgcatggtgaattgacaaaggagcttaaatcagttcaacatcagttagcagcagagggttctaggtgccagaaactggagtcccaaattgctgctgctcataaaagactggaatctactgattctttggagaatgaactagaagtgttgcggcaacaaatatctcaggtggagcaaaccatgacaactgctcaaagacagaaatctgggggtgtttggaagtgggtggcaggaagtgcagagatctctgatgatgaatagtccaccaacaccaagacaagcagctaccaagcagagagacgcatgcagagctgctacagttttgagataatttctgggtgctccctcaagatcttgttcgcggttgattttgagataatatctcccaagacagtcttctgaatcttcttaagtagtggcacctggtagaaattttccataggcaagttagacattcaatagtaagagcataacatcatacaaatataccgaatcatttgtatcacattctagaaataattgattagttattaattttgtgttcgtcatggcatacttttctgtagtcggtgttacagaagtagaaagtgttcattggtttcggcgaggggatgaatacattgtttatatacctcaaacttgcaaatatactattcagatataaatttggttcagttgtcacc

SEQ ID NO: 17641 - DNA, 1993 bp, Oryza sativa
  ref <308>: DATABASE ACCESSION NUMBER: AK099036
  ref <309>: DATABASE ENTRY DATE: 2002-08-28
gttccccgcgcgtagccacgcacgcctcaccgcgccccccttctccggctccgccgcgcgttctacttctaccgttaccgcccgcggcaacaacagctaggtagatacacgtcgcgcgttcgagcctaaggtacctgctctctcgcgcgcgccaccgatggcgtgcctcgcgccgcagctcaagtggcccctttccacccgcgcggcggcgttccgggagcacggcggcgccggaatcggcgggttccgtaccgttaggctccactgcgcggtgtccaccaccgcgctggtagaggccgagagctcggattccttggcccccggggcgaggcgtctcgtcgtctacgacggagccgtcgcgccgccgcctcttccgggaggtttcggtgaggcgattctcaaccaagaagccgtggtggcggccgcagcggcggaggccgtcgctctagcaagggcagcggcggaggtcgccggagaggtcgtccggatgtcgcaaaccgagcaacggcaccggcctgacttcgtcacgacgcacgacacggaggacaactacttggccagagagatcctccgcgccgaggcgggattgggggcgaggtacgccgatgcctgtctgtcggaggatgcggggttctccagtatcttcagcgatgaatccgaggtagatgacgatgagcagtgcgtccagggcgtggctgtgaaatcggtgcgccagtccgagaggagagctcggagggtgagggcggcgatgaaggcggccaaatcgttcagcggccggaatcccgtcgcggcgtcgtcgtcggcgaggaagaagaggttgaagggttgccggagtcctctcggctgcttctacaagatgaccggccggaggcttctgacagcaaaacaagaagttgagttctcacaaggcattcaggatctcctgaagttggaagctatccaaaaggagcttgctcactacaacggcggtgaaccaaccttctcacagtgggcagaagcagctggaactgacgagaacactttgcgaaaacgtctgaactatggaatttcctgcaagaacacgatggtaaagtctaacgtgagacttgtaatctcaattgctagagagtttgaaggtcctggaatggaattttctgatcttattcaggaaggaatacagggccttgtacgaggcgctgaaaagtttgatgcttcaaagggttttcgattctctacatactctcactggtggatcaaacaagcaatacgcaaatccgttttagaacaaacccagattattcgcttgccggcacacatggccgaagcaagttcccgggtgaaggaatgccgacggcggctccgccggcagctgaagaggctacccaccaacgaagagatcgcatccgacaccggcatgccgctcaggcgcgtcgaggcggcgatgagcctcccaaaatacaccgtttccctcaccagcaaggtcgggtgcactgacatgacataccaggagatcacgccggacacgagcacggagacggcggaggagatgctgcaccggtggctgatgaaggaagacgtggacagggcgctggacgggctgagcccgcgggagaggcaggtgatcaggtacaggttcgggatggacgacggccggctgcggacgctgcacgacatcggtcggctgatgggggtgagcagggagaggatccggcagatcgagctggtcgcgttccggaagctcaggggcaggaagaaggttcagtcgctgcagcattatctgcagcctgtggagagctggtagctagccatgcatgcgtgtgctgcctagttaccacttaccaccacattgccatcttctttttggaagggttattaacctgtacgagtaactgttaatccttacgtatgagtatgtaacacacgtgtaaagaaaggagatccaaacatttgttttgtaacaacatactggtatagctattgccggaagcaaagaacgcaacatagttgcttcaag

SEQ ID NO: 17642 - DNA, 1587 bp, Oryza sativa
  ref <308>: DATABASE ACCESSION NUMBER: AK068073
  ref <309>: DATABASE ENTRY DATE: 2001-12-06
gactgttcacccttcctcgcttctcctcgccgcaatcgtcttccgcgggtggcatcgctcacgctgtcccccgcccatctccgcctttcttcctccgcccatccccgccgccgtcacccagccaccttttccctcctttcttcctccatgattacagtcgaccaggtgattggacggtgcggcgccaaatcaatggtgtgggggatcgatgttctggtcttgattccttttctctcttatcttccctcctttcttgcttatggcatgccaaatcgatggtgtggggatcgatcgatgttctggtctcgatttgctggttccccttctgttcaagctcgagtctttgccatcatgcggcaccaagctccgccgttctgcgccgccagcgctgtttgccgattacagatatgatgatattggttggcttcccatattcacttttggtaagttaatccacagacagttccttcctatgttcttcgcttgcaaagaatgggctgcctacgaaaaaacaaatttgtgattcctatgttttcccctggttgtgtttgcatttatccggaacaatgctaattctgatttgtgatggttagattttgctttagttgtgtttgtatatagcccgaacaaacagatccgaggtgtttgtttccccagtgttttccctgccgagacaacagctctgccatagttgcacagatgcaagttcattgcctctttggaatttaggtcaggctaagcagaattaggcctgctgggattttttttgttagccgacaacacctcagccataactgcacggatgcaaactgttagattacatgacccctttagaattcaggccaggctaaccagaactaggccaacatagaaaatttttcgttgatatttggattttatttaacacccgcatgagaatatggaaagttctctactttttttaagtttgggactaggtaccatgtcctagatatcgaataagagattactctgaaaaattttcttcataaactggtgtgaatgggggagcatcagtcattggattatacctgataatttagatgtacgttgtcttcctatggcttttcatctaatgtatatgatttattattcaatggaaaggtactgttatacatgcagataggttgcccctttctttggagggtggtaggtacagtcctattataaataacaaatgtgaattcttcttttatcttattcatgtaaaaaggattggttccctccatgtatggtgctcatgtatgtcagagctatatgccatgtttcttgctatctagcaacctccttttgaaatttaggctaacaggagaaagtagggctgtcagttttttttgtttaacggcttttccaacatattcagatgcaaagacatttcagtgccttttaagagattaccaacagactgagatgactatttcaaagcaggacatgcaacagcgatgttcacgcatggaacagcttttagtagggaaatttgagggtgtctaccctttatacctgaacaacattattttcacagcgagtaggtgtaaaaagggatttgtaatatatggacttatgtctgcc

SEQ ID NO: 17643 - DNA, 4615 bp, Oryza sativa
  ref <308>: DATABASE ACCESSION NUMBER: AK068074
  ref <309>: DATABASE ENTRY DATE: 2001-12-06
gaatggcttccggttgggctcaacttcctgacgatctcctggacaatgtggcgcagaggacggctggcatcaaggactacgtccgcctccgcgccgtgtgcaagtcgtggagatctttcttgcgcccaaggtcgaggccgccatggctgatgctcccctacgacccatgcagcgagagctgcgtcaggggcttcttggacgcctccgacggcaccgtgcacgagattgacctgccggacacgagaggcaagcggtgctgtggctcgtcgcacggctggctcgtcctcgagcggtggcccgacgtgtggctgctcaaccgggccacgcgggagcgcgtccagctcccgcccctgatgcgccgcggcgaggccctggcgccgccgcggttcatggagcgcggcgcgagggagaggtgggaggactgcgcgtaccgcagcctgcgccgccctctgctccagcgggaggtgcgcgtcgctgcgctgtcgtcggacccgtccgtcgtcgacggcgggtgcacggtggttgtcctcctcggcgccgaggaggaggcggtgttctgcaggccgacggacgcgtcgtggacgcccctcgcgtgcccggcgggagccttcgcggccgtcgacgtggcgtgccagagcggcttgttccacctcgtcagccaccacgggcgcgtcgcggtgttcgacctcgtctcgccgctgcgtgaggtgcccacgcgccgggacaggctccacgccctggcgcacacgtgggacggccggtgcctcgtccagcgccgtggtggttgtgggcacgagccgctgctgttggcaacgtggagcggcggcggcggcgccgggtagctggctgtcttccggctaggctctgatgggcggtggacggaggcggacgacgtcggcgaagatgtggtgctcctggcggcagcgaacagcggctgcttgggctttgacacggcgacgtgcacgggtagtaacaagggaatgctcgtgtcgcctgtgacgtactagccatggcttgcaaccatctgcttccgatgaggagttcagtgtcgatcagcatggcatgttaaccggtataccgtcaaatggtttgcagtcgttgcgacgatctgctgtgccaatcaccagctgcgtgaaggcttcgaatgtttttcttctgttttttctttttacttgttcttgttgatcacagcccattccacaataactgtgcggactacagattcaaaagaaactagatggtctagaatatactgatgttttggctgaaagatgtgggtgaatcaatctagaaggagatgagcataatcgctgaaaatatacaccgccgacaacttcttatctcagagattcgaaaagatgttaagcgctgaagaaatgtacaaagttcagtactgatgcaaaagttacatttgccgaagagggctatattacaagtgagttcaataaatctggcaaatgcagatctactgagcaatgcaacttatccaataaatctgtaatcagatcattactggtacaaaggtgtatctcccagaatacatttacaatggcggttggaagccagcagcataagcatatagtttcgacaaagcgcattgaggcaagcaaatatttacccattttttctgtcgatgtacagagcaatgtttttgcagatacccgatcgtcgcgatgcttcggtgctgaagatgaacagcacagataactcatggatccatcaggttttctcttccacgaaactgaaattagtttggagccacttcacatggacctccagcccggcgtctcggaggctcctcaacacggtcaggtacagcctcctgtccagtcgtgtgccttgcatatccttcagaagctcgatgagctcgttgaatcggctgcatttagagaacacccctaccatgagcccagccagggccgtgtccacctttcctcctgtctccctgaactcctggtacaaatccatgcaccggtccagttctcctgaccggttgaacgcgttgatgatcgcggtgtagctgatcctgtcaggctgaatcttgcggcgcatcatctccttccagatcttctcagcctgcctcgaattcccgagtcttccgtgcatgtccaggagggagttgtacacccagatattaggctcgcaccccttcttcttcatcacagcaagcagcctcatcgcgtccgacgctctactgatcttcccatacatggagatcatgttaccatatgcaaccacacacttgtcaaagcctcgatcgatcatctccgagaagaccgattccgccctgtcgctccgcccaagctggcagtaaacgttgatgactgatgcataggtgacctggccaggctcacatcctaaagcaatcagcttgtcataagctctgatagccggcttgaggcctctcctcttcacaaagccattgacaatggttgataggatacaatcggtgaccctcagaccagtctccctcatgtccttggcaactcccattatcttctccactctcccggcctcaacatgcatgacgatcaccttcaggaacatgtccggatcccccagcctccctttcttccatgcttcgttgtacaggtcttctgctgcagaagattcatgggcatctgccaaagatctgatgatcgaagagtagattgtggcattcggcgcgatgccgtctgcttccatctctcgcaggcatttcagcgcatccgaggctctacctgctcgtccgagtgcgtcgcagacgatggcgtatgtctcgacacagctttcagaggggtaccatttgtgggacttgtactgcttgagcagtgaagccaccatctccggcttgcccaacgccccgcacgccgccatcacggcgcggtaggcgtcggcgtcgcgcgacaaccgagccgccctcatccgctcgtacaccagcagcgtgctccggtacatgtgcagcttgttgtacgcctgcatcgccgagctgaaggcgacagcggcaggtgcacccctcttgccttcgaggaccccgagcaccatgtcggcgagcccgaacttcctcgccttgacgcagctcgcgacgagccgcgcgcacgtccgccgctccggcatcaccccataggccctgaaatcttcaaccaggaactccagcgagctccactgcttagccctgagcagctgcacggtcagggcgttcatcgtcttcttgtccggcaggaactccggctggtgcagagccctcctgtagcactcgaaggcgagctgctcggtctgccggtcgctgcagaggccccggatgaacttgttggatatgccgagcttcggagcatccggaagcggggacaccggcaccggcgccggcgtcgaggcagacacagcatggaactcatcgggcaaattcttgggctcaagaagaggggaagcacacgacctggagcagtgcaagacgaacgacgcaagctgcctcctgatcgtccaaagcgaggtctgcgatggtgttcgtctcggtggatggagaggggggagaggaggccactccgagtagcatttggccatcactctggaaactagaggtcgggagtggaagaacctctctcgtctaggttgagagcaccttatcctgccatggagattccattgggttgtttttcacccgcgccttctggcggtgatgtgtccagtttggacgggtgagatgcagccacacagataggcaaagaaattccgggagatccctgacgtggaggtatagttaccctgcaagtgaaagaagctcaaatttcgggggaattgcggtgaaatcgctgaccagttcggtttctggaggaggggtttggtccacgtagctcaagcccagcggacagccaccagttaacttgtgacgccacaaatcaatcagggaaaagatctgaaatgcttggaggcaaaattggactgcgagacagcatgacagctaccaacagttttgtcttcaaatgaaaccatcactagggggaacaacacggactgcagcaacttcttccgagagccacaaagattctggcaatgttgtggccaccgagtaaccagagaaattggaaacgtaataattttccttacgttcctggcctgtcttgaccagggctctatgatcacaacaaagttcatgccaatatctcaatactgaaatgcagatagaatccaagacggaaaggaatttgcgaaggccaagctaaaagaataactttttagtgtcattttgagggtggtgatgatcagatgatgcagctacagtttccacaaacaacttacataaaccattatgcaaaaataaggcggaagaacagaacacaaaaagagaacgaaaatttggttgataccttcacttgccattcaccagggtagtgctggcgagtcaaaaacaaaacgcctctacttctgcggagtaacatgtcgacgaaaactggccacagacctgaattgtgtaagttctttcttagcttggagaagtagatagatggaaagaaaaaaaaactcgatacactcaccttttcttctcactaacattgtttcctggtcatctgcatctgaccaacagaagcctactgtgcgttccagccctctatatctaaatagataaactggttcatct

SEQ ID NO: 17644 - DNA, 959 bp, Oryza sativa
  ref <308>: DATABASE ACCESSION NUMBER: AK068075
  ref <309>: DATABASE ENTRY DATE: 2001-12-06
gagggctttgctctggtcttgcaagttaggttagtgattagtagcagcagaaagagtggaagatttagaggataagggatagtttggtcatgtcggatacagccttgtcgggcgcgccgccggcggcgaggtcggaggattcgtggagtcagcagcagagctacaacttcagcgggcgcgtgctgctcacggccgtcgtgatcctgttcgtgatcgccgtcgtcttcgccgtcacccgcgtcttgctgtactacctcgtggtgcggcccggcggtggcggcggaggccgtcgtcgtggcggcctggcaggggggatcttgcggtcgttgaactcgctcggcgtgagcggtcgccgcgggctggacgcgtccgcgctcgccgcgctgccggtcaccgcgtaccggaagaacggcggcgggggcggtggtggggagggctccaaccgcggcgggcctggcgccaccgccgccgactgcgccgtgtgtctgtcggagctcgccgacggcgagaaggtgcgggagctgcccaactgccggcacgtcttccacgtggagtgcgtcgacgcgtggctgcgctccaggaccacgtgcccgctctgccgggccgaggcggaagtacccaaggcgagggcttcggcggcggcgacggcgacggcgcagtcgtcgtcgtcgctcggtgacggaggaattaccgtggtcgtgaccatacacggcggctctgacgaagccggtggcaggtcaacggcgttgactggtcaaccgggatcctcgaactctcctagctgcgaggctgcaaggaattgaggatcgacgatgacgacgaacttcagagttgtgatgtgattctttattttgctataggagctctatcaagtgtagattgtgaaacgcatttgtgatgtgattctttatttctttcccatatatagctaagaaacaactgcataatacattccccgc

SEQ ID NO: 17645 - DNA, 1581 bp, Oryza sativa
  ref <308>: DATABASE ACCESSION NUMBER: AK068076
  ref <309>: DATABASE ENTRY DATE: 2001-12-06
gctgtctccctcgtagatgttcgatttgtactttggagtatatttgaatcgaggaaagatgatggtgtgaaggtggtctctgtggagaatttgaagaatccttatgaaaaacaagggaacttcaacatgcgattcaagttgactcttaacaagctgtatgcatggagcctagtttcctatgaccgagttgttatgctagactctgacaacattttcctccagaacactgatgaattatttcagtgtggccagttctgtgctgtcttcattaacccttgtatcttccatacagggctctttgtgcttcagccctcaatggacgtttttaagaacatgctacatgagctagctgttgggcgtgataacccagatggtgcagatcagggcttccttgctagctatttcccagacttgcttgaccgaccaatgttccatccaccagttaatggtaccaaacttgaaggaacatatcgtcttccgttaggctatcaaatggacgcatcttactattatttgaaactccgctggagcattccatgtgggccgaacagcgtgattacatttcctagcgctccatggtttaagccatggtattggtggtcttggccagttttacctctgggactttcttggcatgaacaacgccgtgaaaacttggggtattcatcggagctaccggttgtattaatccaggccctattttacattggagtcattgcagtcacccgacttgcgcggcctagtttgtcaaagatgtgctacaacagaagaatggagaaaagtactatagttttgctcacaacactcagagtagtggcagcatggtccatacttgcagcttacaccatacccttcttcctgatcccacggacggtgcatccgctactaggttggccactatatttgcttggtgctttctccttttcttcaatcgtgatcaatgtattcctcctccacccccttgcggtcctcacaacatggttggggatcatcggtgctctcttcgtgatggcattcccatggtatttaaacggtgttgtaagggccttggcagtgttcgcctatgcattttgctgcgctcccttgatctggggatctttggttaagacaatgagctccttgcagatcctgattgaaagggatgcattcagacttggtgaacctaaccagacagccgagttcacgaagctttattgaggtgtgtattgcagattcatgtcattgcatttcatcagctaattccgattcgcattggctattctgatggccaattcagttgtacaagtaaaaccgcagatgaaactacagttgcacctttaacaccacctgaaacctttggagcccgtgatattcttcgtaattgcgtaggtgacatacagggcaaagggagagaacatagtttgatgtttgtgtgtggggggtgttggttgtggaagtggaactgcagaggaacattatagagtaatttttttgttacttcatttactgctcctctaaaagagccaacacattcttggctttcttgtaattgatatcatcagttccacacgtccactatcatgagattcaggtgttctttgc

SEQ ID NO: 17646 - DNA, 1424 bp, Oryza sativa
  ref <308>: DATABASE ACCESSION NUMBER: AK068077
  ref <309>: DATABASE ENTRY DATE: 2001-12-06
ggcagagccaatcccagtggcggcttcgccttcgtgcccgacgaccacctcgagcagaaggaaacgaaagtgtaggaaggatggtctcctctacttccggaggactctcgccgccggcggttgtgctggccgtggcggttgtgctgtcggcggcggcgtcacgggcgctggcggcgccgtgctacccgcgcgtgttctgcttcggggactcgcttacagacaccggcaacatcgctttcctctacggcaacgactcccgccggccctcgctgtggccaccctacggcgagaccttcttccaccgcgccaccggccgctcctccaacggccgcctcatcatcgacttcatcgctgaagcgatggggctgccgttcgtgcggccgtactggggcgggcagaccgcggggaacttcgccagcggggccaacttcgcggtgggcggcgccacggcgctcagcccggacttcttccgggagagaggggtgcccatggacgacgacaccgtgcacctcgacatggagatggagtggttccgtgatctgctcggcatgctctgcaccggcggcgacatgggcggttgcaagggcatgatgaatcaatctcttttcttggttggagaaatcggaggcaatgattacaaccttcctcttatgagcggcatgtccattgaaaagattcgcaacttcactcctagtgtcattgccaaaatttcttccataatcaccgaattgattggacttggggccaagacactagttgttcccggtaacatcccaattggatgtattccaatgtacctcatgcaatttgagagtgataagaaggaagattatgagccaaagataggttgccttaggtggatgaatgagttctcgcaataccacaacaaacttcttgtagatgaattggaaaacttgcgcaagcttcatcttgatgtgaccatcatctatgccgattactatggagctgccatggaagttttcctttcccctgaacgatttggaattgaggatcctttggtcgcttgctgtggtggaagaggaccttatggtgtatctgcatctgtacgctgtggatatggcgaatacaaagtgtgtgatgacccagcaaaatatgcatcgtgggatggcttccatccatcagaagctgcatacaagggcattgcaattggcctgctacagggttcatacactcaacctccaattgttagcatcactaattcttgtccgcagataattggccttggttcctctgttgaacacaaggccatgtacgacttgtaattctgtaattatattttgttattattatacacaatatgtgattaaaatatgtaaaggaatattgtggtattgttgtctcattatagaaccacagtactgttctacatcacaactgttactaaatgacatgttgacttttcc

SEQ ID NO: 17647 - DNA, 3874 bp, Oryza sativa
  ref <308>: DATABASE ACCESSION NUMBER: AK068078
  ref <309>: DATABASE ENTRY DATE: 2001-12-06
ggccgcatccccctccgggctccggccctcccatcctctctctctctctctctctcgctcgcatcgcctacctagacgctgccgccgtcgcctcgcctccctatcacgcccatcccctcccttcctcactctcgcgcctcgctgccacgccgcgccgacgccgtcgccccgccgccgtcgtcgccgtacgccatccccccgccgccgccgtgcatcatctggcgccggtcccccccttcccccttcttcgccctcccctcgcggcggcggcgtaaccggcgccagtatccccctcccctcgtggcggcgtcagagtcggctccggtgctcccctccctcctccatcccctttcgacggcgttggggatggtggcaacgccggtaggggtggcggtgtgaggtgcgggtagaaaggagctggtgacgggcggggaagaggtgtcccgatctgcaccgactcgatctgcgcgagccgaccccgcgccggattgagcagggtatgaggggagaggacggcggcatgggaggaggaataggacaacgccgatggagaaaggggagaggagtgagaggctgttctacaagctcctgatcgacaacgtggaggagctgctgccggtggtgtacacgccgacggtcggagaggcatgccagaagtacggcagcatctacaggcggccacagggcctgtacatcagcctcaaggacaaggggaagatccttgaggtgctcaagaactggccggagaggagcatccaggtgatcgtcatcaccgacggtgagcgcattcttggccttggagatcttggttgtcagggaatgggtattcctgtcggcaaactgtctctgtacactgccctaggaggagttcgcgcgccttgcctccaccttcacccgtctgccaccatcatcgccgccatcacctccgtcctcgccccctccctcacgcatcgtttccctctgcgcttcgccttgtctcccctgcgcgtcgcttccctccaccctcaccgcatcgcgcccctcatcattccctcgtgggtcacctccttccacatcgctgcatcttctggatttgtttgcagccgccctcttgcagatcatccctgatccattcggttagcgtcatgccgccgccggattgccccgtcgactggtttccctcacaccgtcatgcctccttgccctcatgattcacacgacgagcgagttcctgtcgatgagccagcaagatgagcattgtcgctgtcgcatcaccgctggacaagtggacaaccccaaaaccagggtatcattgtcataattagcagatttcctccaatcaaggtctcgacaaattctacatatgggctcagttttctggaaatggaagatgtgggggtggaggcaagggtagagtgatgcaaatgcttcatcgggccacgatcgtctgtcggccttctggctgtttttgcacctgtcctgtccaccgctgacggcgcaagggaacttcggtgagctgtagcaggtaagcaacaagaagcagtgatggattagctttccctttaaggcaggtaatagctgacttgagttaatttattaattggtggattactcatgcaacacctgccagtttccattattcttttatacttttttattgaaaaaaaaggaattttcttacttctgtcaataaatataatactatggacaagcacttttgtttgattgtattaaaagaaatactaacaaatgttaatgagatataaagagaatcctcctatccagtttactccttttgttggtgctatttgattgtgacttaaacggaccgatgatgtaaattcatttgttatacacttactctactctgcacaataggtctctgattaaatgccgctgagggagggtttgttctggttgatgaattttcaagcaaatctgttaatgatctttacaaggtttctatgtgtttttatgtgttttctgtgagatctttacaaggtttcggtttggggtacaaattcacattcgatctggatttcattttggttttcaagtgaagcaaacaagccaacataaggccctgccaggtatgagtttgctgctcctactgtatgtgcatgtagcagagggcgagaaggaagagagaaaaaagtagagcaagaaaatatttaacattggaattgggagatgttagtatggaattgtgatcaaccgtactgttgtgcactgctttagctgaaaccatctgagtgacaggagaggaactggaagtcgtgcattgatacaaatgatatttttgtgatttgtagcctgagatcaaataaaatttagcaactcagccatatttcagagcctgcttcacttaggcaatgtaaacttataaaggccttcacctagccaatactatttattttatttttattctcacaatagaaatgatattgttttcgatgcccctaggtggctcacaccagtctctgccattgccagtttgggtgcctaaatgaggccggtgccgttgaatgacagccatatttccaaggtgagtatttgaaaccttctctcttgtggcaggttcattcggttatgtatttcgttcagctgaggaattatcctttgatcatggccgttataaatgaaataaaagctgaactgcactatgttcaagatataatttatatacttggatagccatgattctgatttatattttaggggggggggaccatgcttctgaaatttaccatctggaaaatgtccttgacattgcttactgtacactatgacttcccacaaaaatacttgtgtattttctagccttcataattatttcccacaaaaatacttactgtatatgtttctcaaatttaccatctggaaaaaaaaatcccaaacattgtttactgtacactaagattttccaaaaaatacttatgtattttccagccttcataatgatttcccacaaaaatacttactgtatactgtatactaaaatttctgagtttaacattgcagtcttctgaattgatacaggactcacagctgatacactgagtgcgacaaaggtgagtcatgtgcggcaaatttgaggatcatgtatattttggtattgctggcaggcataagtctcaccattgagcgaaacaccacattcataagtttaacggctgtttatctaaattcaattttgcaaaaatgaaagttttgtttaatggctgaaactgcacagtgctactatgatctcagaaccaaagaaattaattgtctgagtttcctaccagcaaattgatttgttcaaagatttaggtggtcacgggccataataaatcattgagaatatgtcatataacattcagtcatgtatcacaaacaatttgattttgacaaaattaggtaacacataaatcaatgtatgcaaacatccagatacctaacactattgactgcttttttgtttcgagggggctcactgcttatattttattgagcttagctatattgtatttctctaaactgcataaccatctcactgcatagcccatatctatataccaccgtgacaataacagctacatctctacaatcttactactggtaagaaatgaaggattggtggtacataaagtgcctcaagttgattgaaacaagcaaccatttgtagatccaaacaatatcgtcgttgttattgtcatacatcttgtttgtataacttacatatctttcagactcaaggtggcgaagtttgatctctaaaatagcaatcggtgttttctgcactcgaatatgtaaataagctgtagtgtgtcagatattacaatggtgttcattatagagcacacttgccgacaacattttgcagtgggcttatctatgaatattttttttattc

SEQ ID NO: 17648 - DNA, 4216 bp, Oryza sativa
  ref <308>: DATABASE ACCESSION NUMBER: AK068079
  ref <309>: DATABASE ENTRY DATE: 2001-12-06
gcacccattcgctcacgcatctcatttttaccccctccgccgctttcccccgcaaaaaccccccatcgccgccgtcgccgccgccgccgtcgtcggtcgccggagagtagcggagggtgtgctcctccggggcgggccgcgcgagggctggccggggcgccccggcgcggcgcggttttttcccgagaaaaggaaaagagttcattaacaagaatggcacagtttatgtgtctgtagctgcaattgatagtgaacacaatggatgagaatagaaaattatctgatgacatgtccaagaaaatggaacctattcactctaatggagaggcaggggaagataaaactataattattgaacctgaaagtgatgcaaataaacttgaagtggaaactgacgcaagacatggtatctgtgaggcgcacaaggcgcatgaatatggaacaatggaaaatgatttgcatgaggaagcatccaccaccgatgatgattcagagaatgactcatatgaataccttcttcgggaatcggataatgagcaaacttcagagtctgatgctggtgagggagacaatgaggcacctctcactgatgaagaagttgaaacattaattaccgaattccttgacgctgagagcaaggctgctcaagcgcaagaatcacttgaaaaggagtcactggaaaagattgaatctgaagtaaggttggagctatcggagagtctccaaggaaatgagttagagtcagccgtttctactgagatgaagcaatacaagaaggaatgggaatctgaacttgatgatttggagactcacattgctgttctcttggagcaacttgatgctgctggtgtcgaacttcccagcctctacaagtctatagaaagccaagttccaaatgtttgtgaaactgaagcatggaagaacagggctcactgggctggttatcaagtgcctgaggaagctaataaatcaatcagaaaagctgatgaatacctccaatcttgtagacctgtaaggagaaaacatgggaggttgctggaggaaggtgctagtggctttcttgctggaaagattcctgttggggatgatggatctgcacaatgccatgagaaaagttggaatgcattcgatgaacttaccaaatctaaggaatatgctgaaagttctttcggaagtagtaactgggcatcagtttatctggccagtaccccacaagaagcggctgctttaggtctccaatttccaggagttgatgaggtagaggagatagctgaagttgagggtgctgttagtgacataaaaggtgtcgatgaaatagagctttctgaagtacagagaagaaaatacagaaaggtaccagaagaggatgatgcaaagatgacaaaacgtctgcagcgccatttgaaagaaagaaggacaagacatttgcataaggagaacattggtttggcgtcatcatcaaatggatgctgtgagctgcctcccaaaaaactcaaaacatatgaaaatggagtttctgttgagctagcgaagcgcacacgtgaagatgatgttgagtttgacaataagaggtcaaaaactgtaattattgaaagtgatgatgacatgcagactgatagcaagccagattcagcaccaagtgaaaatgcggatgagattattgatcttgatatcttcccatcacaaagccctaaacttggtgataaagttcggcctaaacctttcaagtgcactatttgcactgaaatgttgaatgtccctgaagtgcaccgccacccagtattggatgttataatttgtggatcttgcagatttctagtgatagagaagaatcgtctcgaggatcctgtgtctggtggttattgcacctggtgtgtaaaaagtgaacagcttcaaagttgcagctcttgtaaactgcttttctgcagaaattgcttgtcaaagaattttggtgaagaaggcttatcggaagctagagtagctggttggcaatgttgctgctgcctacccagtcaactggaacatttaatttctgactgtgacaaggccctaggtggtgttgagtcttctgatcctgagaatgactttgcagagctttctgtattagagagcaatggtccttttagcaagcataaaatgaaaaagaggataagaagaatcatggatgacgaagaacttggagaggaaacaaagcttaaaattgcaatggagaaggctaggcaagaacatctgaagtccatgcaagagcagtctgccagcaagttaaagagcaacaatatcggaatttccttggaagcaccatctgaggtttctgaatatgttggggatggacatatagtaaaccttgcccgcgaggaagatgaagcacctgttagaattccaagcagcttatctgctaaactgaaacctcatcaggtatcaggaataagatttatgtgggaaaatgtgatccaatctgtcaagaaggtcaaatctggggataaaggttttggttgcattttggctcacaacatgggccttgggaaaacttttcaggttattacattcctgtatactgttatgagatgcatccagttgggactgcgcacggcgcttatagttacccccgttaatgttttgcataactggaagaaagagttcatcaaatggtgtccagcagaacttaagccacttcgtgtgtatatgttggaggatgttccaagggcaaacattcagtatttactaaaaaagtggcgaataaaaggtggcgtgcttctgattggttattcatcatttagaaacctttcccttggaaggagtgcgagggacaaaactgttgcaaacgagatcaccaatgctttgcagtgtgggccagatattcttgtatgtgatgaagcacatataattaagaacaggagagctgacactacacaagctttgaaacaagtaaggacacagagaagaattgcgttaactggatctccattgcagaataatttgatggaatattactgtatggttgattttgttagggaaggttatcttggaagtagccatgagttccgtaacaggttccagaaccccattgaaaatgggcagcacacgaattctacatcagatgatgtcaagatcatgaaccaacggtcacatattctgtatgaacaactgaagggatttgtccagcgaatggacatgaacgtggtgaagaatgatctaccagaaaagaaggtttttgttgttactgttaaactctctcaactacaaaggaagctgtacagaagattcttggacgtgaatggtttctcaagcagtgctgcttcagaaaaatcttttcagcggagtggcttctttgccaagtaccaaacgttagcgctgatatggaaccatcctggtcttctccagatggctaaacagaaaggaaatttgcgccaagaagatgtcgagtcctttctgatggatgagagctctagtgatgataatattgaaaattacttgccaaatggagggaagctgagaagcagaaatgatcagctatccaagaaaagttctgatgttgtaaatgaggaaagtaactggtgggagaatcttttagatgaaaatgcttataaggaagcagattatagtggcaaaatggttttactccttgatatcctgtcatcatgttctgaattgggtgacaaggcattagtgttcagccagagcttgagcactctggatttggtggaattttatctatctaagttgcaagttaatggaaaagagggcaaatattggaaacaaggcaaggattggtacaggattgatgggagcactccatcttctgagcgacaaaatcttgtggagaggtttaatgaccctgaaaacattagagtgaaatgcacattgatatctactcgtgctggatctctaggcattaaccttcattcagcaaaccgtgtgattcttcttgatggttcatggaatccaacccatgatttgcaagccatctatcgggtttggaggtatggccagaccaagcctgtgtatgcttaccgcctaatggctcatgcaacaatggaagagaaaatatataaacggcaggtgacaaaagaagggcttgcagcaagggtggtggatagacagcaagtgtctagaacaatctctaaagaagagatgttgcatcttttcgagtttggtgatgaggaactactggagcagagcggttctaccatgaatggtcacagtaaagttgggactg

SEQ ID NO: 17649 - DNA, 1166 bp, Oryza sativa
  ref <308>: DATABASE ACCESSION NUMBER: AK068080
  ref <309>: DATABASE ENTRY DATE: 2001-12-06
gaatctatccgaacgctctagatcttatcaagtggcgtcggcggcgatgtgcgaggaggcgacgcggagcagggtgctggtggtcggcgccaccgggcggctcgggggatgcctcgtgcgcgccagcctcgccgccggccaccccaccttcgcgctcgtccgcccccaccacctcgctgtccccgactccgccccactcacgtcgctcgccggcgccacggtcgtgaagggatcgctcgaagattacccgagcctgctggaagcggtgcggcaggtggatgtcgtcatctgcgccgtgcccacgaagcaagcgctcgagcagaagcttctgattcgggctattaaggatgctgggtgcgtgaagagatttattccagcggaatatggacttgatcccacaaaggttcaaatttgtggcatggaccatggcttctatgagaagaaaattgaaatacgccatttaatagagagcgaatgcattcctcacacctacatctgctgcaacttcttgatgcgttatttgcttccgtcacttgttcagccaggactcgatgctcctccaagagatgaagttaagatatttggtgatggaaacactagaggagtttttgttgaagagactgatgttgctaaattcacgatctgcaccatagatgatcccaggacattaaacaatacgctgtatctgagaccctcgggaaatgtctactcaatgaacaaattggttgacctctgggagaaaaaaataaataaattcctggacaagatatatatcacagaagaacaactcctgaaaaacattgaagatgcaccattgcccttgaagatggatttgatatttatatattcaacatttattaagggtgaccaaacatattttgaaattgactcgagaaaggaaggaactcaattgtatcctcatgtaaattataccacagtggatggttatttagataaattggtttagaatattaaatatttgttttttcctgtactagtaccattcctacctctattagttatattacctttcatctctagcctacctcaacttgctagggacttaaggttattattcttgtatcttgcccataaacaatacccttctgttaaatggtattttgaaagaattgcaaaatgacaatcaagtcttagtttgtatgtcc

SEQ ID NO: 17650 - DNA, 2159 bp, Oryza sativa
  ref <308>: DATABASE ACCESSION NUMBER: AK068081
  ref <309>: DATABASE ENTRY DATE: 2001-12-06
gtctttggacgggcgtcggcagtcatgagttcactgtgcggttgtacatgcggctggttgaccacgcgcgagctcgtccagccccaccggcgaacacgcgaggatgaagcgtcccaacggctcggcctcgaccgagggcgcgcacggcacccattcccatcgctccacggcgctgcccaccccgtcacgtagctcgtagagcacggctccgattgtcgggtcggccgcattgtacacgtaccctccggcggcgttgccgcacaccccgatcgacggcgacatctcctcttcgtcctcctcatcgccgtcctcgtcacgggggaacagcctctcggacatctcccccggcatcgtgtcgtgcgccgcgccacgggacagcgcgaggccgtcgccgtccacttcccacgcttggatgacgactctgctcttcgcttgctcggctctaccgcagcgcttcgctccgaacaggacgagccgctcggcgccgccgcggccgggggcgaggccccatgtggagacggtggcgtcagggcggaggcggcaggtgggtccccactgctgcttcgccggatcgaaccagcttgcccacccggtggatctgtctgtgaggtacactcgctgatccgtcgcggccaccgagagccgccatggccgggcctatctcttcgacagcgtgtaagctgggctatccatccactatttccatttccccctctcttttgattattgcgtttctatgcatgacagtgacgcgatcgtggcaatgtcgctgtcctggaaaggattagcgtgtccatggacggggaattgtggaattgtcttgtaacagtgctgtttaatgatggatttctcgcgtattgttgttttgggatgggagggaaaacggcggtatcttatattggtgcaattaagctagattgcaagcgttcggaagtagattcatgatgtggttgtgttggatttgatcagtactgcgtggctagggcataagaggctaataagagctatgcaaattatgttccacatgataaattgtcttgttcttaatttttttggtctgtcaatctagacacagatggaactgataggaaatgccgaaatgttgatggctagtgttaagctacagagctatagtttggagattaattagccacaatctcttgttagatattacatgatggaaaacaacatcatgcttggtaaagaatgaagatgaacagagcaaggtgtgagttgagaacttaattcattgtagctatgtcaatctgatatgttgcaaaggtggctcttatcttaaacctagtaggacaagggttcatgtactaatcctaataggattttggttcctgcttctatttggactatgtatgccacaatacccaatccagtccagtattgctgctcacaaaatagggtatcagagtataacatgctattatatagtttttcttagtctatttttcatatctttgtaactgacctactactggatgttaaaggcatgcgaaggttatgttttgtgaaatcagttgaacatgtaaaccatatgttgttttctgaaataggcaagcaatataccatgtacttcgtttgtttaaatgaagtatccttgtctggcgtttatttttgtccgatccaacaaacaaacatgataattagggcaatgttgttaatgttgcatcaatttacatcacagtattagttaaggcataattggtcattcaaattgataatttgaacaaccactctcaaccaattcttgtttacatgttgatccggagtgaacatgacatccagggtgaacgtgagccttggtcccagggaggatcgccttctcatgactggattgcacacagtgaatgatatctattgtagctgctgccaacgactccttggttggaggtacgagaaagcttatagtgaggaccagaagtacaaagaaggcaagtatatattagagaagcacatgatgctgaaagaaggatagtgattggaaaaccgctgaactattaagtctgcaaatgcaggcatatgaaaccatgtaaaatatcgctgaatattgggtttcaattctccccaaaattgattatctggcgaggaccatcgtcattaaattgcatttatgaaatataatgtcatgtgaaatccactgttcttcc

SEQ ID NO: 17651 - DNA, 1360 bp, Oryza sativa
  ref <308>: DATABASE ACCESSION NUMBER: AK068082
  ref <309>: DATABASE ENTRY DATE: 2001-12-06
gactgcctgaaccaagaacactgccctcctccacacgacatggcttctcaagaagagaagacgagcgtcaagtcggaggaggcctcgtcggcggcggaggagcagccacctcaagctgcagctccgccgccgcgcaggggtgtgccgccggccaaccccttcgacttctcaaccatgatgaacttgctcaatgatccgagcataaaggagatggcggagcagatcgccaaggacccggcgttcacggagatggcggagcagctgcagaagacggtgcagtcgccgccggcgcggggggcggcgcaggaggctgcggcggcggcggcgccggcgctggacccgagcaagtacgtgtcgacgatgcagcagctgatgcagaacccgcagttcgtggcgatggcggagcggctgggcagcgcgctgatgcaggacccggccatgtcgtccatgcttggcggcctcaccaaccccgcccacaaggagcagctcgaggcccgcatcgcccgcatgaaggacgacccctccctcaagcccatcctcgacgagatcgagaacggcggccccgccgccatgatgaagtattggaacgaccctgaagcgctgcagaagttcgggagggcgatgggcgtcggcccgtcgggcgagggcgcggcggcggccggcggcgagcacgaggaggcggaggaagagggcggggaggagggcgagtacgaggacgagtccgtcatccaccacactgccagcgtcggcgatgtcgagggcctgaagaaagcattggaggaaggcgtggacaaggacgaggaggattcggaagggaggagaggcctgcatttcgcttgcggctatggcgagctgaaatgcgcgcaggttctcctggaggccggcgcggccgtggacgcggtggacaagaacaagaacacggcgctgcactacgccgccggctacggccgcaaggactgcgtcgccctcctgctcgaccacggcgccgccgtgacggtgcagaacctggacgggaagacggccatcgacgtggcgaaactcaacaaccaggaggaagtcctcaagctgctcgagaagcacgccttcgtatagaatgaaacaatcgaggccaggccaggccaggccagccacactcctctctctcaattcagagacaaatgctgcatttctgctctgcatatgctcctgttcatccgcaaatgagtacctgtatgcttctgtatgtatcgaagagtgcactagattattttttatttcacttgggagcaaggttaaggtgagattggattgctattctattcatccttccagagttttgtttaatgaataaggaagaaaagtaaatttcatttcagtgttt

SEQ ID NO: 17652 - DNA, 1931 bp, Oryza sativa
  ref <308>: DATABASE ACCESSION NUMBER: AK068083
  ref <309>: DATABASE ENTRY DATE: 2001-12-06
gtttcctaaccccaacccccgcctcgcccgcccgattccccgccgccgccgccgccgccgccgcggagctcgccggagaagcggcactcgcagaggagtggcccgccatggggccgccgcagcaggccaggggcggcggcatcgacatcgaggcgtgcgcgcgcccgatcgccgtcgaccaccgcatcaagctcccctactacttccgcatcgccgggaacctcctccgccaggctaagatatatcgagacgagaataatctcgtcgacctgtatgtcatcctcctgcgttactcgagcttggtttgcgagacgattccaaagcaccgtgactaccatacattcaagttgagagaagtggatttcttcaggcttgctccacataatcaatctaaactaattgaagtgctcagtgagcttgagtcactgaagccagttgtgcagcggcaaatcactgagcataacagagcaagaggaggtgccatcgaatccaatagtataaatggaaccattgctgtaaataatataacaaaacagcatatgacaaatccttatacatatcagccatttgtaggaagcaacaatggatcatttgaaagacctgtccctggtgggaatcatcaaatggcaccattaatgagtgctcaacctgatagactgacccgcaaacaacttgcaaatctccctttccctaaagaagaaacattagctagacactctatattgggacctaatgggcttcatgggcaatggactgggcctgttactgcaatcaaggttcagtatccaagcaatcttgatataataaaaagcgatgtgtctagtttatttccatctgtcttgaaccaagatggtcagaatggtcccagtacaatatccacagatagcactcaaattgagaatgatgatatgaaatctgttctgtcccttgatgatggtcgatggtctaagctggcagaggaatgcgcctctgtaccttctgttagtctggaagaagaattatcccaattgagtatcaaacagccttcacctcctccagtcttggcagagttagagcgcaggccaattgctccatcagaagttgcagatccaacaccaggacttgctgtctcagaaaccgggcgttatcagaacttacatgttccggtaaagttgatggaatgttttctaagggttgctgaggcaaacactaagagaagtttagaaacatgtggagttcttgctggtaccctgaaaaagagaaccttttatgtgactgccttgataattccaaagcagaaatctacatctgattcatgtgaagcgacaaatgaagatgaattatttgatgttcaggacaagggctcgcttttcactcttggttggattcacacacatccaacacagtcctgcttcctgtcttccattgatctccataatcattattcttatcaggtgatgttacctgaagcaattgcaatagttatggcacctactgacacaagaagaaaacatggtatatttcatctctctgatcctggcggtatgggtgtgatccatgattgcccggagagaggattccatcctcataaggcccctctagatggttcaccaatttatgagcattgctcccatgtgtatatgaaccccgatgtaaagtttgatgtgattgaccttcgataatggtgagaactccatccgcgaaagactggcagctgaacaagttggctgcctttatttttttaactgtgctgaagaatctcgaataccgatgtaagtgattgtacatagctatttgcatgtatagagttccgttgaaatgaatatcttcggtatctatggggaatttatgaatttattgtatttcattatactcacttagctctcaagatatacgcttgtaagacgaggtggaaatgttcaatctcatttttatgccaagtcaattgttgt

SEQ ID NO: 17653 - DNA, 1626 bp, Oryza sativa
  ref <308>: DATABASE ACCESSION NUMBER: AK068084
  ref <309>: DATABASE ENTRY DATE: 2001-12-06
gacactcggcttgcttccactctgcacactcaagctgtagtggccactattactagtttacttgcatctaacttcctccaagcttctaaccaccgtcttgccatttagggttagctgactgccaatttcaagaacataccggtcactcttgccataactgatcactttcctgcatatccagcatatatatacatataacagtaacgcacatttgaattgggtttcagtttacaatttattgctgctcaaatggcttcttggatcatcactcgatctacttggatcatgagtgtgttcttcgtcatcctatcattctttcaagggttggtaatggtgggcggcgtgacgttcacgttcacgaacaggtgcggcggcacggtgtggccgggggtgctgtcgaactcggggagctcggcgctggggacgacggggttcgcgctgggcgccggcgagacgcggtcgctggcggcgccggcggggtggtcggggaggttctgggcgcggacggggtgcacgttcgacgacgacggcaagggcacttgcgcgacgggggactgcggctccggcgaggtggagtgccgcggcgcgggggcgacgccgccggcgacgctggtggagttcacgctgggcagcggcggcggcggcgggaaggactactacgacgtgagcctggtggacgggtacaacctgcccatggtggtggaggcggcggcggcggggtgcccggcgaccgggtgcgtcgtggacctcaaccagcggtgccccgccgagctgaaggccggccatggccaggcttgccggagcgcgtgcgaggcgttcggcacgccggagtactgctgcagcggcgaccacggcaatccggacacgtgtcacccgtcggtgtactcgcagatgttcaagagggcgtgccctaggtcgtacagctacgcctacgacgacgccacgtcgaccttcacctgcaccggcaccgactactccatcaccttctgtcctcgacccggcaatcccaacagtcagaaatcgagcaatgacccgtcgccgaggccgaaggatccgcagctggaggacgactcatggctggcgagcttggccaccggcgaggtcgacggcgcggcgccggcgtcgacgtcgttgttgctgcaagccacattagcagtggcagtaatggctttgcttgtgctacactagctagctaaagattaaattggccggatatttcagtcaaaaaaaaaaggccggataggagatgaccctgatgtggcaagaggatggagattcttgatcggtaggaagtggccggtgttgctttccgatttttttaaaaaaacaagattggagcagtaggatgaggacgtgaagcgatattctttagccttttgcttgtggatagaagtattgaagctctgtggacttctagtggtattatgacttgttaaggtgtcaccgtgtcagtcaacaagaactctctgcaagactgcaatagttttctgcctttcaggaaacttgctactttagttacttcttgtgtatagatttttgtctttttattattatttttttgcccccacatatattcatgtcacacgctgtattccaagtaaagaaagtatatagtaaaatttcatc

SEQ ID NO: 17654 - DNA, 1515 bp, Oryza sativa
  ref <308>: DATABASE ACCESSION NUMBER: AK068085
  ref <309>: DATABASE ENTRY DATE: 2001-12-06
ggatggagatggagagagccacagaaatgggggccaagagcggcgcccatttttagtcagccacggcgagggaagaggagccaatcttggccaagccaccctctccaagaatcctcgctgatctctctgcgtgaggcgctcaattcgatttcttggggggtcgattcggatttcttgggatgcagtgggcggcgctgagctcgccgccggcaccggcggcgccggcggcggtgtggatggggcggagggcaagaaccgcgaggttgccgtcgccggggccgcgccgggtggtgctggccgccgcggcgtcgtcgtcgtcgccgtcgccggatgcgaactcgagctcgaactcgaactcgccggggagtggtggcggcggcgaggaggtggaggaggagagggaggacgcggcgcggatggagaaggcggcggccttcctgatgcggagccagaagtacgccatgctcaagcagcagctcgccgtggccgcccagttcgaggattacaaggaggcggcgaggctgagggattcgctcaagtcattcgaggaggaggagccagttcttcgtctccgccgatcgctcaagaaggcggttgaggaggagaggttcgaggatgctgctaagtacagagatgaactgaagattttggctccacacgccctcctaaaatgttctagtgatgctactaccctggggattagagttcaagtcaggagtgtttatattgaaagccggagccagcctttgaagggccagttcttctttgcctacagaatcagaatcacaaataattctcagcgccctgttcagcttctcagaagacattggattgtcactgatgcaaatggaaggacggagaacatttggggtgtaggtgttgtgggagagcaacctgtcatatttccaaggactggttttgagtactcatctgcatgcccattaaacacaccaaatgggagaatggaaggtgattttgagatgaagcacatcgacaaagctgggtcgtctatattcaatgtcgcaattgcaccattctctctgtcaatccttggagatgacaacgatgatgttctcctctaaatgtgattgggtatcagaatgagtttgaataagatgatgtcaccagcaaggaatttgcataatacacaaacacgagtagtgctgttagtgatgtggctagagttctctactggaaactcctgcgaatgcaaatttttgttaagctagctgtgaattgggaaggtaccaaagttcaagatcagagtatcagacaggcaaaacatggtttggtgaaatattagagttaatttagacacacacacaaaaaaaaactacactactgtaaattgaggtatatgatggacttgtgtgtcatctaacttttgaatgtacagcatagaactatatagagcttgttgagagtataagctgcatggaactcttgtattatctcgaaaaaatgattttgtaatgttatagtttcataaatatattgcactaggatttactggtc

SEQ ID NO: 17655 - DNA, 4390 bp, Oryza sativa
  ref <308>: DATABASE ACCESSION NUMBER: AK099037
  ref <309>: DATABASE ENTRY DATE: 2002-08-28
gtacctccacctcacctgcgagcagcggtgcctcctctcctcctctgctgcctccgccgcgcgcatcctcctcccatccatctcttctcggcctcggcgcccgtttcctcgctacttcgccgcctgcgccgatctccattaatccatccatcccgcgagggggagcagcggggtaggggtgccgtcgtcctgccgcttccgcctccggactagggatcatgtcaggaagagatcgtctgccacgtcgctttatagaggatggcaggggctaccctgacatccgtgtagttgatgaacgtaggggctatcctgacatccgtgtagttgaggatcgtaggggctaccatggtattcgtgccattgaggatcataggggctatcctgacatccatgaaggccttgtcatgagggttgcacctcgctctcacacggctatgccggaggaagaaattgagattcagggggccgaattcaggaggcttatggcagatcaccgtgctcttgctgaagaacgtttggccttacaccgggaattacaagctggaaaagatgaggtccgtcacttgaacacgatcattgcagacatcagtgccaagaaggaaacttatatcggtgagcttgttgacaaaaggaggaaacttgaagctgaacttagagcaaatgagtctttaagagatgagattgtgcagcttcggggtgaaattgataagcaccttgtagtcaggaaagagctctctgcgaagtctgcatctatcatgcatgaactaaccagggaacaatctaataaacagcagattcctatgttgaaagcagagattgatgcccttcgacaggaacttgttcatgcaaggtctgcatgtgaattagagcagaaaggaaattttcagttggttgaacagaagaaagcaatggagaagaatatgatttcgatggcacaagtaattggacaaatgcgagcagaattagctaattccgaagggagaccatgggccccaggtgcgacatatgggatgaagctgggcagccctgaagtgaccttccctacttcatatggagataactacaatatccatgtgggaggttccgagaaaggtcattcacatcttcctgaatcaagctcatggggtacatatgacaacaatcgccttcagtaccgttaagatcgcagctgctatgaaaaaagtccgtgaagacttctgggtcccatggtcatatcacatggtttagattatcgtatctacctccttttttgtggtacaatcaatagttatctttcttaattaaaattgaaatgcctctaatcattttcttctctgtgtgtcatataaaatatgttccaatggtaactactgcttatactttggctcgatacctatatccaagtttccttggttatatggatccatgactcagttattttaatatgacttgggtatatatatgatatagtttagttaatgactcagtcatgccacatatggagcatgaagtctgaattctatgtggagatataattaagcatatcagagaaatgttccttccatcatgtattacatgtcattctgaaaaaaaaccagtgagctttttatgaaatgaatacacattgttgcttgtgtttactagtatgggtctataccctagattttactcttgacaataactaatttattgtttctctcacttttagttttgcaatggtatctatgttaagggcgttagtctctttatgctagattatttcaagcgtttattacttgttactagatttcatcaaacatggtcacatgggcagcaagctgttttttgtcgagctctcttgccaaattcccaaacggcattttcttcagataccatacttttcttatctaggttgacgtaggtcaatgcttttaccaatagtgaattgcgataagatgatggctagattaatgtcaaccgctgcatatttcaaagtataatgtatcagtgaaccaaagactgttatcagcagaaggggatgcaaaatagaagtgatgtttgttgtgttagaagttatttgcctcagtcaatctttaaggccatcatacctcgaagaagtctatatttaggatcatggttgccttccctttttggggggttttggctcaacttatatgatgtagtttacctacctaagttgttcatctgaatttgtttgcctttggacacatgaatgatgagtatttcacatttcctatccttgtgaactgttcatgtggaagtggaacttgttcttacataccttttgtgagcttgattagaaagtgcttctcacttatggggtttaaattttaattattaagtctgatattattctgaccgctcctaaaatattttgggactgcgtgtcctgagaccatagtttcaatctcatgtcgtattatagagagtgagcttagtcacagacttggcaggtactaggttttcaccattgtacatctcaatagatctagtggtcagtcaggaacatatttggccattttagaagtctacaggtaatattaacctgtatagctttacatatgcatgagcatatcaccttgtgctccctgaggtcagattaccacggtggctgcaactctgatccacgtgccactttgctacctgaggtcagattaccagagtggccacttcgctacttgtcaagttggccttgtcctgtactggattgtctactgggacatccaacttcaacatgtattagcagttctgctttctggaagtggagttttgataccagcagtttgtgtactaccaaaacctgaggttaatatttgagttgctgctactagcctttttcggggttcatggtggaacgttctaggtgatgttaagctgtacatagtgaagcatcactgttgctaaatttgccctttaccttgtactcttggaatgatgacgggcaaaataaattcttgcaaagtgtaggtggaactatgcatgactatcatcaaccaggtgttagagatgcataaagtggttccttctgagttacatgcctaaattgcaactagatgaacctgcctcctgttctaaatgtgatatcttcaagatgagcactatggacgctgattggcattttggtccattttctgtattttggaacctgggcattgctgatcgactaccggaaaggtctgcataaccatgtttggttcaaatttgcggagtgtcatttgcctaagcctggaaagaccatatatctacaaaatagtgtatcatgcctgaactgtatgaactctttagctctggaacgctgcctcaataaggggaaatgatatcagtggttctgtatggttgcagccaatggaaatttggtgtgctctgcctgtctgcaatagacttcttaaagcatgctgcagatctgaatacaaggtggctgaagaggttaccttccaatttttgggctacatgggtgcaccctttaacatacaaggtccatgtaaagagcttatggatattaagttgtgttggtggttcatggggtatagcttttgtggagaacaggaaatgataataaaattgatcgaattacagagaccgttctgatgttttcaaatgacacagacaagctggtgatgacttggcaaccatgaggttgaaatcattagttggtctgtccctctgactgaagatatattgcattaatgagaagacagggacatctgcttgaagaaaacagtaatacggggagctgctgatgccgaatcttctctagcagatcagttatgcttctaggcatgtgctctttggacaagcaacagatcggcatatctaaactttctgatctcaagacacgaaaatgttccatcaactggagacacgagcaaaatgttaaatcaaccaggagaatgcataagcatctacagtattaatgcttgatggagatgaatgtgacaccttcggatgattgattcataagcaggcattgttcttttgggagaaaggatagtagatattgattatgtactacggagctgtagaaactttcagctgccagcttgtcaagattataacaagttgctctcatcgtgtgctgcattcaggaaagatgtgaggcaggaactattataaggttgaactgaaagcctttcttaactctgtttgatcgaggccatgttgtgtagcggtattgatgatgatggttcttatggaaaacgaagagactaggacaagttccatcaaccttcttgataacaagcggatactgtacctgcttcattttggttaagagtgttgcttgaaatgaagatctcccaggtccccatgtgatatcacatcttctctgaagcttgtatatataactgaaatggacttgtgtcctgaaccgaacaattgtcagcatcatgcccaagcagaataaacagattgg

SEQ ID NO: 17656 - DNA, 1907 bp, Oryza sativa
  ref <308>: DATABASE ACCESSION NUMBER: AK068086
  ref <309>: DATABASE ENTRY DATE: 2001-12-06
gggaaaaaatatctgaacgggacggcgaccgagccaccatggacgcgggggcggagcccctcctgccgccgccggcttccgcggtggaccacctcggccgtccggcctcccgccgcacctccggccggtggctcgccgccctcttcatcatcggcgtggagatctcggagcggttcgccttcggcggcatctccgggaacctgatcacctacctgaccggcccgctggggcagtccacggcgtccgccgccgccgccatcaacgcgtggaacggagctgcgctgctgctcccgctgctcggcgccgccgtcgccgactcctggctcggccgctaccgcatcatcatctgcgcctccctcctctacatcctggggcttggcatgctcacgctatcaccggttcttgtacctcatcaacaagcagaatctggagataatgcagataataatgcatcctccagtatggacattcatgtagctttcttctacttgtccctgtatatcgtggcctttgctcaaggtggccacaaaccttgtgtccaagcatttggggccgaccaatttgatgagaatgaccctgaagaatgtgcctcaaggagctcatttttcaattggtggtactttgggatatatggcggcaatgtcattacagtttcaatcttgaattacattcaagataacataggctggcagcttgggtttggaatcccttgcattgccatgtctctttctcttgcagtattcttgcttgggaccaagagttaccgcttctatcctctaagaagtaacacaagcctattcgaccaggttgggaaatcgcttctagcaaagatacgatggtggtgcgcatcatggtgttcaaaatcatcaggggatcttcactgcacccaagcatcatcatcccagggagatcacaatgatgcagaaaaggcatgctttcctgatgaagccaccgctgtgcttaaattgttcccaataggggcaacctgcctgatttacgcaattgtttttgcccagtggataacactgttcactaagcaagcaagcacactagacaggtggataggaggtactcaaagaaccctcgcggtatcacaacgttgcaaaggattggaattggattgattatctcagtaattctgatggttgtctctgcccttgtggagacgagaaggctcatggtagcaagagattttggcctggtggacaatcctgaagccacaatccccatgagcttctggtgggtggtccctcagttcatcctgactggtttggctgatatgttcacaatggttggcctgcaagaattcttctatgaccaagtaccagatggtttgcgcagtttgggccttgctttgtacctgagcatatttgggattgggagcttcatcagcagctttcttgtgtatgcaattgacaaggtgaccagcatgactggggatagctggttctcggacaatctgaaccgaggtcatcttgattacttctactggctattggctgtgctcagtgttcttggtttagctgcttatctacacttttcgcgagtgtatgtccacaagaagaagggcatctcagtacagtgaggatgtgtcaaaagatgctgaaaatgcattggctatcacatgttggttgttggcatatcactttcgaagaccttcaggcggtaaaaggcttgcagcttgcttatgctgctgtagtagtgctgtacagtgccttcaagagtgaatgcccgtacgatgcttttctgttgctgcttgaagccttgaacgattcgcatggagaaggagatctagcctaggtgccacagcaagtaaaaattgctgtggagaaatgttgattttcttttttcaggggtggttgtacaatttgtggactgtgaaagttatggcagttataaataatatt

SEQ ID NO: 17657 - DNA, 1821 bp, Oryza sativa
  ref <308>: DATABASE ACCESSION NUMBER: AK068087
  ref <309>: DATABASE ENTRY DATE: 2001-12-06
ggctagctttccgcccttcgcccccttcccccgccgcaagaataatcgggaggagaaacccaaacccccctcctcctcggcggcggcggcgggcggcggcgcgagcacatggcggccacctccatcgtgcgatcgaagcgcaggctcgccctgccctacctccaccgcctcctccactccggccccgcgaccccttcccccaaccgcttcctccgccacgcctcgccggtgccccgcgaccccgaccactcccccttcctccgcctccccgacgcgcgcgtctccacgctccccacgggcctccgcatcgtcacgcaggcctacccggccgccacgcggatggcctccgtcggcgtctgggtcgacgccggcagccggttcgagctgcccggcaccaacggcacggcgcacttcctcgagcacatggccttcaagggcaccacgcgccggcccaccgcgaacgcgctcgaggtggagatcgagaacatgggcgcgcgcctcaacgcctacacctcccgcgagcagaccacctacttcgccgatgtgcaggggcgggacgtgcccatcgcgctcgacgtcctaagcgaatgccctccagcgcgagcgcggcgtcatcctccgcgagatggaggaggtgcaaggaatgatggacgaggtgatatttgatcacttgcatgccgcagcattccaaggtcatccgctgggtgacacaatattaggtcctgtagagaatattaaatcgatctctaagaaagatttggagcaatacattacaactcactatacctgtcctcgaatggttgtgtctgctgctggagctgtcaatcatgatgaggttgttgatcaagtgagagaattttttacaggattctctactgacccaactactgtagatcaacttgttgaagcaaatccagctatttttactggatctgaggtccgtgtggagcaaccagagatgcctctaacgcactttgcaattgctttcaagggttcatcatgggctaaccctagctcaattcctcttatggtgatccaaagcatattgggaacttggaataggagcattggggttgggaactgctcagggtctgctttagctcgtggtatcagcaacggtaatttagctgagagcatgattgcattcaacactaactaccgagatacaggattgtttggcatctgcactattgctcagccggattccctatgtgacctatcacagttaataatgcaagaatttagaagacttgcatttgaagtgtcggaaacagaggttgctcgtgctcgtaatcagttgaaatctgctcttttacttcacattgacggatccactgctgtttctgaaaataacggccgtcagatgctaacgtatgggcgagtaatgccattcttagagctttttgctcgcattgatgctgttgaccgtgatacagtaatggaaacagctaaggatttcataattgacaaggatatcgccctagctgcagtgggaccgctcacgaatttgccggagcttagttggtttcgctcacatacatactcggatgatgaatttagttcaagaacgttcttgcaggatgcacagaataattgaagctccggtcctggtagtgttgttgtagtaactcaagctcacccaagaaatattcgatcgtaggaagcatcaagcattttagttatttgttagatgttctctatttatttgcaaataactcccttcgttcggattgtaaactccttccgttcaccttttactttcttagcatacaattgcgtcaaaattctaaatataaaaaagaaaagaaacttgacataacc

SEQ ID NO: 17658 - DNA, 1196 bp, Oryza sativa
  ref <308>: DATABASE ACCESSION NUMBER: AK068088
  ref <309>: DATABASE ENTRY DATE: 2001-12-06
gattctgcatttctttccgcctctctctctcgacccgcggcagcacagcaccaagtattttgtgggggatacgagcggcaaaacaggtgaaagtaactgcaggccttgccgcgtggtggtgtagccgcgtaggggtggtataaagccaaagccgttgtgcgtaagcatcccctcgacttgttctcccaagtaaaccacttcagtttcagagttttcgagcgagcacgttttcgtagcttccgtcgatcgaattcatggccgttcggtgttgctcttccatggcgagcgccagcgttgtcctcttcttcgtcgtcgtcggcatgtcggcgtcgatggtctccggctgcgacaggtgcgtgcgccggtccaaggccggattccgcgactcgtcgatcgcgctgaacgccggttcttgcgggtacggctccctcgccgcgtccttcaacggcggccacctcgccgccgcgagcccggcgctgttcaggggcggtgtcggctgcggcgcctgcttccaggtgcggtgcaaggacggcaagctgtgcagcacggcgggcgccaaggtggtcgtgacggacgaggcgcggtcgacgaaccgcaccgacctcgtgctgagcgccgccgcgtacgccgccatggcccgccccggcatggccgcgcagctcagaacacgccgcgccgttgacgtcgagtacaagagggtaccgtgcgagtacgcagctggtcgcaacctgtcgatacgcgtggaggagaagagccgtccgccgcgcgagctgtccatcaggttcctctaccagggtggccaaaccgacatcgtcgccgtcgacgtcgccacggtcgggtcgtcgaactggaagttcatgacgcgggactacgggccggcgtggagcacggcgcaggcgccggcggggccgctgcagttcagggtggtggtcaccggcgggtacgacgggaagtgggtgtgggccgacggcgaggtcctgccgcggcggtggacggccggacgggtgtacgacgccggcgtgcagatcgccgacgtcgcgcaggaagggtgctacccgtgcgacacgcaggagtggaagtgacacacaccgcattaacatgtacagtttttttgctttcctttcttttttctctcccctttttgggacgcattgagcagctagccatccatcgaattaagagccacagcccacaag

SEQ ID NO: 17659 - DNA, 1798 bp, Oryza sativa
  ref <308>: DATABASE ACCESSION NUMBER: AK068089
  ref <309>: DATABASE ENTRY DATE: 2001-12-06
ggtcgggcgagatcaccgccccccaccgtcccggagcgccggcgtgcggcgagcctcgagggcgacgccgcctctcctcacgagccacgaccgtgatgctctgaggccgaggccgaggccgacgccgacgaggaggacgagccgaacggcccgaaccatccgccgcccgctcgcgttcaggggtaggaggggttggggggaagagtagtgaatagtgatcaacaaccagcctccatgggaagccccccgcggcgagccaatgcgctgggctgcctgccacggcggttgtgcatgtccatggcatgtccattgaaattttgctcagtcttcctcttcgataggagagcatggcctcctgcttattccctcgtagtcctcccatgcaccgatgaagtgattgagcgagtcatctgttacattgggggtggttaagtggtttgctgggttgggttgcattgcagccctgcggcctcgaaggaaggcacttcagatgttcgatgaaatgcttcacctgtagcctcctgcctggcactttttcaggcgcgatgtcctgagagaaggaaaaatacagtgcgccggataattatcgtatcttgcttactgcattcttggcagttgggctgcacagtggtgactctataagtcaacaatcgtctgtggttggttctgttgggggcaacatctataatctattgcatagaatagccaatgatctttcacttgtcatctttctttatttagctggggccactttgcgaggaaaaaaaaagtataccatatgtctatatatacctcctatgatggaatggaagtatgcaatgaagaagtagtaatcaagtgcaagaagacgctaattcatctgtagctgatggtggttggaggctttgtggactggaggggaaacccgatagacagaaaggtacatggaggagtcagagctgcatggtttatgttctttctgtcagtggtaacaaacatggaaaatattccaaacatgctgaatttggttacatatctccatggaaccatgcatatgggagtttcaagctctgcaaccacagttactaacttcattggtgccacatctggatttgctttattaggagctttcctctcagactcgtacatcactcgctctagaaccatactactctttggtccgttggagtttctggctcttggattgctcgctctgcaagcctacctcccctcactccatccaccaccttgcaatattgaagcagagctaagcaactgcgaagaggttcatggcttcaacaccgtcatattgcacataggcttgtacacctgggcattcagtgaaggctgtatccgtgcttgcacgccatcacttggagcggatcagtttgaccatgaagatccctctgaatcccgccaacaatccagtttcttcaactggttcacctttggaatctccttaggaggatttataggattgattctaatagtgtggctcgagaactacaaggggtgggacattggatttggcgtgtgtgcactgctaattcttcttgggttgctcatagttgccactggcctccctttctaccgtaatcaagtaccagaaggaagccctctaactcggatactgcaggttataaacttaaactagcatggtggcccgcgcaatcatcatcgttatatttttcccataaaataccatatatatatattcacattttattattaaaatagattgaaatgacaacataattttaaattatttatgtactaacttgataaaactaaccaatgcgcaatattcatactgtaatgt

SEQ ID NO: 17660 - DNA, 1354 bp, Oryza sativa
  ref <308>: DATABASE ACCESSION NUMBER: AK068090
  ref <309>: DATABASE ENTRY DATE: 2001-12-06
gatatgtggctctcctcggcattgcgagcgcccatggattggacacgcgtctctctcgcctccttcccactcccaccaccaccactgcctcttcctcttctccgggagtcccaaactgcagcagcgcgcggcacaggagagcgaggaggaggaggagatggcggaggcgaagcagcagcagcagcagccgcaggcggcgacggcggcggcggcgagcggggtgtggaagacggtgaagcccttcgccaacggcggcgcctccgggatgctcgccacctgcgtcatccagcccatcgacatggtcaaggtgaggatccagttgggtgagggctcggcggcttctgtcaccaagaaaatgcttgcaaatgagggaattagtgccttctacaagggcttgtctgctggtttgctcaggcaagcaacatacacaaccgctcgtctcggatcctttagggttctaacaaacaaagcggttgaagcaaatgatgggaagccactgcctctagtccagaaagctggtattggtctcaccgcaggagcaattggagcctgtgttggtagtcctgcggatttggcactcattaggatgcaggctgattcaacgttgccagcagcccaaagtcgcaattataagaatgcttttcatgcactttatcgtattgctgctgatgaaggtgttctagcactttggaagggcgcaggtccaactgtagtgagagctatgtcgctaaatatgggcatgcttgcctcctatgatcagagtgtggagttatttagagacacacttggtgctggagaagtcactactgtacttggggccagtgctgtttcagggttatgtgcgtctgcttgcagtttaccctttgattatgtgaagacacagattcaaaagatgcagcctgatgcctccgggaagtatccatacactgggtctcttgattgtgccatgaagaccttgaagagtggaggcccatttaagttctacactggctttcctgtgtactgtgtcaggattgcaccacatgccatgatgacttggatattcctaaatgagatccagaagctcgagaagcgtttaggcctctaagagctggttggttcggtcatgctgtccttacctaagacataacaacagtccaggtgtacatagtcgagcaattgcttctgataaacaaaatctttagcctatatgcttccttggtgctttgagccattgacaccaaatgatcacctcatttattgttctttggatcatttcttggtaaattttgggcttacatactgttatcagtttaacacgactaccaagtaccatgagaacaatacgttgttgaatgttgattactggtttgcc

SEQ ID NO: 17661 - DNA, 1161 bp, Oryza sativa
  ref <308>: DATABASE ACCESSION NUMBER: AK068091
  ref <309>: DATABASE ENTRY DATE: 2001-12-06
gggttgctccctccacttgttgccgatcaagccaagagcttagcttgaggaagacgagacgcgagagcacgagcgcgagcctgcttccgcggagctagatctcgccatggccgccggtccacgcggccgcctcctgctcgtcgcgctcgtgtcggccgcggccgtcgtggccggcgcgctactgccggggtgcgccgcggcggcggcggcggagggagaaggtgccactcgcgctctactacgagacgctgtgcccgtactgctcgcggttcatcgtcaaccacctcgccgggatcttcgaggacgggatcgtcgacgccgtcgacctccgcctcgtcccatacggcaacgcccacgtcgtcggtgccaacaacaccatctcttgccagcatggaagcgaggagtgcttcctgaacaccgtggaggcttgcgccatcgatgcatggccgttcttagttggtggagcgatttgtctggttaattccgttaacgaacgagacctcagtctgctaactagctatgcggagccatccctccgcagctagcttcttagagggactatgtccgttgagctcacggaagtttgaggcaataacaggtctgtgatgcccttagatgttctgggccgcacgcgcgctacactgatgtatccaacgagtatatagcctgtcaccgatgcatacaagggcgaacgcggccaccagtctctctcaattatggaagacagactgacgctttgcagcctccccacaagtacgttccttgggtggtcgtcgacggtcatccgctctacgaggattacgagaacttcgaggcttacttctgcaaggcctacaagggccatcctcccaaggtgtgcgaggggctggcccgtcctccgactccgactgtgcttgaggtagcggaggcagtcaatagagtcagctattacgactccggtgatatcaggcttaagctttgatgaagatggccacgccaagatcaagaaggtggttccagatgatgatgattgaatgatggggggaagatatcaacataggcagtcccatgtttctgtctaggctataggacacagttcatccagtaataatgaagtgccgttcaaaaaaaaatggtaataacaaagagattaagtttatatattgtgcatatgtgctgatt

SEQ ID NO: 17662 - DNA, 2668 bp, Oryza sativa
  ref <308>: DATABASE ACCESSION NUMBER: AK068092
  ref <309>: DATABASE ENTRY DATE: 2001-12-06
ggccgctcgcccagatcgctccgcctcccctcgcccaacctcctcgctccgtccctctcacgccaactgcagcgcagccaccggcgccgtcgattccgacgccctgcctttgccgccggcgcccctccccgccgaccgcctccagatcgacgccgccgctcccggacgccggcgccgtcgcctcgcctcgcccgatcccggacgccgccgcgactcacgccgacgccccgaccccacgccaaccggctacgctgcctcgtccctcacgccaatcgtcgatccacatctacgaccgccggctttctcctccgcgggcgctgctgaccgccgatccacatccacatcgaggacagccaaggaagccagcgacaacctcctctgcgggcgctgccgacagcctccgccgcccgcatcgccgatctactccacgccgactatctcctccgcggtcgctgccgaccgccgatccacagcgaggacagccgaaccacatccacactgcagtccctggaggcgagccaccaacaacaaggatttgcgacttcaggttgggaattcaattgaaatgttcataaattagttttgaattgagacttatctgattcatgctctgcgtgttgttctatataatattactgcccctcaatgcatgtaatgttatttttatcatgatgactctcagttctgcttaattattgaaaaactatggtgtcaagagtagcatgcttgagtgcttagtaacaactgatgtcaagagtagcatgcttgagtgcttaggaatagaacaatatttttaggtgaaagatatgaaggctcaaaaatcattagtttacaaatgcagaacttccttttttttctccaacccaccgcactattttgctaatgacatgatgattggagaagggcagcgttgcaatcattcttgtgtatatattattggtatatacttttgacggatgatttcggtaggcgtataaatgaatgtactgacatatatatgagatcatgtgttaccagatcagttcgaacagtagcttcccacccacataacctccttccctgcattgaaggtatatccaattaattcgcttaatttcctttactgtgtgttgccaattttcaatgtttttataatggggttcctgtgaactgtaatcaaattaccaattaacacggtattacatgtacttggaaaaaaccattttgtaccgctggaatatgttattctcagttggtatttataataatttcttacctattagtgatatctcggcatttgagaaggcatccaagtgcactgtgaacctgtgactgtagttaaccaagtgcttattatttcgattgcttttaaattgacacctccttctgaagcttaattgattctcattaactagctataggatggatatagtattagtaggtcgacacaaaacggtggagtatagtataacagcatattggattatatgatagtactaagcggtgaaagactcaaaagtactggggatgtgtcctgaaggaaaccatcctatttcatcccataattagttatatatatccatatgcataacaactgatgttaggggtttatgaatttttttctccatttccaattaattgtacaaatatattgtttttatatggtcatcggcatgtccttgtttgctaaaggaatagtatgtcatcggcctggccgtgtcattgaagatacatgtttctgtgcaatctaaatcgcacttattcatttgtacatggctaattacattgtcaagctcgatcagattaagtgatggatactgctctgttctgatgcattatagtacagaggactagctaataattgtgaatcttgatctttgagtaaatagctccatgtagttcagatgggttactcttttgtgatggcagatcttttaattctttagtgcttattaggaatagaactatatttttagatgcaagatgaaggttagatctgactgccggcaaacaagcctaatagttcctaagattcaagccatgaattttgttactagctaggtgttgcttatgtgggcattggtttgctggtactggtagaagaagcctcatattgtcgtggcaacgagaaagagaaaacgaaccttgaaacataaccggagtggaaccactacaaccaaagaagaaagagatggattttgaaacaagacatggatgatgctcaattgataattcattcatcaacaacatgttgatttgtttgtctgtctgctcaatgatgtacagttgacaccattgttctcctcgttgcaggatatattgacttgttgaataccgccatcgtcgccacatcagcctggccgccatctggtttcttttgccctgatgtgatgaacacatctgaaggagagcagcagagtattcacgtacatgtggcaaagcagcaggtgaggataatcattttatcaccatagtcaaaagtatgccccaaaaattattgccagtggttgattaggagacaattagattgaatatctttatagaaatagatggatattgtgtacttcagtccttgcatgctttcagatttgtatgctaaattttcctgtagatgcatatgctgaatgtttcctgtaaatgcatatactgattttttttatatacaaaagtatatactgcaatgtctcct

SEQ ID NO: 17663 - DNA, 890 bp, Oryza sativa
  ref <308>: DATABASE ACCESSION NUMBER: AK068093
  ref <309>: DATABASE ENTRY DATE: 2001-12-06
gagtcttctcgttcacattgaaagcttgaagctttcagtcttctcttctgcagctctgcttagcttcccctgattatcccaaagcttcagttccatccaatcagcagctttgaactgagcaaggaagtgaagaacaaggaaagaaagatatggaagccttaaccaaagtcatggacaaggtcaaggaagtgaagagtaacccagaagtggtggagaagctggacaaggtcaaggaagacatcagcagccttgctcatgctttacatctgggaaaacatgataaggaacatgaatctgaggagaaggcaaaggaaggtgagactgcgaaaagggccgacgagggcgcctctgccagcaagtctgaagattcaggtgtggtagtacaagctgtggaagagattcaggccgttgtcacagctgtgcagcagcagctgcacacagaaggagctgcagctgaaactcccaatgaggctgctgctgctgaaacttcagcagaaggagagaagcctgaagaatcaaagagagatgtagagaaggatgatccgtcgaagcggctcgacttcaagggcttctttgccatgatatttgagaggtgctgcaaccctgggaacaagaagaaagattaagcttggaagaaaatgatgtggattttttttgtttttttgtttttgtgtgtgtgttcttggagactgaagaatgatgtgcatgggattgtgggatggtgtacagtttgcagtttgtgtgttttcttcagagttaattgtctgcttttggtgttttatccttttatgtgttgatggatgtatgtcaaagagtactttgtgaaattcttgttagccttgtgagcttgatcttacttatgtgaatgaaagaatttatttatttatttt

SEQ ID NO: 17664 - DNA, 864 bp, Oryza sativa
  ref <308>: DATABASE ACCESSION NUMBER: AK068094
  ref <309>: DATABASE ENTRY DATE: 2001-12-06
tggtatttctatctctctctccttcctccccacacctctgcggctctggacctctccactccctctcgccgccgccgccgccgccgccgatctgccgcgcaatccggagtcgccacccaccgtacctccccgcgcggcagcatccttcctcgcgccgcgcgcgcggccggcgagaaggtttcgaggcggggacggaacgacgcggcggccgtggagctcggttccacctgcatccatctcggtggggttggtgaagtgggggggcgaggcggccggggatggataagctggtgcagttcgggaggaaggcgtggttcgtggtgcgggtgctgtccgggtacgaggagaggaggatccgtgctcacaggctgcagatgcagcagcggatcgcgagggcccaagctaagaaggaagagcttcggaagcagccagaacaaattattctatcagaagttcgtcaaatggttcagcagatgcaagccctcaatcagcagcttgaagaagctgaaaccgccatagatgaatatttcaaaccaatcgataagaatgctaagatcataatggacatgcaactggagaaagaagagaagcaaataaaggagatgacgaaagtaatgcaagatcaaatagcaatgcaaagagaaatcgcaagtaagagagctcaggccaccgccatagagtctaaagacgcccaaacgcaaacaagtgacaagattgctgaaggccctccaaaagaagaaaccatgaaataagtactggtcattgttagtctttttttttttgtaaacaagtattatatgccagtggattctttacataggctttgctgggctaggcaataataagtatggatggatgcatggg

SEQ ID NO: 17665 - DNA, 2515 bp, Oryza sativa
  ref <308>: DATABASE ACCESSION NUMBER: AK068095
  ref <309>: DATABASE ENTRY DATE: 2001-12-06
ggtccctctccctctccagcgccgccaccgagcggctcgcgccgccgccgccgccgccgccacccctcgcgccgccatctccaccatcgccgtcgccgtcgcctcgcctcgtcacggccgcctccgccatcgcctccgccacctccaccatcgtcgtcgtcgtcgtcgtcgccacccctctcccaccatcgtctccgccatcgttgtcgccgtcgcctcgcgccaccacggtcgctgccgcctccgacttccccgtcgcctcgcgtcgtcgtcgccgtcgcccgcccccgccaccatctccggccccccaaaccctagccgccgccgcccgctcgttccgacggggattcggagggggtcgaagggaggaagaggcggtggcggtcggcgaagaggacgacgatggcgacggcggcagcggcggaggaggcagacgcggcggtgggagatggagacggtggtgatggcggtcggcgaagaggacgacgatggtgacggcggcggcggaggaggaggcggatgtggcggcggagagcgagacggtggtgatggcgacgacccccgcactctctcatggcaatctcgggggaggtgtcggggaccacggcaacgctggtggtcatcaatggattcacggtcacggtggagtcagtcggggactcgcggtgcatcctggacacgcagggtggtgaggtgcagttgctgaccgtcgacaactgcctggagaagaatgccgaggagcgggagcgggttagcgccagtggtggggaggtcggccggctcaatctcttcggtggtcaggagttctaggttggccctctccggtgctagacaggtggcatgtgcctttcaagatctattggggacctcttcctgccgctcccatcatccctcgttgcccgccccacatcccatcatcgacggcggcgtggattttggtggtcgcgcaggtctggctgacgagctccatggcggctcgaagcagatggcgacctcaacggcaacgtggatccaggctagagcttgataatggcactaatctgccaacgagcttggcggcaacatgcccggcggccgccgttagttccttacccagcgccgtctccaccgtcttcgctgcctccacggtcatggccagcggcggttgaccatggcatatgctccggcaggcaaaagcagagagatggccttcctcccctttctctcccatctctccttagattaatctttctctctctcaggctgccattgttgttcttttcatggataaaattgttagggatcggcaatatttcctattctaattgtgtcttgactgaaaattagttcgattatattcagagcccgtggttaggtgatccgagattggtgcttgctggctggattagtcaattagaaaaaggtagattttgatatgcagtattaatttgatcttgtgatgatcttagttcttgtaccctgccttcccttgaggctacttccggatacccaaggccctagcgcgaagacgtgtgagggggctgcaggtgagtcgggctatcgccgtggagcgaccgtggtgaagcagcagctctacagcggccggatcagtgcggtggtccggtggctttacggttgctagagctgttgctgtttagggtcaactaggaggaagtgtctgtgtggtgattcatcacagttgcggcggtctcgacctacagcatatgtccatgatcgatgcgtgacaagagccgaaaaggatcatccattgttgatgcagtttttcaagcaagtggataagagcagcaagtattatgaatttcgctgcaaaactagattagtgaaaccatcaatcctccactttcagaacctatacaaggaagggctcttggagcaactgctacagtcaactgctctactggttagttggtcacttggtcgtcacttgtcagcctgacagtgcagcatctaaaagctaacttatacagtgtgctttatctctggcattgatggaaagtttcaagatttgtgcagtcaatgatggcatcataaattgcgtggatatgttctttgacatgaaaaaagcttgatgttaagtacagaagaaccagggcaagtcactaactttatggtattggagttggagtagaagatcagcagctccatcatcgacgatggcctgatccacaaagatggattttggtggtgatacttccagggaggtctgctgggacaagaaaccttcgccggtggagaatagcttgtgtacaaaaagcacagctgttactgaatgaagctgcttcttggtcacatctttggtacctctatgtgaaaggcactgactacttccaatcaagtgggtgtccatttagttgcaacaagcggcgttacggcacaattatatctgcagattgtactttagcttgaggtaggatggtaaatgcaagaagccaaagcggaagtataaggctgtactattgggcttttcacagatcaagaggctagatctctttctcatctgtggccaaaaacattc

SEQ ID NO: 17666 - DNA, 1759 bp, Oryza sativa
  ref <308>: DATABASE ACCESSION NUMBER: AK068096
  ref <309>: DATABASE ENTRY DATE: 2001-12-06
gactacaactacaacaactacatagagccaggcaggccaagctgagctgcggcgccccaccaccatacctctccgactccgcgcgagcatcgccaccagcccaccaccgcaccagtagtagtgagtgctcagtgcgttccactccactccgagctaagcagcgaacagctcgccgccgacgctctctctctctctgtagatatggagctgctgctgcggcggctggcggtggtggtggcggtggtggcgttgacggcggcgacggcggcggaggggtacaacatcaccaagatcctcggggaccacccggagtactcgcagttcaacaagctgctgacagagacgcggctggccggcgacatcaaccgccgccgcaccatcacggtgctggtggtggccaacggcgacatgggcgcgctctccggcggccactacaccctccccacgctccgccacatcctcgagatgcacatcctcgtcgactactacggcgccaagaagctccaccagctcgcccgcggcgacaccgcctcctcctccatgttccaggagtccgggtcggcccccggcacgacggggtacgtgaacatcacgcagcaccgcggcgggcgcgtgtcgttcacggcggaggacgcggcggacagcgcgacgccgtcgagcttcgtcaagtccgtgaaggagatcccctacgacctcgccgtgctccagatcagcaagccgctgtcctcccctgaggcggaggcgcccgtggccccgccggcgccggtgaacctcaccgagctcctgtccaagaagtactgcaagaacttcgccggcctcctcgcctcgaacgccgacgtgtacagcaacatcaacgcgaccaaggacaacgggctcacgctcttctgccccgtggacgccgccgtcgacgccttcctgcccaagtacaagaacctgacggccaaggggaaggcggccatcctcctctaccacgccgtgccggactactactcgctccagctgctcaagtccaacagcggcaaggtcagcacgctcgccaccgccagcgtcgccaagaaggactacagctacgacgtctccaacgaccgcgacagcgtcctgctcgacaccaaggtcaactcggcctccgtcaccgccaccgtcaaggacgccgacccgctcgccgtctacgccatctccaagttcctgcagcccaaggagctcttcaaggtcaccgaggacctggcaccggcgcccgcgccggagggccccaagaagaagaccaagaagaagaagccgtccaccacctccgccgctgccgccccctccgacgactcctccgccgccgactcgcccgacggcacccccgcggacgacgtcgcggacaaggccgccgccgcgccgtccgtgctcgccaggtgggttaccgccgccgccacggtcgccgcggcgttggcgttggcagcttgaggtggtggtttgagcttagtgcattttgtgttgagttcttcagctcctctccctcttcttcttttgtccaattcgtgtccctcgttggtgcaaaaaataagaagggctatttatttttatatttatcgctgcagttcccagggaaaaaattgaaacaaaaaagaagaaacttaattagaggtgtgattctagagtttttcattttcttttgtttattgggtttgtggtgatcattttgtaatgatagtggtcaatgagattggacagtgtgtttatatatgattaaagacatcatcaagtttagagttgt

SEQ ID NO: 17667 - DNA, 1129 bp, Oryza sativa
  ref <308>: DATABASE ACCESSION NUMBER: AK068097
  ref <309>: DATABASE ENTRY DATE: 2001-12-06
gtgattctcttctctttctttcatcagctatcacaattcacaagtgtagactgtaggatggccacgctctcttcctgcagccgcctgagcaccggcggcggcgccgtccagcgccgtccccggcggccggcaagcgctgcgaccatcacctgccaccggagctcctcctcctcctcgtcggccagggtagtccgcacaggcgccgccgcggcgcctgccgcggccacggcgcccgccgtgccgcagaccaacgagtgctcgcttccgacatgggcggagttcgagctgggcaaggcgccggtctactggaagaccatgaacggtcttcctccatcggctggagagggcctgatccttttctacaacccggcagcgaccaagatgacccccaacgctcagtttggcatcgcgtttaatggtggttttaaccagccgatcatgtgcggtggtgagccgaggcagatgacgctgcaagagaggggatcagctgatcctcccatatacaccatcaggatacgtgtgccgcagcatgccatgaccctcgtcttctccttcacaaacggggtggattgggatggaccgtacaccctcaagttcagggtccccaagccatggctcaacaagcccttgagcttcttcaacgagggtctagcagacgaactgaacagagaaggggcatgcgacagagccatcttcccagacgaaaacgttgtcatcacaagctgcgagatgggcagctactacgaagaggggggagatcgctgcaagctggacattgtgtcagggtgcatggatccaaactcgcacatgtttgatccactcgccaccgtggatgacggatcatgcccaatggattccgattccgaggaatgaactgaactacagtctcagcgagttttattagcaaggagaagctgtaattagtggccactgttgttcaatgtaaaaagaaagaagcgacacggtatgatgtacaagaaagcacagatgtgtgatagaatggtattagggaatgatgtgtgctgcatttggtgaaaagaatacacaactgtaggcctcatacaaatgtggttgttaatttgtgacagaactactctgaatttaatagagatcaacctatacaaatacc

SEQ ID NO: 17668 - DNA, 1529 bp, Oryza sativa
  ref <308>: DATABASE ACCESSION NUMBER: AK068098
  ref <309>: DATABASE ENTRY DATE: 2001-12-06
gaatagtcacttgtgttggccacttcgccttgcgccatttcgattccaccaagccctagtccccgccacgccaccgtccgccggcaacgcccccgccgccggccggcggccggcgccatccccatccatggcgtccaggacagcagggcgggagcgggacccgtgtgaggatgaggaggtacgagtgtacagcgattctcgtgggtatttcgcctccggggggcgcgatgttgatgtcgggccgttcccaacctccgatgaactctacgccgcactcgaccaccactatcacctccggtcgaagccctgtgatccagccccgctgccgacacagtgtgagggccttttgagaggtgcatctgagcctgaatctgcacaggcactgcaggaaccagatgttttgtccgtgggggagcttcttggcgctatagcattgaaagaaccaattatttccagtccctcttcctccccacaggcagtaccagaagacaacattgacgctgtaccatcagggtgctgcctttcctcatcccctgggtcagtcatttgggttcacaaacctcctgaaggccgccgcgggtcataccacattcgaatggatcgtagtgggctgttccacacgtatcctgatatgggtggtccatttctcagcttaaatgaagctcaagacgctttcactagccatcttaacatcctatatcctccattaaagtttgaggagcgggatggggagtctattgtggacatgatggtacgcaaaatcctttattttcctgatggaactaggaggaggtactccaaatcacaagtaacgcaggatgtgcataatgatatgcgccaattggctcgggtgatattagacatgtataatgacgatcacagtcttttagggggtcttgcatacgagctcaaagatgtcattcactttcaaccaattatggagagctgtacgtggtttgaccatttaaatttcacggcattgaccaaaggagataatgaattggattatcaaattcatctgttctttgctgaattgatgtgtttggtaggacaaaaggattatattgtcacttgttgctgtgcacttaaatctgatgacaatggtaattgctataactgcaagcttcagaatgttaatttgaagcacccaaatgatactagccaatatgctggtggacatgagtatctttgtggaatttatgacaccgaagagatgagcgagtctgaagatgaagaaaaagaggagcagaggataagaaaactttacgaggatcttgaggaaccaggtttgcatgaaaaactttttggtgatgtagaggaaacaggtttacaggaagaactttttggttgaggtggaatgggagcgggagtacgtactcctaatgagtatagaaccatttttatgctaccgtgtctgtgttgtagtagtgcgttttcatgttatttaggaatttgtggagttttggttattatgtagtacaacctgccattttactataatactatatggtacgtgacttctgtgtctc

SEQ ID NO: 17669 - DNA, 2365 bp, Oryza sativa
  ref <308>: DATABASE ACCESSION NUMBER: AK068099
  ref <309>: DATABASE ENTRY DATE: 2001-12-06
gtcttctcggctccatttttccccatcccgacatcgcatcaccgcctctctctttcccccccccccccccccacctcacctgcgtcctcgccgctatcgccgccgccgccgtcgcagcatcgggatatcctcccgccgcgagtttgctgagcacagttgctgaattttagggttatctgcttcaagcataagtgggccattgcttctggcttttactgaacgtaactcacttggccaaatgaaatccatggtagttggttattctgaagcatagaattgttactgctttgtgaacgaataacatctatctatctagagcactggaagatggatcatagagatacttctgggtttgtcagtggaggttgcaaagaatcaacgaactgcatcaccctaggatttctaactttttagctttgttaaccattatttaatctggaagtgaggttatctggtacttggcaaaaaaattggctgtgttttgtctcctgagaaattctctagcaatggaccccagacttgggcggtcagcgtttataaatttctcaaatccaaatgcctatgtgggcaagttccctgtcatctccacagtcagccatcctacagcttctagtcaaattgatgtgctagctcattgcagttcatacaacctgcctagagggaccaagagaaagtttgatggcttgtcactagggctgggcaactcatcaagctcagaatctagcaagcaaagcatgggtactggctgcaccatatcttctgctaagggtagtgatgatggttcttctattgatttggatttgaatcattttactctgggcaatgaaggtacttccaggcttgataagcgggcctgtgattctaggagggctttggataagcctgaattgaatcttgagctgtctttgtcatcccagtctgctattactggtgcagacttcactgcagcgactgaatataatagcccaagtctgcagccatactatatggacttagtgccaacagttgatgaaggatctacatctgctcgccgaccatctggttgtcaggtactgtctttccttaataagactgcaaagatgagtgaattttctccaagggaggttttcccaggtagctctaaccagagtcaaggtccggctccaatgccaacattgcttcaactgccaaaaagtccagtagcctgtacttccggtttatctcgtccacaacagcgcagcagtagcacaaaaaactgtacatacccaggatgtatgaaaggagccagaggttcttcagggcgttgcattgctcatggtgggggtagaaggtgccaaaaagatggttgtgacaagggggctgagggcaagacaatattttgtaaggcccatggtgggggaaggcgctgcgaacaccttggatgcaccaagagtgctgaaggtcgtactgacttctgcatagctcacggtggtggccgtcgttgtagccatgaaggatgcaaaagagcagcaagagggaaatctggtcgctgtattaaacatggtggtggcaaaaggtgtcaacatgcaggctgtacaaagagtgcaagaggccgtactggccgctgtgttggccatggcgggggcaagagatgccaatcttctggatgtgataagagtgcacagggaagcactaacttttgcaaggcacatggaggcggcaagcgttgcttgtggggtcacgaaggatctgaccatggagctggtgacactccttgtgagcgccttgcaagaggcaagaatggcctgtgtgtttatcacaatccgcaggtggatgaaaatcgtgtccatgggggtttcagcgttgtcagcgatgcactttctcagggagatcgaccttcaaacactgaaacaagcaggtgcagcattttctcgcatcctatggaggctcctcgtcgtgtggcagctccagctgacgagggtcgggtgcatggtggcaacatcctgtcaatgtttgcaaatggcatgagtttggggaagcatcccgccaaccaagcagaggctagcacctctgcacctcgcaactcaaatccaccaatggcatggtgaccggtaactctgcggtgcggggcagctggctgtagagccttgaaccgccttctgctctctccatttcagtaagcatatgcttcgaaccatctgacaagtgccttctcttcttaatccttcgggtgtgaaaactatggtgtgattgtgtgaactgttgtgtcctgatttgtttagcagtgttgtgaacttgtgatatattattaatcgtttgtgctttgtaaaatgtaataatcacctgtgtgagataaataaaagggggaaggttacacattagatgctgaatttcaggtcttgtactg

SEQ ID NO: 17670 - DNA, 1560 bp, Oryza sativa
  ref <308>: DATABASE ACCESSION NUMBER: AK068100
  ref <309>: DATABASE ENTRY DATE: 2001-12-06
gatcagctgaagcagcagcagcagcacagaagcagcttcccttccttccgtatagtgtaacgtacgcatcaccacctcgcgggctggagatggagaaggagtaggagtaggagtgacgcctccggatttcccacgcctcgacgaacccccacaaccccgagatcgatcgggaggaggacgaccacgcccttcacctgcccccaaatcttgccccgatctcccccgaccgcggcaatgggggccgcctccgacgacgccgtcaagcagctcgccctcctcatggaccaagtggaggcgccgctgaggaggacgtttcagaatgtgcaccagggctatcctaaagaaacattattgcgtttccttaaggccagagagtggaacgtatctaaggctcataaaatgcttgtagactctttgaattggaggattcaaaacgaaatcgatactgttctggagagacctatagtcccagtagatttgtacagatcaatccgtgattcacaacttgttggactctcaggatacacaaaggagggtctcccagtttttgccgttggtgttgggcagagcacatatgacaaagcttcggtccattactatgtgcaatctcatattcagattaatgagtaccgtgatcgtgtaattttgcccatgttgacggaaaaatttgggcggcctgttaccacctgtgtaaaagttttggacatgactggcttgaagttgtcagcactgagccaaatgaagatgttgacttcaatctcaacggttgatgatttgaactaccctgaaaaaacggagacgtactatgtagttaatgttccctatatattttctgcatgttggaaggttgtgaaacccctgttgcaggagaggacaaaaaagaaggttaaagttttgcatggttgtggaagagatgagcttctgaagattatggactattcatctcttccacatttctgccgccgggagggctctggctcatccaaacattcatctactgacgctgatgactgctactcacttgaccatcctttccacaaagagctttatggtcacattgaggagctagcatcgtgcaaggaactcatcaagatgggatcattacatgtcagcattcccgagcctgaccccgatgacgcaaagattgttgaggtcatccaagctgaattccagaagatcggtgagcagaatggatccgccaatggtcacaaggtttagccaaaacattggccatctgcagaacaccttaaccagtgctggtgacttctgaatctgatgaagttgattactactgtccatgtcagtaattttgttgacaaccccccattttctggggggaatatagcagcagcagcagcagcaaggtcttgcatcattatattcccatgatgatgcaaataaacagtggtgcagccttgagttgatagaggaagagatgaaccagtcaccagtgtatatgaaattagatggaattgaaagccataaacatgtttttgttagtgtaacttacatatgttaaagctgttacaaggaaatccatggatgttgaaagacttcttt

SEQ ID NO: 17671 - DNA, 1746 bp, Oryza sativa
  ref <308>: DATABASE ACCESSION NUMBER: AK068101
  ref <309>: DATABASE ENTRY DATE: 2001-12-06
gattttcgatttccggggggttcatgcaaattgcagggtcgagctcgaggaggagcagcaatggaggcgcgcggcgacctgcgctcgatcctgccctacctccccgtcgtgctccgcggcggcgcgctcttctggccgccggcggcgcaggaggcgctcaaggcgctggcgctgggccccgacgtgagccgcgtctcctccggcgacgtcctcgccgacgccctcaccgacctccgcctcgcgctcaacctcgacccactcccgcgccgcgccgccgagggcttcgcgctcttcttcgacgacctcctgtcgcgggcgcaggcgcgggactggttcgaccacgtcgccccctccctcgcccgcctcctcctccgcctccccacgctgctcgagggccactaccgcgccgccggcgacgaggctcgcgggctccgcatcctgagctcgcaggatgccgggctcgtgctcctcagccaggagctcgccgccgcgctgctcgcctgcgcgctcttctgcctgttccccaccgccgatagggccgaggcgtgcctcccggcgatcaatttcgatagcctatttgcggcactgtgttataattcgaggcaaagccaggagcagaaggtgaggtgccttgttcactattttgacagggtgaccgcttctacacctactggttccgtttcgtttgagcgtaaggttcttcctcgccgtcctgaatctgatggcattacgtaccctgacatggatacttggatgaaatctggtgttcccctttgcacattccggtaggtattttcctcaggcttgatagaagatgaggaacaagaagcccttgaagttgactttgcaaatagatatttgggaggtggcgcactttccagaggctgcgtgcaggaagaaatccggttcatgataaacccagaattgatcgtgggcatgctcttcatggtttcaatggaagataatgaagctatagaaattgttggtgcagaaaggttctcacagtacatggggtatggttcctcattccgttttactggtgactacttagatagcaaaccctttgatgcgatgggtagacggaaaactaggatagtggcaattgatgctttggactgtccaactaggttacagtttgaatctagtggtcttctaagggaagtgaacaaggctttttgtggatttttggatcaatcaaatcatcagctctgtgcaaagcttgtccaggatttaaatacaaaggataactgtccaagtgtcattcctgatgaatgcataggagtttcaactggaaactggggttgcggggcttttggtggaaaccctgaaatcaagagcatgattcaatggattgctgcatcacaggcactccgatcttttattaactactacacttttgagtccgaatcactgaaaagattagaagaggtgacccagtggatattgcgccataggtggacggttggcgagttgtgggacatgcttgtggagtattcatcccagaggctaagaggagacaccaatgagggctttttaacatggctacttcccaaggacatccccaatggtgatgtagattacatgtgtgaatagccctttgtttaaatcaaggaaaccgacctaggaaaaatgtgcattgcttgttggaagcagactgaaacaccgtttgttgtggccttgtggctgtgagatcaacttgttgcgcctgtatggcaatccttacctgcttctgatggcagtttgccc

SEQ ID NO: 17672 - DNA, 1017 bp, Oryza sativa
  ref <308>: DATABASE ACCESSION NUMBER: AK068102
  ref <309>: DATABASE ENTRY DATE: 2001-12-06
agtttaatttggagcacacatttcagctcaccactgctagcttgggaagaggaggaggagcttgagcttggagagagacaacaatggcggctcaggctcttctctctgggaggcagctgctggggaggccattgcaatcttcagtctccaggtcttcttcctccaggaaggcacccttcatggtcagggcagaggccactccccctgccaagcaaggtgctgacaggcagctgtgtttcgcatccaagcagtccctgagctacctggatggcacgcttccgggagacttcgggttcgacccgctggggctatcggacccggaggggaccggtgggttcatcgagccacggtggctggcctacggcgaggtgttcaacggccggacggcgatgatgggcgtcgtcggcatggtcgccccggagctcctcggcaagctgggcctcgtccccgcttccaggactggtacacgccgggctccatggggaagcagtacttcctcggcctcgagaagtacctcgccggctccggcgagccggcctaccccggcggcccgctcttcaacccgctcggcttcgggaccaagagcgaggcggagatgaaggagctcaagctcaaggagatcaagaatggcaggctcgccatgctcgccttcctcggcttctccgtccaggcgctcttcaccggggttggccccgtgcagaacctgcttgatcacctcgctgatcccgtccacaacaacatcctcaccagcctcaagttccattagagatgccatcaactacgtatttaattaattacgagtttttaattatgtatgtatgtacgtgcgtatgcgtatatgtgtgtacgtatgtatgtacgcaactttgtacgatcgatggtgcgtgtgatcgagaggggtatgtatgtacgtacgtatatacgatgtattattatgcatgggtgtagggtgtgggtgtaacatgtaaatttgtgctccaactgatttgcacgcatggtcgcatggatcgatttgct

SEQ ID NO: 17673 - DNA, 2482 bp, Oryza sativa
  ref <308>: DATABASE ACCESSION NUMBER: AK068103
  ref <309>: DATABASE ENTRY DATE: 2001-12-06
gtctccctctccctctcccgctccctctctcgcgccgccgccgccgccgcctctgcctcccccgtcgcctcgcgccgccaccaccccctcgcgccgccactaccactcccgctgctgttgccggcccctcaaaccctagcgcctcctcctccgccactaccggcgccgtttctgagcgcctcccctcacgccgccgtctccgcctccacctccgccgccgccgcctccacccccaccgccgccgcgtccacctccaccgccgccacctccgcctcccccttgtgccgtcgccgtcgccgtcgtcgagagcagccttgtccgcctccgccaccaccgtcaacgtcgcctctgtgcgatctctgtcggttggagctcaagctgagtttcttcaccgcgcgcgcggctgccatctacaccagatcggtggcggatcgggcaaacgggttccattacagcagggggatctactggcggcgcaaacaagctccagatacggcagcggctgcgtcttcaaggcgacggtgccttgaagctcctcctgcccctcgtcttcctgctcggtctccatcgccccgggcatggatcggaggagcacgatgcggttgtcattagcacttgctctgatgtatgtgtccttttaattaggcattggggtttagctagcacaagcatctggatgggaggatgaagcacaagctactgaagtgcctgactgttgcacctccaccgacttcttccaccgtggagccgggccaccgaggcgctgccgacgggtatcaaatccagcaacataacggtcaaagaagaaaggacagaggtggccagcaacggcggcgacaacgtccacaaaggcagtggagggagtggaagaggagatggggatgaagacccgctggacttcatcatcgacgtggacttagtgaagtaataaagttagcaagcacgcttatttacgatattctggtgacatcaggaaagctatcaatcaagtaccttaaattcttgtgaacaaggtgccgtgtacaatatcagctctgatagatacaaggagatactgaatacacttgatcttagaaaggacttctttttcagttactcataccatatcatgacaagtcttcaaaaaacttgagtgatccacaggaaggctggagcgtatatgagtcaacttttgtgtggaatgaatgtgttacacaagggatacacaattttcttggaagtactttgtggaccgtttgcgttggtctatggattttttaagcagaatttcaatatctgcgaaggacatcatgttcacactcattgctagacgctctaggcattttgctggaaccagatatttaaagatgggggtgaatgagaaaggctgagtagcaaatgatgctgagactgagcaaattgtgtatggagctagaccttggcctacagaagcaagttctgttgtgcaaaacagaggttcaatccctctattttggtcagaggagacatcaaagatgaacaattaacctgatattatactggatcagaagggcgagaattaagaagctactaggctccattttgagaatcctaggagaagatatggagatcctatcattttttttagacttgattaaggttagtttgaccttgttattccagagtagcagcatcttgtgtaacatttatatacctggacatgaatgatattttggaatgccttctcacatttatttttgttgttcacatgggaaaaaacgtgagaggcgagagtcaatacttcgtcgtgaatttgatatggtgttaaggataataaacaagagcataccagccgaaaatcatttgaggttcttgcattgggatcttcatgaaaactccctagaaaacctataaatgtgcttgatgttcttttaaaagtggcgttccgtgctctgaggttgactgagttctatagtgtgcttgatgttcttttgaaagtggcgttccgtgcaccacctaccagtacaataaaaagagagatatcatatggcagcattctttgtgaaagcaacacatccatatctggatgtagtggttgccataatgaagacgtcagttgttgaatgcaacaccgcttgatgttaaaagtgggtcacaatttccagtattggaatctggttcagtacatggcaatgaaatttcattgacttgtgaaagtgaggtatcaaacttaaggtatacacacccatggtacctcagatacatcatgttccaggcattgaaactgaaagttgcattcattcaagtgattcaaacaatggatcttgaatggctttcaacttcaggcaacttaagcgatgaaaggtgtttacttttgcattgctattgtattttttttagcgttttcgactgatagaatatcatcttcatagtggcagtcaatttgatgtacacattttctttgccttagtgtagggaaaagtgaaggataataattattgagaaaatccataaaatgccattg

SEQ ID NO: 17674 - DNA, 1791 bp, Oryza sativa
  ref <308>: DATABASE ACCESSION NUMBER: AK068104
  ref <309>: DATABASE ENTRY DATE: 2001-12-06
ggccctcctgctcgatccatccatccatccacccgaaccctagatagatgaaaaagggcaaaaccatggcatatgccgcgcgatccatctctgcgcgctgctgatataagagatccatcgagtagtagccctgttagctagagcgagctcgatcgatggagaggatgatggtggtgtccttgccgcgtcctctcttccattcctagtcctttccgtgtgtgtgcgactgcgtgagtagtgagggatagataaaggagggaggaggagacaggccgcgaggatgatgaacgttccatccgccgctgccgcgagctcctgcgatgatttcggctacaacgccaccccgccgccgccgccgtcgcttctcccaatcatggaccaggacggcggcggcggtagcatccagagggatcaccaccaccaccacaaccaccagcagctcggctacaacctggagccgagctccctagctctgcttcccccttccaacgccgccgccgccgcagcacaccacgccaccatcgcccacgcctccccacatgacctcctccagttctacccgacctcgcactacctcgccgctgccggcggcgccggtggcggaggcaacccctacagccacttcacggcggcggcggcggccgggagcaccttccagtcgtactaccagcagccgccgcaggccgcgccggagtactacttcccgacgctggtcagctccgccgaggagaacatggccagcttcgccgccacccagctcggcctcaacctcggctaccggacctacttcccgccgagaggcggctacacctacggccaccacccgccgcggtgccaggccgagggctgcaaggccgacctctccagcgccaagcgctaccaccgccgccacaaggtgtgcgagcaccactccaaggcgcccgtcgtcgtcaccgccggcggcctccaccagagattctgccagcagtgcagcagattccatcttcttgatgagttcgacgatgccaagaagagctgcaggaagcgactcgccgaccacaaccgccggcggaggaagtcgaagccgtccgacggcgagcattctggtgaaaagagaagggcgcaggcgaataaatcggcagctactaaagacaaagcaggaagtagcagcaagaacgcaggcattggagacggtttcgagacacagctactggggggtgcacacatgtccaaagatcaagaccaagccatggatctgggagaggtggtgaaagaagctgtagatcccaaaggtaaggcatcgatgcagcagcagcagcagcaagcacatcatgggattcatcagcagagccaccagcagcatggcttccctttcccttcgtcgtctggctcgtgcttattccctcagagccaaggagctgtctcgagcactgacacatcaaatatagctcaagtgcaagaaccaagcttagccttccatcagcagcatcaccaacacagcaacatccttcagcttggacaggcgatgtttgatctcgacttcgatcactagtataattaatatttatcaatcatctcgatctctccttctctctctctctctctctctctctctctctctctctctctctctctctctctctctctctccctcgtacgtgtgtgtacgtccagacatctcttttcatcttgtctctattaattactgtaatttggatataataatgatagcttatgcgttattgtcatgtgtactggcagttttcctcgttggagaagctggttaattagccggtacatcaaatttagtgc

SEQ ID NO: 17675 - DNA, 1142 bp, Oryza sativa
  ref <308>: DATABASE ACCESSION NUMBER: AK068105
  ref <309>: DATABASE ENTRY DATE: 2001-12-06
gattgaatcatctagagcatttcggaagccgctaacccaagtatcccaccggggacgaatttacggatttgccctccaccttctccctccccctcgcggcgccgcttcttatacccttcctcctcctccggcgtcgtccccgaggtcttctaaaaaaaaccctaatccatccactccaaatcgccacgcaggaagggaggaaaggaccaccagccaccgcgcgcgcccaaatcgtcgcagctgcttccccgaggagaagaacatgagtcgccacccgagcactaagtgggcgcagaggtccgacaaggtgttcttgacgatcgagctgcccgatgccagggatgtgaagctcaacctgaagcctgagggccagttcatcttctcggcgaagggccctgccgacgacaccccttatgagcttgatcttgagctctttgatgctgtgaatgttgaggagagcaaggcagctgttgcggcaaggtccatatgctatcttatcaagaaagcagagagcaagtggtggcctaggctgctgaagaaggaaggcaagccacctgtgttcctcaaggttgattgggataagtggcaagatgaggatgatgaagacattgggcttggtgacttcggtgatatggacttctcgaagctgggcatgggaggtcctgatgatgatcttgaggacgatgacgaagatgacacggctgacagtgctaacaaagatgatgaagacattaaggcagaggggagcggggaacaggaagctgctggtgaagcaaagccgtgaaatacctgagagttttagaacgctatgcttgacttgtttgtgacgctgccaggtcttaagatttttttggtgtaaactctggagagtggatcactgccactaaagtaaagtagtagttatggtttagtagctccattttgttaaaaaactttgtgcattgcacactgttctgttatgtgaatcgccatatttgcatcaaccattgcaaagctatccagccattctgtgtttcatacttttactcatagcggtttggtggcatgttccatttgccttgtactttggaacttgcataattgttcgtgactgtaaaaataaactgaagtatccagcttgctcaatccatattgttactgcc

SEQ ID NO: 17676 - DNA, 1010 bp, Oryza sativa
  ref <308>: DATABASE ACCESSION NUMBER: AK068106
  ref <309>: DATABASE ENTRY DATE: 2001-12-06
gacaccggcacagccacacaaatcacagcctccttcaaaccggcagccggcgccggctgctgatcctctccatcgccgccgtggccgtgctgccggcgtgcctccaaatgactccgcccggcagtatcagcaccacctcgtcgaaccttcgggcccagcaaaaaccctcaattcccaagaaaccgtgtgctttcggagcgccaccgagacacctgcatcgcccgtgcaagaagaacgctgccgtctcggtggcgtgcaccgggcaaggcgaacaacgatccagccctgccatcgcggcgccgcaggaggctcaggcaggcacgtttagcgtcgagttccggacgcgggacgggtgccggctgggcatctccaggtacccggacttcgcgtacaacgcccagggcggccgcggcgtcggcgtcgtcgccagcagcggcgaggatagtggcacggttctggtcgagttcgacgtgtcaagcctgtacatcccggcgatgtccggcgcgacgaccaagttcctcgggctgccgctgccgccgttcctcaagatcgacatcttgcccgaggctctccgcggaaacatcgatccaacaagtggtcaggttgatctgaagttcaggtcgaggttctgcttctcggttggaagcatctaccgagcaccgccgctgttcgtcgacacaacgctgacctccgaggagtccagtggagccataagacgaggaactggagaaaggatggacggcgaagggagatgcaagctggtaggggtggccgtcgtcgaccccattgatgacgtcttcatgaacaccttcctcagcctgccgaccgagtgcatcgcttacttgaacgccaccatctccatcactgaaccaagctgatcttgcctgtttcagttggttgtatagatcttaatgcgtggtgaaacgcatgaatgttgcaggacgaaacttgcacggaaaagaacagactgtactattgtagtattggccaagggaatgcctcttattcat

SEQ ID NO: 17677 - DNA, 1751 bp, Oryza sativa
  ref <308>: DATABASE ACCESSION NUMBER: AK068107
  ref <309>: DATABASE ENTRY DATE: 2001-12-06
gagattagaggcaaggcaggcaggcaggcagggctcgagctcccccttcccacacccatgtcctcctccgcctcctgcctcgcccctccccctcttcgtctcccgtgctcctcctcctcctccccctctcccgccgccgccgcgaggttcggttctcggaggagggcggtagccgcggctgctccggccaagggatggaggctggtgcgcgtctcctgcttcaggcaggaggatgtcccgacgacgtctgacgacgggcccggcttcgagcacatctcgcggccggagagctcgcggggcgcggaggcgagtggggaggagggggaaggggaaggggaaggctcgagcgggcagcgtgagcgcggttccggggaaagggatgattggttcctcagagcgcaagagataaagagaaatttacgagaaagaatattcagatttcagactcaacgatggactgtaccttggaccggaaaaaccattgctcaggtcatgattttatggattgccacattttggtttgtgggttcctggatagtgccatttttggctcatgctgctggctttagcaaggaatcattgacacataggggccaagcactctatagcctcttgacggacataactggaggccttgctggaattgctattcttcaccattgtcttggtagatttcgtccccttcctccaggctggtttgagttcaatttgaagggcagatggtatttggatgtagcgttggggtgcctgttattcccgctggtcaattttctctctcacatcaacatcaacctaataccaatgtcatcagggccagtccctggggtttccagtgtagaacagtccattgtggcccgtgatccagtggcgatggttttgtatgctgtggtggtcactgtatgtgcacctatatgggaagagattgtgttccgaggtttcctccttccatctctaacgcgttacatgccacttccatggtcaatcctggtaagcgctgcagcttttgcactggcacacttcaatgcacagagggttatgcctttggtttttcttggtgttgtgatgggaggggtctttgcaagatcacgcaacttgttggcgtcaatggtgttgcacagcctatggaacggttttgtgttcttggatttgatgaagtgagctattctggtgggactgcaacttcgggcacctgagacaagttctactaagactatgttttgcgtctttcgtggagatgatgaagaccagtctattcaggacacaggggacacaaggtggtagtcagatttttgtggagaaattgtgtagagtaaagagaaaagagcagtttgttggcgcgctagtgcaggaggaatagtctttagggtgttattccttggcctgaggcccagaagcgtctttgttgctttcgtgtaaattacatacgcatgagaataattgtctcatcgtgtatagatttcccatttcgtattaaattgtgtattcgtttcccctagtgtgggctctggaaaataaattcatttagcaagacggccactatgcattcgaccgattcttttgcccattagattaataagctgtagtgattctaaattcagagaaaactatcagtattatgtgttgagatgctttgagcgatgttatgtatctaaacgtgaatgagcattggtggtgttctgcatatctcgtgtgagttgtaaaaatccaggagaatgcctcgatcgatggaatattattttcatggctctctt

SEQ ID NO: 17678 - DNA, 2665 bp, Oryza sativa
  ref <308>: DATABASE ACCESSION NUMBER: AK068108
  ref <309>: DATABASE ENTRY DATE: 2001-12-06
ggtgctcttctcttctcttccattcgcctccgcatccgaagccatgttggatccaccgccccaccaccaccagcatcggtagcggcggcggcggagacggtggcgggagcgggatgaagaacttcctccggaatctccacatcggcgactcggccggcgatggcgcctcgtcgctcgcgcctcctccgccggtctccaaaaagggcggcggaggcggtggaggtggcggtggtggtggagcgcagcacgagcataagcacggttctgggatctcgagctggcttagctccgtgaccgggcggccgcagacgcagccgtcgccatcgccgccgtttgcggcggacgcggtggtggaggcggaggcggcggcgttggcgtcgtcggtggaggtgaggaggctggaggtcgaggaggaggaggagaaggcgaggagggagtcgcgggaggagtcggtgaggaagagggagatggagaaggagaagcaggaggcggagctggaggagtaccacatgcagctcgcgctggagatgagcgcgcgggaggatcccgaggcgacgcagatcgaggtagccaagcagatcagtctcggctcctgcccgctccagagctcccccgccgaggtcgtcgccttccgctactggagtttcagtgcccttagctacgacgacaaaatcttggatggtttctatgacatttttgtcattggggacgagcccacattgccaaccataccctccttgacggaactgcatcaacagccattttcacatgcatccaaaacagaagccgtattggtcaacagagcacaagacaccaaacttgtacaacttgagcagaaggcactcatcatggctgtggaagttcgctcgaaaactccagagtttgttgggcacaacctggtccagagactagctactttagtttccgactacatgggtggaccagtcatcgatccagaaagctttttgtccaagtaccagaatgtgagcagctctctgagagctagtataagaagtgctgttatgcctctcggtgagttaacaattggtctggctcgtcaccgtgcactgctttttaaggttttggccgacagcctcgctgttccttgtcgactagttaaaggaagacagtacactggatcggatgatggagctttgagcattgtgaaatttaatgatggaagatccaggtactcttataccttcagacggtgcgggcttgggtagagaatttgaagatagtttatttgcagatagtcaccatgttaacaaagatgactgtaacactcagttggggtcttcctttagtgaagtctcaagttctatgtatggttcttttgagaatgagtcacttgaaaaagtatccacacccagcaattttgggcattctgatccttatggcataacaactggccagactggcagccagggatcagcggtatctggttcatttggggaactatcaattagcacaagcacaagtgaaaatttgcctgttattcatgaatctagaaatacagaccataccatgagtacacagagcaaagataagtcctctgcagcgaataattcgtcatcaagttctccttcatcttctgaggtgggtggtgctccagcagtacgaaggatgaaagtgaaagatgtctcagaatatatgattagtgctgcaaaagaaaacccccagatagctgagaggatccatgctgtcttacttgaaaatggagttgtcccaccacctgatttgttttcagaagaatcaagggaacaacctaaagaccttattgtgtatgacacatctctgtttcaaactaaagatgaaatgataaagaggatgaatgagcttgaatctacaacaaacgctgatttttgtcatggtccttcggtgccacatccccctggacatgaactccaaacaaaggctgttccttatcggattcctctggatcttaaacctatccaggggctgggtacctaccatccctcagattcccggaacagtactggtagttcacatatgtatgaaccatctgcacctccccaggaggatccactacaacttataaaacaaatgcctgttgcagcagctgctgttgcaaccgctgcagtggttgcatcctcaatggttgtcgctgcagctaaatctaacagtgatatcaaactcgacgtgcctgttgctgctgcggcgactgctgctgcagttgtggctacaactgctgctgttaacaagcagtacgaatacttggaacctggttgtcaattgcttagtttgccaagttcttcaggggcaaatgaattgatcccgaagggtagacatgacttctgggataatcagcttgaaattgatcatggacaaactagtgttcccgagaaagaaaaagatttggttgaagtacctcaggaagctgaaagagtctctgacaagtcggttgggactgaaagctcaagatctgatattgccctagatggtgttgcagagtttgaaatccaatgggaagagatcactctgggagaacgtgttgggctaggatcctttggagaggtgtacaaaggggaatggcatggaacagaagtcgcggtgaagaaattcttgcagcaagatatatcaagcgatgctctggatgaatttagaactgaggtaactgtctgcaatccaaatttatgactgc

SEQ ID NO: 17679 - DNA, 756 bp, Oryza sativa
  ref <308>: DATABASE ACCESSION NUMBER: AK068109
  ref <309>: DATABASE ENTRY DATE: 2001-12-06
gatccctcctcccgttccctcgatctctgcctcctccccccaccgccggagaaggtcgccgccggcgagcgagcgcgcccgccggagttgtagccgcctctctcccccccgcggcagcctgacgccttcacgcagcgtgatctccttccccccctaccgctggcggggatccgtgctctgtcggtcggttcagttggtggactggtgaactgaaacttattgcttggtgctagtgtgatggcgtacgagattagcgagatcaaaaaaattggcataggcctggtgggctttggcatcctattctcattctttggcgttatccttttctttgataggggcttgttggcgttgggtaatattttcttcttgactggaatcggcttgttgcttggttggcaatctatgtggcagcttttcacaaagaaggcaaacattaagggatctgttcctttcttccttggtctgtttcttctctttgtccgatggcctgttgctggcataataatggagctatatggatcttttgttctcttcagtggttatggacctcctatccaggccttcctataccagattccagtcattggatggattctgcaatacccattccagctgtttggtcagttcaggcgtaaacgtgcatgacaactcacggcagaaattacccttcgtacgggagcatattttgtgatgttaatacggaaacctgctgtgtaccatctgccacgatgcagtttaattcttgtgtgcatattc

SEQ ID NO: 17680 - DNA, 1723 bp, Oryza sativa
  ref <308>: DATABASE ACCESSION NUMBER: AK068110
  ref <309>: DATABASE ENTRY DATE: 2001-12-06
ttttctacaagctcctcattgacaatgttgaggagctacttcctgtcgtttacactccaacagttggtgaggcctgccaaaagtatggatccatatttagccgtcctcagggtctttatatcagcttgaaggagaagggaaagatccttgaggtgctaaaaaactggccagagaggagcattcaggttatcgttgttactgatggtgagcgaattttggggcttggagatcttggctgccagggaatggggatccctgttggtaagcttgccctttacactgctctaggaggagtgcgtccatctgcttgtttgccaatcacattggatgttggtacaaataacgaggcgctgctgaatgatgagttctacattggcttaagacaaaagagggccactgctcaggagtatgctgattttcttcatgaattcatgactgccgtgaaacaaaactatggggagaaagtactcattcagtttgaggattttgcaaaccataatgcatttgaactccttgcaaaatatggaacaactcaccttgtattcaatgatgatattcagggaacagcttccgtggtcctttctgggcttgttgcagcactaaaattagttggtggttcattgtcggagcacagttacctgttcctgggagctggagaggctgggacaggcattgcagaacttatagctctcgagatatcaagacagaccaaagcaccaattgaggagtgccgcaagaaaatatggcttgttgattcaaagggcttgattgtcagttcacgaaaggagacccttcaacacttcaagaaaccatgggcccatgagcatgaacctgttggaaatctcttagatgcagtcaaaactatcaaaccaacagtattgattggcacatctggaaaggggcaaactttcactcaggaggttgttgaagccatttcctcatttaatgagaggcctgtcatttttgccttgtccaacccaacatctcagtctgagtgcaccgctgaacaagcgtacacatggagcaagggccgcgcggtgtttgcaagtggaagtccatttgatccggtggagtatgatggcaaaatatacgtgcctggccaggcaaacaacgcctacatcttcccagggtttggccttggtgtggtgatgtctggtgcaatccgtgttcatgatgacatgcttcttgcagcttcggaagcactggctcagcaggtcacacaagagaatttcgacaagggccttacttatcctcccttctcaaacatcagaaagatctctgcccacattgcagccaacgttgcagcaaaggcatatgaacttggtttggcaagcaggcgccctcggccaaaggacctggttaagtatgcagagagctgcatgtacagcccactttaccgcaactaccggtgaatctggtcatccggtatccggatctattccagtcatgtatatctatgaactgtttcctgcaaaatcttactacttgttcagtactgcacgctgtaattctgatgagtctaccggagttacttcaagcctttttttccccgtgtcgttcatgcctgtattgtaatatttccttttcgacgtgatgtgaagttccttgtatccagttaccttaagcatgggcatatgtattttcatcacaagaatgttaccgtcctagggatgggtaataaatgataaatctggaataaagtttctacagttcctttctcggt

SEQ ID NO: 17681 - DNA, 3293 bp, Oryza sativa
  ref <308>: DATABASE ACCESSION NUMBER: AK068111
  ref <309>: DATABASE ENTRY DATE: 2001-12-06
gaggttcgtcctgtgtttcccttcccccgccccccccccttcccatggcgagcaacccaagcagctccgcggcgggcggcggcggcgaccatggtggcgcgcgcctcgaagacctagcactggacaaggtggcggaggcggccgacgcggtcgccgccgcgtcgagcgccggcgaggtcgtccgcgcgatccacgccgtcgcggccatcgtcttccccgtcgactccgctaccgtagccggtaccgtggacgaacccttcaggagccagattattaatggtgtaagcctcagcagtgatgaacggggatcttggaggcatgctttttgccatggtccagcgtttcctactctatctaagattttgcttggccgctgttaattctatgttttgtcgagaataagggggtcagccagattattgcagagtttactgtaagcagcaagcacgatgatcacaacttgaacccaggcagagcagctttgatttcaagggttgctcaactacttgcgtctgttccagataaaacaagaatgggagcttcacctgcactgacatcatcgtgtcctcacccccactgctccaaacacaaacatctttgttaattttttttcctttccttttattttgttagctttttctcagctaatacgtatttatttgcactatgtttgttcctccaaactgtaattccttgatggaaaccaaggtcattcttcaagtgtgctgtcgatcagcttcttgttgcaactgaacaagcggctatggagttggctgctgacgaagatgctaatgggctagatccctctaattctgtgttcctcttcgtgggtgaagtgatatctcgtgctagccgtcgtggatctactggcattttaggtgctgagctgattcctaggatccgtagtcacttaaagagatgtatggaatctgatcataaaaccataagtcctgacaagatcaagcatgtttcccaattttggtttaatgtggttgaggctattagagaccagcattctgttgaaaggttggcggaagagatgttgcgccaacttgcatcacaacatacaagcgatgaggaggcatactggattctgtggactttgtttaatcagagcttcatgcacaaaactgtttttgagggcaatgtttgttgacaaatttttgcgttggaaaacattccctctatgttgtctgagatggattcttcactatgctgtctttgaattgccaccaaattcaggcatagaaacacagaagcaaaggacatcgagcttccttggtacactgcaaactttagtcagtgtttggtccaagaaagagtttgtccaggcatactcagtggagcaacaagcttacatcactgcagcaattgggttgtgtttggagaagatgtcaaaaagagaattagaaacaactaaagatgtattgaacaatattcttgaaggtgtaagctgtaggttagagagtccaattgatttaatccggaagatggccagtgctattgcattgacattttctaaagttgttgatccaaacaatcctctataccttgatgataactgttgtgagaatgttgagtgggactttggggttttatctccgaaggaaatcacagccccttcaaaggatgtagaacttataagcaaactgaaaccatctttgcctgagaacaagaaacatgctggtgagagaagggcaaaggctattaaacatgatacttcagagaacagggcaaaaatcattgagatcgaatcactagattcttgtgaaacgtctggttctgctgtgaatgggcatttcggagaggaagaatgtgatgaggaaataatgaacattgatgcctccagtgattcatccctggagccatatgatctgtcagacgatgactcagatttgcagaagaaattcacccaattaaaagatcttgctgctgcactacgaaaacctgatgatccagacggtgttgaaaacgctctgagttctgccgaaaagcttgtgagagcatcacctgatgaactacgccacaactcaggtgatcttgttagagcacttgtgcatgttcgatgttctgacgtggcaatggaaggagaggaagattctgctgaagaaaagagacagaaggcattagttgccttgctggtaacctgcacatttgaaccattagatgttctcaccaagttgctgtactcatcaagcgtggatgtaagtcagcgcattttgattattgatgttatgactgaggccgcacaggagcttgcggaaactaaaattgtaaggagagagctgcggcatggaaacttgatatccgacacctctccctcttggctagttcctagtgatcagggacctgctggtgcaggtccttggagggaagtctcagaatcaggaacacttctgaattggtcacaccggtatgaaagagaagttccatctagatctggtcaagttaaatcaggaaatctcgtaaatggggtcttggaaaagctaaagatttgcagacagagtggtcaaaaaacagatttcctttatatgctgctgcttttatgctccctgttatgcaaggatatgataaaagatcacatggtgttgacttgctcaatcgggactttgttgtcctaggtaaattgatatacgtgcttggtgtctgtatgaagtgcatggcaatgcatccagaagcatcagctgttgccccagctcttcttgatatgatcagatctagggctgtttcgcaacatcccgaagcatacgtcaggaggtctgtgttgtttgcagcttcttgcatactgatagcgctgcatccgtcgtatgttgcatcatctcttatagaaggaaatcaggatgtttctactggtttggaatggatacgcacatgggctcttcatgttgcagaaacagatcctgatacagaatgcacatcaatggctatgacctgcctgcggcttcattctgagatggcccttcagacatcacgagcactggaatcggcggatcacagcaaggccagcagcagcagcagcaggtcgctaccttctaagcttgataacatcatcataccatttgccaacatgatgtgatcgatgtactagattaagttgtaaataagcatatattatcttgccatgtaatattagaaattccaggtcagctaattctgattaggcttgatattgtcatattacagggtttttttaatctgggatttgaaaatgctagaatttttgtcgattcgtgtggagattgtatggaagttgacctgatccagattaaagagaattgatgaaaattgtaccc

SEQ ID NO: 17682 - DNA, 1633 bp, Oryza sativa
  ref <308>: DATABASE ACCESSION NUMBER: AK068112
  ref <309>: DATABASE ENTRY DATE: 2001-12-06
ggatggcacccacccacaacgcagccttcgccgtttggcccccgaggtaaccgacggacaccaccaccaccgcgccgcctcgcctcgtgaagctccactagtttctagggtttagcctagccccgaccccgaggaggcccgagatcgcaatggagggcggcggcgagggcgcggagtcagcagctgtcgcctccgcggcggcggcggaggtggaggtgaagaacccgaggtgcttcatggacgtcagcatcggcggcgagattgaggggaggatcgttatagagctctacgcgtcggtggtgccgcggacggcggagaacttccgcgcgctctgcaccggggagaagggcgtcggcgccgtcaccgggaagcacctacactacaagggatcttgcttccatcgcgttatcaaaggctttatggtacaaggtggagatataactgctggtgatggaacaggaggggagtcaatttatgggttgaagtttgaggatgagaattttgttttgaagcatgagaggaaaggaatgctatcaatggctaattctggtcccaacacaaatggatctcagtttttcatcactacaactcggacacctcatttagatgggaaacatgtagtttttggtagagtaattaagggaatgggggtggttcgctctgttgagcatgctcctgttggagaggctgaccgcccgacttctgatgttgaaattgtcgattgtggggaacttccggaaggtgctgatgatggagttgtgaacttcttcaatgatggtgatacgtatcctgattggcccaatgatcttgatgagaagcctatggaggtttcatggtggatggatgctgttgagtctgctaaggcttttgggaataataatttcaagaaacaggattacaaggcagctctgagaaagtacaggaaagcactgcgttacttggacgtttgctgggagaaagaagatatagatgaagagaagagctcagcactgcggaagaccaaatcgattatactcacaaatagctctgcatgcaaattgaagttgggagatttgaagggtgctctgttggatgctgattttgcactgcgtgaaagtgagggcaatgctaaggcattttttcgacaaggacaggcacacattgcactcaatgacattgatgcggcagtggagagcttcaagcatgcattggagttggagccaagtgatggaggaattaaacgagagctagctgctgcaaagaagaagattgccgacagaaggaatcaggagcggaaggcatttgcaaggatgttccaaccttctggaaaatcagacaaagacaatgaagagagcaagtgatccctagtttcctttccccggcagaacttttggtagcttgatctgggatacatactggaaccgtgaagagggtataacaagggagtctgcgcagctaacgcaaaagacgctgactccctatctagatacaaggaaaaaaaatagtgggggagaggatagcctttgtttttcttttgcattactacaaaagtaattgtgcgtatcaacgctgttaaagccgagacattgaactgaacagcacggtttccacttttcagactttgctgcaaggcatgccaatggacatttccttc

SEQ ID NO: 17683 - DNA, 874 bp, Oryza sativa
  ref <308>: DATABASE ACCESSION NUMBER: AK068113
  ref <309>: DATABASE ENTRY DATE: 2001-12-06
gacacaaagaaaccaactccgacgaccaccggagtcggagagcatcaagaatcgacgacgatcgatcatggccatccccaccatcctgggcagtctgaagctcacgccatccccaccctccgccacgccggtgagctcctccgcctcctcctccctgcatttccacctcgccaacgccggcgccgccgcgctcgtcgcggcctcgctcctcgtcgccgacccggccctggcattcaagggaggaggcccgtacgggcagcaggtgacacgggggcaggacctcaccggcaaggacttaagtggccagacgctcatcaggcaggacttcaagacgtctatactgaggcaggcgaacttcaaaggcgcgaagctgctcggcgcgagcttctttgatgcagatctgacaggtgctgatctctctgatgctgatcttagaggtgcagatttctcactggcaaatgtatcgaaggtaaatctgacaaatgccaacttggaaggggcacttgccacaggaaacacgacgttcaaaggttccaacatatatggagcagattttacagatgttccactgcgagacgatcagcgtgaatacctctgcaaaattgctgatggggtcaatacaaccactggaaacgccacgaaggagactcttttctgcaaatgatgaacaatagagagacagaggaagagatccagtagagttgagggtgctgattaaattagttgctgaatagtatcactactactagtatattgccgccatgttctctcttttttccccaagtgcagagaggagtagtacacgatcacatgacatgaataaatgtgcaaatgcttaagagcaagttcaataatatagccaactactatctcc

SEQ ID NO: 17684 - DNA, 2203 bp, Oryza sativa
  ref <308>: DATABASE ACCESSION NUMBER: AK068114
  ref <309>: DATABASE ENTRY DATE: 2001-12-06
gatgtccgtggatgatggtgcggatggcatcagcggattccccgacgcgatgagcgccgctgcacacaaacagatggtcactggtgccgaggaagccatgctggggaagctggaattggatagtcaatccaatctcttctccaatagtgatgattttcttctttccgggagcagtaagctgggaatttccgcatcagaagatatagatttgcctgggaaacagggattgcccgagtcgacaacagacaggcctggaagcaatggatcaagcagggttcccagactaagagtgcttggaacagccggcatggctggatttgggaaggcagttgatattttagacactataggctgcttggtaacaacaagccttagcacagatggcggctttatttccagggctaaaaccaaaggatgtccgatatcaattcttgcttttgaggttgcaaacacgatattgaaaggtgctactattatgcaatctctttcggaagacactgttacatacttcaaacaagtggtgcttccttctgaaggcgtgcagaatttaatttccagtgacatgagtgtgttgatgcggattgtagccaatgacaaaagggaagagctgaaaatattttcacaagagattgtcagatttggcaaccgttgtaaagatccccaatggcataacctggaccgctattttgtcaagctagaatcggaaaatccaccacagtagcagctaaaagaaacagcagttgcagagatgcaaaagttgatggatcttgttcatcgtacaactgatttgtatcacgagctgcatgcgttggatagatttgagcaagattatcgctgcaagctgacggtaaagggaaattcatatcagaaagataatcttccaggagaaaatattgaggtcgtgagaatagaattgaagagtcaaaggaactatgtgaaaagcttgaagaaaagatctttgtggtccaagacattggaagatattgttgagaagcttgtagacatcgtgcagtacttgcattttgagatcaacgcttcttttggatcttctgatgaaggtgaattgagttctgaatctactgaagactgtcagagactaggacctgccggacttgcattacactatgcaaatattatcatacagatctatagcgttgtaagttccctcagattttgcctgcgacgtctgcccaagatttggcatgatttggctatcttatcatagatcaattggaaactactacacatttgtctgtaggtttagcatatgtatattgtacccacttaacataagagtggcagagcaccaaagagcgtaattggtattttcagcaaagcccactagctagtatttgcatgtagctattttactaaattttgtctgtttaaggtttctcgatcaggatatataccaccaaatacaagagatgctctctaccaaggattgccaccaagagtgagatcggcactacctaatagattaagaacttcgtcagtgcctcaggagctcaatattgatcaaattagggctacaatggataaaacattgaaatggcttgttccaatggccatcaataccacgtgtgcccgaggcttcttgcggtttagcgaatgggcgagatcagggactgagagggttggaaggaggccaggccaaccggacgtggtcgagacgctctaccatgcggacaaggcgaagaccgaggactacattctggacctggttgtctggcttcaccaccttgtcaaccagagtaaccggccggcaaatgcaaaagacaaagacaaagagcagtccacctcacctctaaccaaatctgatcttgacaaggcacaacaagaatagcactgcactgcactgcactgcaccgcactgcacatcagccgacaagagcaaaacaccagacgacgcctgtgacctgtccgattgtttgatgtgggcattgtttgtaggttgtaaatggaagctaggcttcttgctgttgtcctaaaacttgtggtggcgacgtgggcatgcgttgcgctctgtacatgtacatcagtcaagtaggtagtagaaatgaggagccttttttttttctctccgattatttggtcgttacagagagggttctataatttcattgttgcagccattcggttgtcacatgttgtacgaaggggaagatgcaataaaaggctggtgattcatagaaaaagagtc

SEQ ID NO: 17685 - DNA, 1111 bp, Oryza sativa
  ref <308>: DATABASE ACCESSION NUMBER: AK099038
  ref <309>: DATABASE ENTRY DATE: 2002-08-28
gctctttccttcccttatcgtcctctctctccttcttcctttcctgattcatctcgccgagctctcctcgtcgcctcctccgtctctctataaataaggcgccccacggcgcctatcgattcgcgtcgccgcttcctgcagaggccgagaattattctcctgcgcccgccgcaaaaaccctagccacgccgatctcatggcggctaccatcagccaggcgagcctcctcctgcagaagcagctgaaagatctcgcgaagcaccccgtggatgggttctcggctgggttagtcgacgacagcaacgtcttcgagtggcaggtcacaatcatcggcccgcctgacaccctatatgatggaggttactttaatgcaataatgagctttccacagaattatcctaacagtcctccaactgtcagatttacctcagaaatgtggcatccaaatgtttatccggatggacgtgtatgcatttctattcttcatccgcctggtgatgatcccaatggttatgagcttgcgagtgagcgttggacaccagtgcatacggttgagagcatagttctgagcatcatttcgatgctttctggtccaaatgatgaatcaccagcaaatattgaagcagctaaggaatggagagagaagagggatgacttcaagaaaaaggttaggcgccttgtaaggaaatcacaagaaatgctctgaagaaaccggcagtactggggaaagttaaccataccacgtcacatgtgcatgatttggctgtcgatttccaaatgtcagttgacactagcaattcacttctccccctctgtacttcccatagtgtgcctgttggtggtcgcggtttcgtctcccaggaaggctgaatagcactgggacatgtttgtcacctattctaaagctctggttgtatttgtgtggcttgggctgtaaacgttgagaaactttgaaatactgccactcatcacaattttcgtaacaaacgtcatataagcaggcacctgcctgatctgctagctgttgaacgttgaaacacaatgtctgcaaactggtttcagtccgttctttgtaatatgttcttataaatggagcaatactcggtgctgt

SEQ ID NO: 17686 - DNA, 966 bp, Oryza sativa
  ref <308>: DATABASE ACCESSION NUMBER: AK068115
  ref <309>: DATABASE ENTRY DATE: 2001-12-06
gattcatccatcactcgttcgatctctcccatataattctaagcagatcaattgtcacaactagctacgatcatggcagcctacgggaagccgcagccgccgctgaacgacgcgtactacggcccgccgatcccgccgccaccggcggcagcgtactacggcgcagcggcgcctccgcccgcgccacgccggagcggcgcgcaccgtctgttctgctgcctcttcagggtgctcgccgtcgccgtcatcgcgctcggcaccgccgtcctcgtcctctggctcatctaccgccccagcgtcgtcaaggcctacgccgacaccgctgcgctgtcccgcttcgacctcaccaacggcggcagcctcctcgtgtacaacctcaccgtgggcatgcgcgtgcgcaaccccaaccgcttcggcatcaacttcaggagcgtcgacgcgcaggcgtcctacgacggcgaccggttcgggtacgcgccgctgcagccgttatacgttggtcggaagagcgacgccaggttcgacgtgacgctgagcggctcggcggccatcgacgaccgcgacgtggagcgcacataccggagggagacggcgcaggggtcttacgaggttaaggtcagggtgtacgctagacaaggattcaaggtcaggggcttcaggctgaacaacaagagcaaattcacctgcacgctgaacctgccggcgcccaactccggcaacggcaccgcgagcgggacgccgacgacggtgttcacgaggaagcagccgaagtgcgacgtggactattgacgtgttcgtgtcactgatacgacatggaggcatgatcgaactcctcggctgggaacgacacgacacagtctgccatgctttatttaatttgttcagcttgtagaaaattctttcgaaaacatgtatttgtatatgcacgaatgaatagatggagctatatgtatttatgcacgaatg

SEQ ID NO: 17687 - DNA, 3323 bp, Oryza sativa
  ref <308>: DATABASE ACCESSION NUMBER: AK068116
  ref <309>: DATABASE ENTRY DATE: 2001-12-06
ggcatccacctactgccactggcccccgtcacgtggccacgcctcctcagcctcatcgccgccttcctcctccctctccctcttggtccagaggcagcagcggcgcaggggcgggttagcggctcccggcccagcggctgcattgcggctcctcgacgcagcggctgcccagcggcgcggcggctcaggacctccacgacggcgaggagcggcagcggcctccctctcacccctccctctccctcttggtccagaggcagcagtggcgcaggggctggtcagcgtctcccggcccagcggctgagctgcggcttctcgacgcagaggcgcggcacggctcaggatctccatggcggcgaggagcggcggcggcctccctctcacccttctctctcctctcatatcctatgtgatgtgatttattttgtgatttccacctcttctctcatcttatgtgtgatttattttgtgatgtgattattggattgtctcctgtgcttgatttattttgggatgattttgtaatgattccgattggattgggatttagtttttgggttagatttgtgatgatttgggattggttgtgggatgttcagagcggacgctcgttgacagatgaagcggaagaaggtgcttctgctttagtttttagggatttgggatttgtttgtgtatttctttgtagtgtcgatcttgtaacagcgaatgggaaactgattttctgggattatcggtcggttttgatgttgtgatttgtcctccaattataattttgtatcctctcagaattttttttctttggccgctgtacacgattgcgttcacacggagagagagggcaccgctcagtcagacatttacggatgaaaaatttgtgacgaaaggaaaaatactaatcttttagttagttaagatgtgacacatgctataggctatattcgttgaactaggatgtatcatatctcactaaaatctcttatatttagggacggagggagtataacttgatgaaggaattatcaacattattgctttgaaactgttgaatacaaaatgaaatcctagaatttgcgtatgtctgattagaaaatgtgacaatgccaatgtagcaggtaatttcttttagaaggtaatttcttttagagtaaatttcacaaaaccacatctctacccatactaatactacattcagtggttcaacaacagtggccgcattaaggtaacacaattggtgagattaaattttgcaattggttattactgtgattttgttgattgcgatgtcgtacctatgcatgcttgctccttgctccttgctgttgggtagactttcacaatatgataaaaacacgttgcatcatggtagaacaaaatcaatactcctttgtgcataatagaaaaaaaattgtgttgcatcctatgactcttgaagctgtttttgagaatgatgttgctagagctaagaaagagaaaaatgttgagcatgctaaaggtgaaaatcagattgtagcaaaagaacttgtacaacataacaagaaagattctaaatctgaacatggtaaggacaatgtgattaaatcgaaaggtccttgtttgcttgccactaaatctgatattgtcaatttggatacgagtgacactatttgctatgctctcatttgtaaagaggccttgtttccttttgagaatatgcctatctcttttcttcttgtggtcactaattttttgcagaagtattaggatgtgtttccaaggacgtaccaccagggctgccaccggtgcgtgaaattgagcatcagatcaacttgttggtaacaaagatagaaaggaattgaattttgaacctggagatttggtttggttgcgtttgcgaaaagaatggtttcctaatttgagaaaatctaaatggatgcctagagctgatggaccttttaaagtattagcaaagattaatgagaatgcatatgagcttgatttgcctgtagattttggggttagtcccacatttcacattgcaaatttgaaaccgtatttgggagaagaagatgagcttaagtcgaggacgactccaatgcaagaaggggaggatgatgaggacatcaacaccatcgatacatccacgtccccacaagtacaacttcatgatcctattacccgcgctcgtgcacgtcaactcaactatcaggtgagttcattcttgaattcatgttcttcttgtttataccccggagatgcgtgcactcttgttttactcaggaacgatggggaggatccaaacggggagaggattcgcgcggggtggattcggactgcaggatagcgccaacatctgacggccggcacgacttcatgcgaactccgatttgggcgtgcaagtacttcatggaaagcttatcaagtctactttcaaatggatccattcccatgtccatatctgatctggagcagctgcaatcatcattttactgtcgagtacttttctgtccacgatgttgcgtcacctcatttgggcccaatgtgctgtatatcaagttgggcccattaggggtgcgtcctagggttagagcacgacaccaacacccctgtggtcgttctccccctcttcttatacctttagccgccgccaagaacacttgggctttgtttagatcaaagtatagcgtcgctacttggccgagttaatcccatgaccagttagatccccggatttcttgttgctgaactccacttgtgctacttctgttgatctgatccatcatctttgattcgcaaattgagttgcttgttcatcttgttcttgctagttctcgattgcttgcaggaacaattacccttgtggttgggctgatcgtgcattccatagagatttggtgtaatgattgctaagatgcaacatcccttgatagatgtagtcggaccgccaacgccactccatcctatcgacttatcctctcatcgaaagatcaggccaacaacagccttgagtgtcgagtgaaactcaaggtttatcattttgggaagggactcgttgatttctgctgctattttctagtgcttttgtagatcttgttggcaagaacttcagcgttggctagaaggtctcttgcaagaacagtgcgatgctcttcttgtatgggagctttttgactggagatgagaccgttgatcttaagaatggcctcacatgttgcatctacaatgtgatttcaatgctcaccatggagatggccagagtctcggccgtgaacacaaagacaacaagatatttgttggtatttcttatgatcacagataaatctgcaagcgtacagaatataccg

SEQ ID NO: 17688 - DNA, 1233 bp, Oryza sativa
  ref <308>: DATABASE ACCESSION NUMBER: AK068117
  ref <309>: DATABASE ENTRY DATE: 2001-12-06
gacgagggttatcttccttttctcttcttcttcttcttcttttgcgtggggagcgattaacacgcgtgcgtcgctgattggctcgccatggctataaatctcgaggtcggttgccccttgctgtccactgcctgagaagccgagaccactacaagcagcaactagcttagctagctagctactggtgatcaggcacgagctagccggccatggcgaggcgtcgccatgcttgctttcttctcctgctgcctctgctggtgctgcagcttcttcttgctgggggaagcttggttgatgatcttcctgctgcaactcatcaggtgccgaggttagtagggccacagcgcaagttacagcagcttccaaacccaaggccacagccgcaaccattgccccagccaaacccaaatccacagccacaaccactcccacagccacagccacagccacaaccacaaccacaacctctgccacaaccgcagccgcaaccacagcctttaccgctaccaggcccacaaccattaccgcaacccggcccgcagccgaacccaaacccccaaccgttaccacagccaaacccaaatccccagcctttacctcagccagacccgaacgctccgccgttgcctctgccgcagcctaacccaaacaacccgcaacctctgccgcagccagaccctaacgcgccatcactacctctgccgcagccagacccaaacgcgccaccactgcctctgccacaacctgatccgaacgcgccaccacaacctttgccgcaaccagacccaaacaaccctcaacctttaccgcaacctgaccctaacgcaccacaacagcctttgccgcaaccagaccctaactcgccgccacagcctttgccgcaaccagacccgaacacgcctcctggccaacaaattaatgcaaagatatcatcacagccggattctattggtggagccagaactttatatccatacggtgtaatatacaatctcatgccattgtttagcctattcttctatatgttttgatagtaaggagaggcttattgttgtaaataagcgtgctgagttaccatttttagattgcatgtatatacacattgccatgttgataggtttgctatgttatcttttttttttgtttgagatggaggtttgctatgtactgcactggcttgtaccctgatatttttgtgtatgttaatacacacctatttacctctttgtgtac

SEQ ID NO: 17689 - DNA, 2296 bp, Oryza sativa
  ref <308>: DATABASE ACCESSION NUMBER: AK068118
  ref <309>: DATABASE ENTRY DATE: 2001-12-06
tgggttttgagagagggaatgggttaggtgagtgctgttcctgcccccaagccgacgactttcgtcctcgatgcttgcgtcgcatctcgaatacaccgagtgtacgttgggagaagtacagatatgcagagggatcgcggagttgacccgtattgcatgcaggcagctgctgcttttcttgcggcaaccggagctggtgctggcctcgccaggttcaggttaatggtcaaccaccaccaccactagttgcgctactgagacagagcaatggaggagggggcgaagatcgggagggaacacgagcagcagcagcagcagcacgggagggtgaacggtagcgggagggtcgcggccgtcggtggcggcagcggcggtggcggggacgagattgagattgaggtcgccgcagccgcaggggcttcgccgtcgcggcaacacggcggtctgcacggcgatgtccaggcacccacttggaagagatttcttgcacatgttggtcctggatttgttatctccatcgcataccttgatcctagtaacttgcagactgatttggtagctggatccagccacagatattcgttgctatgggtactcctatttgggttcatatttgtgttgactgtacaatcattggcagcaaatttgggtatcattacaggaaggcacctcgctgagttgtgcatgggtgaatatccaaagtatgtcaagtactgcctatggttactagcagagcttggtgttattgctgccactataccaggagttttaggaactgctttagcctacaacatgctactccacatccctttctgggccggtgtcctagcatgtggggcatgcactttcctaattctcgggttacaaggatatggggctcggaaaatggagttcactatatcagttcttatgttggtgatggctacttgcttttttatggaacttggcaaagttaatcctcctgctggtggggtaattgaggggctttttatcccaaggcccaaaggggattattctacttcagatgcggttgctatgtttggttctcttgttgttccgcataatctcttcctacattcttctttggtgctaacgagaaaaatgccatatacttccaaaggacgcaaggatgcttctacattcttcttgcttgagaatgcattagctctgttcattgcactacttgtaaatgtcgctattgtatcaatatctggtactatatgtgccaacaatctctcatttgccgacacaagcacgtgcagcagtctaacattgaattcaacttatgtactactcaagaatattttgggaaaatcaagttcaactgtgtatggtgtggccttattagtttctggacagagctgcatggtggctacgagttatgctggccaatacatcatgcagggcttctccggaatgagaaagtgcatcatatatcttgttgctccttgtttcaccttattacctagtttgataatttgcagcattggtggtactttacgagtgcatcgaattatcaacatagctgcgattgtactatcatttgtgctgccgtttgctctaattccactcattaaattcagtagcagctgcacaaatataggaccatacaagaatgcaacatctattatccgaatcgcgtggatactgtcattggtgattattggaatcaatatttatttcttctgtactagctttgtcgcttggcttgttcatagcgaccttccaagggttgttaatgcaataattagcagccttgttttccctttcatggcagcctatattgctgctctgatctacttggctttcagaaaagttaacctttcagatccattccccaccaattcagtttctggtgagattgaagttcaacacatacaaatacaagagaagcaggaagatttaggtgtacatttatgaatagaaaaggtaacaccgtccatgtgattcttctctggacatgcatcaagtatttagcatatactgaaattgggacttcaattcatttgaagatgtatatagctcaaagcctcgaaatcatttagaaacattctagctagcaaccgtatgttcagtacaattaggcatatagcaaaacttttctagtcataggtgttgtcctttcgttaattgctcatcaaataaaattctcttccacgccatagattcaaatgtgtgacgaactttactataggtatatggcaaaatgcatggaacaatggtcagatgccctgttttgcaaatatgttttttaacataatggaattcattctggcctttacttcgtagaagttgc

SEQ ID NO: 17690 - DNA, 3053 bp, Oryza sativa
  ref <308>: DATABASE ACCESSION NUMBER: AK068119
  ref <309>: DATABASE ENTRY DATE: 2001-12-06
ggccgcggttcgctgacgggatccatggcggcgccggggagccacacccgccgccgcgcgtggccgctgctgttcctcgccgtcctcatgttccactcgctcgccatctacctcttcacccgcggcttcctcctcacccgcaccgagctcgacgtccacagccaccgcgacgaccgcatcggcatctccccgggctgctcctcctggcccccgcccgccgtcgaccgcctcgtcatcgtcgtcctcgacgccctcaggttcgattttgtggcaccaagtacattctttcaagagaggcaaccatggatggacaaactgcaggttctgcaaagattggctgctgatgagaagacctctgctaggatattcaaagcgcttgctgatccaccgacgactagccttcaacgtcttaaggctctgacgacaggtggtctgcctacatttattgatgtgggaaatagctttggagctccagcaatagtagaagacaacataatgcatcagtttgccaaaaatggaaagagggtcgtcatgatgggagacgatacttggatccagttatacgctgaacatttcaacaagtcatatccttacccttcttttaacgttaaagatcttgacacagtagacaatggtgttattgagcacttgcttccatcattacacaaaaatgattgggacgttcttattgcacatttccttggcgtggaccatgcagggcatatattcggtgttgactctaccccaatgatccagaagttggagcaatacaatcggatcctagaggatgtaattgacacattgaaaagtctatcaacatcgggtggtccccatgagaatactttacttcttgtaatgggggatcatggccaaacactaaatggtgatcatggtggaggaactgctgaagaggttgaaacatcgctctttgcatggagtccgaagaccccaccaaatgctgtcttgtctgttcttggtaaaaatttatgcaacgctgatctgcatggtaaagaggtgtgcgtcagcactatgcagcagcttgattttgcagtaactatagcagcgctacttggtataccttttccttttggaagcattggacgtgtaaacccagaattgtatgctctgagtgctggaacatgggataatcaacagatcggtgccaatgattgtacacagcagaatgatctagaagcatggatgcggagatatgctgaagctctctgtataaattgttggcaggtaaagaggtacattgatcgatattctgccacttctgttattggatttcgagcagaagacctgaaccatgttgcagatctgtattcaaaagctcaggcaaattggtcctctgtcctgaggtctacatgtccagtggaaacaagcagtcaggatgaattaaaggagtgcgcaaataaggaatgcacaagttcagctctgcggttgcaaattgatgcatactctgacttcttggagagctttgcaaagcttgctcgctctgcatggactgagtttgatttatggctgatgggcattggtctttcagttatgatactgtcagttagtactcaggcatgtatgcttgtgaagttgaatattgatcaaatttcagaaaaggaaagagcaagttcaagtttcattccgaaaaatttctttgcttttgcattggttgcaattcgggcagcaagtttcctatccaatagctatatattggcagaaggtagagttgcaaactttcttttggccacgagttgcattgccagtgtgtggcactcagccacaaaaggaaaattcatcatagaagagtttgtttttctcctccttaatattttcatacgatttgggattgagtttgggatgtcaaaacaaatttctgggtcaataatttcaaatgaccacccagtcagcattatttgtggcctgtttggttcaagtttttgcagtgatctcatggaaatattccccatcatatctcttaccttagtggcctatataattttgaagtgcatatcctatgcgatcagtcatagattcttgaagtactctgttatgtctggaagcatcttgagttatatatttatagcaattcattgggcttctgaaagtactttgctctctcatactaaagctactagagagactggaataagtttagctcctcgccttgtatacactattggaggtttatcattagcaatatctgcattttatcggttgtttgggtcaactgatcatttgaagatgaatgaaaggataactagtttgccagctgtcatgctgtgctcctggagtcctactatcttgatcttgttgggaagacaaggtccctttgtggctctaatttgtatgactatagcatggtgtataataaagttacagcagaaaaatcagagagagctgaaacttgacaaaggaatacatgctgctgactctgtttcagtaacacaatggagctttctggcagtttgtctattttatctgacgggtcattggtgtacctttgatggcctccgttatggtgctgcattcattgggtttgatcatttccatattatccgacaaggccttcttctttccattgatacttttggcgtttctcacatactgcctgttcttagtcttccgtttattgccatatgctggtacaattctgcatccaagaacagcaaggtgaatgatgccactgtcaccagattaatacaggtgcttttgatgtatggtttaattacatcaatcacaacaacgcttacaatcatttgtgttaccattcaacggcgtcacttgatggtctggggtttatttgccccaaaatacgtatttgatgctatcgggcttcttctgaccgacttgttagttgttctggcatctatctattacagctgaccttgctattttgtttcttcagatagacaggtagttttaaaattaacgcatttacgatttgattgcatctatagagctgaaatattttttttgtcactacagtcagtggtgtaaaatcatgtgtatattctattaaattcatgtattatcgttgaatcaaatttgtcatt

SEQ ID NO: 17691 - DNA, 1611 bp, Oryza sativa
  ref <308>: DATABASE ACCESSION NUMBER: AK068120
  ref <309>: DATABASE ENTRY DATE: 2001-12-06
gtatcgctccacgccgttccgtttcctcatccaaactacacgcactacctcaacgccgacgacgactcaccccggccgggtttcgtctcgccggcggcggcgcgaggcccgcgagctcgagctcgagctcggcagcggaagcttcgggtagtagtagcagcggccgttaagacttctctcctgccgccggcagcggcacacagcggagatgctcccggcccttctccccggctgcctcgccgcgcccccgcccccgccgccgcttgtcaccaccagcagcaccgcatcccctagcgcgcacctcagaacgctccggctcccctctggccttgcggtatcccgacgcgcgggcttcggggaggccgcgcgtgcagcggccaccgagcgaggcgccatcgaggaggaggaggaggaggaggaggggttcccggagtgggggaacggcgacgaggatgagtacgaccacgacccggagatcggcgacataatgggggagtacttcgacgaccccaacaaagcccagtctcgcatggaggagaggataaagaagaagcggcacaagatcgtgcaggccaagaccggctcacccaaccccatgaaggtcgtcttcaacaagtttgacttctccaattcgtacatatggttcgagttctaccatgctttactgccaaaagatgtgaccttaatttgcgatgctctgcggtcatggcatatagttgggcgcctgggcgggtgcaattctatgaatatgcagctatcacagttgcctttagactgtcaaagaccaacttatgatgctcttgaaggagcgaataccacaccaacatccttttacaatattggtgatcttgagattcaagataatatagcacgtgtatgggtagacattggtattcacgaaccgttgcttttggacatcctgcttaatgcattaacgaccataaattcagatcatgtgggcattaagcaagtgcagtttggagggagtgaatttcagaactggagcgaggacttgaaaacggaagaagctggatatagtgtccacaaaatttagaaagcctagtcctattatagcagaagcagccgctatcctgctgaggtgctgatatagtgctatagcacggatccaatgtagcttcctgaatcatccacctcacaagggcttcaaccgctatgatcttgcagttctaactgagaagaaaagcgacgacaccatccttaagcctgaaaagtttgttgccattttcctgcaaagaacctttgcttggaaaaggttgcctattattatgcaaagaagccagcccatcaagatgcaaatagatcctaagatgagtgaaggtgcgcatgatttcttcaatctcatctacttggaatataggcaacaaagtacggtgattgataagatataatggcttagtggtgcacgagtcactcacagaccctgattgaacaatatgaaaagccagccagccttgtgaagttgtgagactcaactcaatgaagcagcatatgtgtttattattaaactatttaagcaagggttaatttggagagttgttacagaaattttgcttcgattaatcaagacttcaagagagttcagaagtagtg

SEQ ID NO: 17692 - DNA, 1184 bp, Oryza sativa
  ref <308>: DATABASE ACCESSION NUMBER: AK068121
  ref <309>: DATABASE ENTRY DATE: 2001-12-06
gaagggttctgaaagccggaatctcgccaaaagaggctctcggttaaattcagtactttttaggtaagcatcgcctaacgttctggaaacctgaataaggcctttgacacgccaaacgttgtgctttaggaccacgattcgtggatcgtctgggtgaaactgtcttaattcctcccttacagactcaatgcttgcgttatgctcggctgacagctgaaccgccttaataacacccctttcaagtctccctagaacagcacgggaatcaccagtatttgctacataaagaactccttcattgatgatgccaaccaaacagcaggaaccaacggaggcaagctgcggtttgatgagccattgcttccttacaagattgagaaacccttcctccgtggcagcataggatttgcgaatgacatcaactgaaacagtttgctgttccgtagcaaatttctttagattggggaagaaatgttgtgcgatgaaatgagcagtctccgggccaccatggccatcgtagatgccgacaaaagtggtggaggaggagtgggagagaagaagaggggcagcttcgacctggctggcatcctcgagaaggttgtttgcctgcacgagggccatagagaagtcgccgcaagcgtgcctcccggtgtccttgtaccagagcaatccatccctggtgccgccgacggcgagctggtggtcgggcttgaagcaggggcgcacaatccgcatgaccgtctgcccaaccatgttgcacttgcaccaggaaacctaggtagtaagaaagatccaaggaggagaggcttgacgaagaagatggaggagactatcgatcaagattgcaagaagcaggagcttggtggtcaagggattgggggttggggtctggccccaagaaagaagaagaaattaagaggcggtgcatgagaaggaagagaatcttgcggcgtgaaatcggggttgattgctttggctttggcttggccccaaataaagggaggaattgaagggtagtaacaaagaaaaaaaaaacacacgaaaacgaaagagaagaatcccaaatccaaatcaaatcgggcggaattcctccgcctgcaggctgctgctatgctattcctctccctccctccctcctatcctaattcatactcatactgctgtgctggagtagaggagaagag

SEQ ID NO: 17693 - DNA, 1983 bp, Oryza sativa
  ref <308>: DATABASE ACCESSION NUMBER: AK068122
  ref <309>: DATABASE ENTRY DATE: 2001-12-06
gatatactatacaagtacctatgccggtgatgtatagctgctgctgctggtgcttggattcggttgaatttcataggtatggtcggtcagctggaatagcagtcggtgtgggtatatatgtagcctagttcgcatcgggcggaagctgggaagggaagatctagttcgcatcggagccggaatcgaatcctcccttcttttcctcttctcctctccatcatcagtatataaacaatacgcgcagcgcttgtccggtcaggcccgccgccgttcagaagcttaacattggaattggattttattaaccaccatgaagaacaagaagggtagtcgccgcaaccgcaataaatcagctcccgtaaccgtaatggtggtggataggttcaccacgctacctgacgatgttctgctcaacatcctggaccgcctcaacacgcccgacgccgtcaggacctgcctcctctctaagaggacgctccacctcccacgcatgctttcgcactttcgaattgccctactttcattcgcgccagatcctgattatatcacttttaaggacactattgggatgaacgccgccgtggccgctgcaacagataatgttctcaatttcagagccaaagacatccctcttcgccaactcagcatatgtttctacttgaaatactacgactgtcttaccatcggcaaagctgttgcccgagccatgacaacccacaagcttgacagcgctgagttcagaattctgaccgattataagctacattattacactcttgatggtctccgcaacaatgggaaacagctcatgaccttttttggtgcttgtactgatgcatttgctggacttacaagactctacctacagaacttaaggcttcctgaaactgacattctcaatatcattgccacatgcaaacggttagagtctctgcgtatgttcatgtgtcaaacagagggtactgtgttgcagctgcagctagaacaccagcggcttgttgagcttgatatctgccacggatgtttaaaactagttaagctcaattctctaccaaaacttgaacggctggtcttttatagttggaaacatccccaagaacccttgtattttggcaatgttccgcagctgtcaagcctaagcctcactaatgtaggtctgagacggcacaaccttatcagattaagtcagtttctttctaatgtaacctccataagagacctgcacctcaactttgaaagcgaaaggatttgggttcagccagagcgcccgaaactgctggtgcctgttctccagaatcttcaagttttgaatctggaggatctccctgaaggatgtgatatcacatggacacgcttctttcttgaagctgcacccttcctgaaggagctatgcatcacagtttgggaccattggtgtaatattgtgacagaccaggtggaacgggaagaagagggttactgtgacaaaacaaacgtgcagtgggagtcatcttcatctaatggtttcaggcattacaatctggttaagctcaccatctatggtttccaaccagatgacaactttttgggatacatcaggcacatcatggaaaccgcggttaacctagaggagatatccctgtacaacaggaaggtggaagattgctgtgaagagttggatcccaagatcaaaattgctccgtcaaggtatccacagaccattgaggagcaggagttgctgaggaagcaaattacagagggattggtgatggcgttgcctcatgtaattcacttccggtcttaattcctcggcgcaaaaatgcaattagctgagtagcaataatgtatgctgaatgttctgaatattttggtttcttcttctttccttttgtgatgaaacactctagtttcaaacgtttcaaggcatgcattagaattctcttgtttcctgcaacttggtttcaggccagcagcctggatatataatgtaagcagtatattttg

SEQ ID NO: 17694 - DNA, 1403 bp, Oryza sativa
  ref <308>: DATABASE ACCESSION NUMBER: AK068123
  ref <309>: DATABASE ENTRY DATE: 2001-12-06
tttgaacgagcaagacgacacgcatgattccataaaacataagcctatatgggaatcttacatgccaagaaataagaaagaaaaacgaggaactggaaagaagaaacatggagatctgtaccggacttatggaaccagagtgattccagtctttgtattgtcattggctgatgttgatgctgagcttctgatggaagaggaaaatcttgtttggacaagcaaagatgttgtcattgtacttgagcataacaatgaaaaggttcctctaagttatgtgtcagaaacaactagacagttcgcttttccgtctctagcacagcgccacatcttggcaggtttagcttcagcagttggaggtctgagtgcaccatatgaaagggcatcacatattcatgaaagacctgttgtgaattggttgtgggctgctggatgccatccctttggaccattctcaaactcctctaagatcagtcaaatccttcaggatgttgcactgagaactacaatttatgctcaagttgatgctgctcttcacaaaataagggacacatcggagtttgttcaatcctttgcatcagagcatcttaagacgccattaggagaacctgttaaaggtaaacaaaacaagtccaacacagagttatgggtagagaaattctataagaaggtaacaactatgccagaacctttccctcatgagcttgttgaacgtttggaagaatacctggataggcttgaaggacaacttgtggatttatcctccttgctctatgaccatcgtctagttgatgcttatcaaaacagttctgatatcctgcagagcactatatttacacagcagtacgtagaacgtgtattgtctgcggaaagagacaagatgaagtgttgcactattgaatataatcaccccaagcagtcatcacaggcgtttgtttacggagggatccttctggctggatttcttgtctactctttggttattttcttctcttcaccagtccgctaattcacatgcgtccagatgaagatgaccctgaattctctctagtatgacaagatggctaagcatgatagaatttgaaacgattgctgaaaagctgtcactgcgatatgcaaggtgtgcccggcctcataaggatgtcaatctgcattcagccatgactagacaatctgctgtatacgttgggggctttctcggcacagttttgtctatgagaatgtttgctctttagtacctacaggcaaccccatagttagatgattcattcggccatcataaatggccgatataatccagaggggagttcagataaggtctaatgcaggccatttacggttttcccctttgccggtatgttacgaaaaacctggtatgttaataaaacccataatcctcatgatgc

SEQ ID NO: 17695 - DNA, 2265 bp, Oryza sativa
  ref <308>: DATABASE ACCESSION NUMBER: AK068124
  ref <309>: DATABASE ENTRY DATE: 2001-12-06
ggagtcgacggccggccaccgacttgggggaaaccaagccaccgccgccgcagccgccgtaccccaccctccctcccggcggccgcgggccatagccgcgttctcccccgcgcgtctgcctgcggcgtggaggcgtggggggcgacggcgatggggtccatgacgatcggcgccaagtacaagaccacgctcaaggaccccggcaccaccggcgtcctgcgcatgaacgaggataagttcaccttcactccccatgatccacggtcagcgatgaagctcaatgttgatttccggagcatcaaaggccacaagttcaacaaagtagatggtagcaaaccagctccaccattactgaatctttcaaaagactctgacaagggtggaggctacatgtttgagtttgacaatgttactaaccgcgacctatctcgtgactttgtagctaaagttttaggtaagcaacaaggtacgataccgcctaaaccaaatgtgccccctgaaaattcagttacttcaactggtgaagaacagcttagtgctgcagaaatgcaacgtcggatgaaattgctgcaagaagatagtgaattgcagaagttacatatgaagtttgttcttggcaatattctgcaagaatctgaattttgggcaacaagaaagaatttacttgaggacgaagcaaataaaggatcaaaacaaaggccaggtttcaaaagtgccatgctagctgatgttaggccatcggctgatggtcggacaaataaggttacttttagtctcactaccgagataattcatcagatatttgcagaaaagccagctgtgcatcgagcgtttttagattttgttccaaaaaagatgtcagaaaaagatttttggacaaaatattttagagctgagtatcttcttaggacaaaaaatactgtggcagcaactgctgaggctgctgaagatgaagagttagccatttttctgaagaatgacgatatactagcaaaggaggcaaggttgaagataaaacgagtcgatccaacattagatatggaggcagatgctggagatgactacatccatcttccggaccatggcattattcgtgatggcagtaaagagacgattgataatgatggtgaattggccaggagaacactttcgcaggatctgaatcgccatgctgctgttgtgcttgaaggaagatcttcagacgtggaattaactgatacgaagactgttgctgaagcaattgcaaggtccaagaaagaaccaccttcaagttctatttctgatgataccaatcatgagaggttggtaaaagtggcccgcatgactgagatagaggatctacaagctccacggagcctcccatacgcaccactttgtataaaggatcctcgagaatattttgattcccaacaagcaaatgctctgagatctttaggtggcaacaatgatggaagacatgctcgtaattgcaggctgagtacagatgatgcatttgatcatttgttgggccaaatatcttctataaaagttaatgggttgaactatccggttattcagtctgatgtggctcttaaggttctgaatgaattgaatgaaggaatttcacgttcaagaagacttaatcttaagaatcctcaagatagtctgcttggtcaaatccctcgacgcacacgagatgaacttatggatcactgggcagctatccaggaattattgcagcatttttggtcatcatatccaataacaacttcagttctttataataaggttcaaagaattaaggatgcaatgacccagatatatcaaaagttgcaggatataaaggaatcagcacaacctgatgtgagacacgaaatatctcaactagtaaagcccatgacccaggctttggatgctgccttcaaccatgacttggagcagcagcaaaaatcatcgaaatccgggaataagcccaatgggttttaactttagccgagaagactagcttcggcgacggattagggattgatttactgctagagcaagagggctacttgcagttctggaggggttacctccttgagccttgattctcatgtatatttacctgagctttatagtggtgggcataacgtgcttactaaacgccccaatttttcagtgcctgattcattccaggcatactctgggatggtttgtgttcatcacagttccaggtagaaccaaaattttgtgtacactttggaaagaaggaaaaaaaatgagcacgcgttgatgctgcgttcc

SEQ ID NO: 17696 - DNA, 1588 bp, Oryza sativa
  ref <308>: DATABASE ACCESSION NUMBER: AK068125
  ref <309>: DATABASE ENTRY DATE: 2001-12-06
gatatagtgaatcaacacgaaaccctgcgtccaccgtgacgctttcctgcatacacctgagttttatatggtatcagagcctcaaagtccggcgtgatggcaggttcctcgtcaagcactgcctccaccaatcctctctttggcgttcaagtttcagagaaactgaccaaaggaaactatgcgctctggtcggcgcaagtcctggccgcgatacgcggcgcccgtcttgatggccacatcaccggcgccaccgccgctccatccatggagatcgagaagacggcgagcgacaagacgacggagaagatcgtcaaccccgcctaccaggagtggtttgcctcggaccaacaggtcctaggcttccttctctccacgctgtcaagagacattctcacccaagtggcgacggcatccacggcggcgcaggcatggcagcaggtgtgcgccatgttcactgcacaaaccaaagcccggtcgctcaacgtccggcttactctcaccaatacccagaaaggtaacatgagtatatctgagtattgtggcaagatgaaagcactagcagatgaaatcgctagttcagggaaaccccttgatgaggaagatttagtcgcttatgttctgaatgggctagatgatgattttgaacctgttgtatctgctattgtggcacgcaatgagtcgaccacaatggcggaagtgtactctcagcttcttaactttgagaacaggcaagctcttcggcaagctcatgcttcggcgaacgcggccgtggtggttttcagcgtggtcgcagcggcggccgtggcacacgtgggcgcagcaatcctgctgctccaggacgtgggcgcggcactggaggaaatcagactcggggtggtaatgaccgccccatctgccaagtgtgcctgaagagggggcacgtcgctgcagagtgttggcataggtacgatgagacctatgtccctgatgaaaggagtgcggctgcagcagctgcatatggcatcgacaccaattggtacctcgacacaggggcaaccgaccacatcaccaacgaactcgacaagttagatgttcgggagaagtacaagggaggagacaagattcacaccgcaagcggtgcaggatcgagccacgaggaacacgattcttaaggggagatgccgccgtcgcctctactcccttcctacatcacctgccaagcaagtccatgccgccacaactccttccttctcccgatggcatagtcgtttgggacacccagccgtgcccatagtcactagagttcttagcaagaataatttaccttgttctaccgtagcaaataaagactcaatttgtgatgcctgtcaaaagggcaagagtcatcagcttccctatcctaagtcttcaagtgtgtcaagtcaacctctagaacttattttttctaatgtctggggccctgctcctatttctgttggtggaaagaagttttatgtcagttttattgatgattatagtaaatttacttgggtttaccttcttaagcataagtcggaagtattccaaaagtttcaggagtttcaaactcttgttgagagattttttgggc

SEQ ID NO: 17697 - DNA, 2056 bp, Oryza sativa
  ref <308>: DATABASE ACCESSION NUMBER: AK068126
  ref <309>: DATABASE ENTRY DATE: 2001-12-06
ggaggggctttttcgcaaaacaacgtcaactaacccacacacaccaccctcaaaccctagccgccgccgccgactccccctcgcgccgtccccgtcgccgagcgccgccgcctccgtcaagcccaagcccagtagtccactcccaggcagctctcccctctcgccgccatggcggatgtggaggcctgcctcctcgcccacctcaactccggcggcgaggtgccggactcccgctcctacgcctcctccctccgcgtcacccacgacgagctcgaggccgtcatcaagagcctctcggctttccgcattgtcgacaccacggacatcaccaaggagacgtgggtgctaaccgatgaagctaaggggtacgtcgcgggtggctcccccgaagcgcagctcgtcgctgcaatcccaccggagggtgcctccaaggacgtgctcagggagaaattgggatctgtctttgacatcggcatgaagacggctgcgaagaacaagtggattggttttgagaaagggaataaggacttggtgttgagaaaggttaacaccatcaaggatgacttgcaagagcaactgaaaagtctagagagtggagaggttctttctgacaaggtgattgatgatttgaaaagaagaaagcttatcacaaaagagaaatcaatttggtatgccctaaagaaaggaccccagtttgtcgcgaagaggaaaaaactggcaactgatgtgacacaagagcatctcagaagtggtgattggaaggatcttgaattcaaagactataactttggagcccagggacaacctattgccattggttatgtgcaacctttgttggaggtgcgagaggaaatccagaacatctttcttcagatggggttcactgagatgccaactaacaattacgttgagagcagcttctggaacttcgatgcactgttccagccccaacagcatcctgctcgggattcacacgatacattttttcttgaagcccctgccgctacaaaacaattgcctgaagattatcttgagaaagtaaaggaagttcatcaacgtggtggttatggctccaagggatatggctatgactggaaacgggatgaagcagagaaaaacctgcttcgtacccacactacagcagtttcaacaaggatgctatacaagctagcacaagagaaaccttttgcccctaagaggtactactccattgatcgtgttttccgcaatgaagctgtggaccggactcatcttgcggaattccaccagattgaaggtctcatttgtgattatggtttgacgctgggtgatctgattggtgtattggaggatttcttctcgagtctaggcatgtcaaagctgcgtttcaagcctgcctacaatccatacaccgagccgagcatggaaattttcagttaccatgaaggtttgaagaaatgggtggaagttggtaactctggcatgttcagacctgaaatgttacttcccatgggactgccagagggtgttaatgttattgcatggggtctttcactagaaaggccaacaatgattctttacggcatcgacaacattcgagacctctttggaccaaaggttgatttcaacctcatcaagagcaaccctctctgccgcttgggactgcagtaaaaccttgcaaaagttggttggaagtgattaagtaacaagatttgtttagttgatcagtggttgaacgtgaagagatcatttctggcttaccttgaaacaccaatacatgtgcatttagcagaggtttttgtattacagttttgagtgatatgagactaccagccaatttttgtgtgtgtccatattcgaatactttgatacattttaattgagcacatccaatgtatgaagtggtcatctgccgctgcggttgcttgaatcaaaatatggaccattgttttcttttctttgacaaacttggcgctccaaaaactgttgttgagaagtgtcatcaaacaggatgtaatagttatgatactgatctaagattaataatatctgctgaagctgatgcctttcacacctc

SEQ ID NO: 17698 - DNA, 1330 bp, Oryza sativa
  ref <308>: DATABASE ACCESSION NUMBER: AK068127
  ref <309>: DATABASE ENTRY DATE: 2001-12-06
ggtcctttgcgcttgcggtaagaacagcgcgcgcgcgctcgcctttcccctccctctctctcccgcgtcccttctccaatccttggcccgagcgaactccagtgaggttgtccagctgctgttccggatttctcaaggtcgaagtctggtgccaagacctagccatgggtggcaggagtgctaaatggcagagttgaaatcaatgcaaataaatgtgggacgcatccaacgccaagtaaaccatattatgtggataaaatcgataccaatgaacaaaaggttgtccactatcaagttaattgtagaccagcaagagatcgcaataccggttcctactctgtgaagcaccattacccatctcctattgtttcttggatagaagacctttcgagcttcggcaatgtttcttttagccaggatcctgaatatgctgatgagcaatcaagatcttcagtggggcagtcttcagcatctgtcaatttgcatgacatgcagatatcagttagattgacagatgaattcatcgaacttgcaaaggagaatacaggcaacaatgtagagacttgtggaatcctaggtgcttcatttagagatgggacttactatgtgactatgttgatcataccaaagcaagaagcaactgctcattcttgccaggctgtcagtgaggaggagatacacgctattttatcggagcaatcactttaccctgcagggtggatacatacacacccttcacaaacgtgtttcttatcatcaattgatctgcacactcaatactcctaccaggttatgttaccagaggccgttgcgattgtgattgctcccactgatcctactaggaactgtggaatattcaggctgacagacccaggagggatgggtgtgcttagggagtgcagtgaaagtgggttccacgcccaccgggagacaacggacggcggcccaatctatgaaacctgctccaaggttatattcaacccaaatttgaggttcgagattgttgacctgcgttccgctccctgaacaatgtaattcagcctcaaactctccatgtactccctgcgtgctgccaaaatatgcaagtaaaaaaaaacaaatgccataatcgtccaggcaatacggcaatatctgctcatcgtttggatgggttgggtgggtattactaatccatggtatcaactgagctttgatgatggtacagtaatatggtatttgtaagaatgaagtgtaactgggagagagaagaaaagcagtgatgaattgtcttacaacttctggcctttgtaccgacacttctctaaaagaattaaagaccagcactcttggt

SEQ ID NO: 17699 - DNA, 1708 bp, Oryza sativa
  ref <308>: DATABASE ACCESSION NUMBER: AK068128
  ref <309>: DATABASE ENTRY DATE: 2001-12-06
gagttagaatagaagaacacactcttgaggctatcagcaaccagctccactgctagctccaggccggtcatggcggcggctggtcacgatgtgcagctcccccacgtcgccatcttcccgttcatggccaggggccacaccgtcccgatgacccacctcgcctgccttctccgccgccgcggcctcgccaccgtcaccttcttcagcaccccgggcaacgcgccgttcgtccggggacagctcgacgacgacgtggccgtcgtggagcttcccttcccggaccatgtcgtcgcccgcggcgccgcggagtgcgtcgaggccctcgactccctgttcccccttccggcgttcgtcgaggcggtgtcggcgctccggccggggctggaggtgtcgctcgccgccgctcggccccgcgtcggcctcctcgtcgccgacgcgttcctgcactgggcgcacgcctccgccgccgcgctcggcgtcccgacggtggcgttcctcggcgggaacatgttcgcgacgatcatgcgcgacgtgatcctccgcgacaacccggccgccgcgctgctgtctggcggcggcggcgccgaggcggcgacgttcgccgtgccggagttcccgcacgtccacctcacgctcgccgacatcccggtccccttcaaccgcccgtccccggagggtccgatcatggagctgaacgccaagctatggaaggccatcgccggcagcaacggcctcatcgtcaacaccttcgacgccatggaaggccgctacgtcgagcactggaaccgtgaccaccgcgccggccccagggcgtggcccataggcccgctctgcctcgcccatggcggcaccggcaccggcaccggcgccgtcgagccctcatggatgaagtggctggacgagaaggcggccgccgggagagccgtgctgtacgtggcgctcggcaccgccatggccatcccggacgcgcagctcagggaggtcgccggcgggctggaagccgccgcggccgcgggcgtctacttcctgtgggccgtgcgccccagcgacgccgacctcggcgccggcttcgaggagcgcgtggaggggcgaggcatggtggtgcgggagtgggtggaccaatggcggatcctgcagcacggctgcgtgaggggcttcctcagccactgcgggtggaactcggcggtggagggcgtcgccgccggcgtgccgctggcggcgtggccgatgggcgccgagcagccgctcaacgcgatgctcgtcgtcgacgagctgcgcgtcggggtcagggtgccggtgccgacggcgatggcgacgggcgggcacggggtggtcgggagcgaggtgatcgcgcgcgtggcgagggagctgatgatgatggccggggaggggaagggcggcggcggcggcgaggaggcgaggaacgtcgccgcgctggcgtccaaggcgcgagaagcggtcgccgagggcgggtcgtcgtggaaggcgctggaggagatggttgccacgctctgccgccctgttgaaggagatacaccgaaacccacaaaataagtttatttgtttctacgtttgaccgtcatcttataatctatctatctatctatctatctatctatctatctatctatctattattattattattattattattattattattattattattattattatatactaaaagtccattaaactttct

SEQ ID NO: 17700 - DNA, 1987 bp, Oryza sativa
  ref <308>: DATABASE ACCESSION NUMBER: AK068129
  ref <309>: DATABASE ENTRY DATE: 2001-12-06
gaagctaccgaactagcgccgcttcgtcgtcctgccgctgcggcttgcagggagagacagcgagagctgtgctgatgaagtgatgaaacttgtgggcttgcggcttccaggaccaaactgcagggagatggctctggtcacaaatgtgtgcgaatatgaagaacttgcaaagcacaaactgccaaagatggtttatgatttctatgctgttgacgcagaagaccaatggactctcagggagaacagtgaggcattctccagaattttgtaagttgtgctctaaattggtagggaatatctgaaaatggagatagggaggtcctgattttgtgttatattcatagaagttattgttaggatgtagcttttagttattttcatttgacattgtgttttgattttgaaataaaatatattacccattacttcgtctttcaaagtatattatggtgtcctttgtggataaatgatgttaggtttcagccggttgtattggttgatgtgtcctgtatcgacatgtctatgaatgtcttaggctacaatatttccatgcccattatgattgctcctacggctttgcacaaattggcacatcctgaaggttctggtttgctacctttatatctttcttttggcaatcgcatatttcaatgagaagttcctttagggatatttatctggaatgcaggagagcttgctactgccagagctgcagctgctgcagaaactataatggtttgaaagatcgtaacaaattttatgcattttgatatctacgtctgacacattgattcaccaactagtcatattttcagacattgtcttcatggtcatcttgtagtattgaagaggttaatttggcagggcctggagttcgtttcttccaactttcaatatacaaggacaggaacttagtgcaacagcttatccaaagggctgaaaaggctggctataaggcaattgtactgactgttgatgctccatggcttggtcgcagggaagctgatgtcaagaacaggttcaccttgcctcaaaatgtcatgttgaagatctttgaggggctggatcaagggaagatagatgagacgaatggttctggtcttgctgcctatgtcgctagccagattgaccgctctttttcttggaaggatatcaagtggttacagacagttacatcattgccggtcttagtgaaaggaattataacagcacaagacactagaattgctatagaatacggtgcagctggtatcatcatgtccaaccatggcggccgccagctagactatcttcctgcaaccatcagctgtctagaagagctatgccatatgtaactctcttttcaatcttaatgaaatttggtcggctccttcaccgactcagcaatcagctgtgtagaagaggttgtcagggaagcaaatgggcgtgtgccggtgttcatcgacagcggttttcgccgcggccaccgacgtgttcaaggccctggcattgggagcttcaggggtatttattggtaggccggtgctgttctccctcgccatcgacggcgaggccggcgtgaggaacgcgctgcggatgctgagagacgagctggagatcaccatggcgctcagcggctgcacgtcggtgaaggagatcacgcgcggccacgtcgtcaccgagagcgacaggatccgccgttgttctcggctgtagtgtacccaggtttcctttgcgtttgcgttcttgggagtgttttggctgactgtggaaaattctaatttgttttattgtgatgttttctgatctattatatcgaccctctcatggggtatatataggagtacataggggatagagacttggagtataatacaagtaagagtagatttatctctaggattctatctttaggactctatcttatctctaggagtcaatctctaggatatatcttatctctatatttgtatttgactcttatctctaactaacacattatatttct

SEQ ID NO: 17701 - DNA, 3596 bp, Oryza sativa
  ref <308>: DATABASE ACCESSION NUMBER: AK068130
  ref <309>: DATABASE ENTRY DATE: 2001-12-06
ggggtgacgacattccattagctgtgttgtcacaaaagccacacatgttatttgattatttcaaacagcgatttgcacaagttacaaatcctgctattgatcccctcagagaaggtttggttatgtctcttgaagtcaatattggtaaacggcgcaatatcttggaagttggccctgaaaatgctgatcaggttaccctatcaagtcctgtgcttaatgaaggtgaactagaatcacttttgaatgactcaaaactgaagcctaaagtactctcgacatacttcgacatccgtaaaggtctagatggttcccttgataaggctattaaggttctttgtgatgaagctgatgctgctgtgcggaatggttctcaacttcttgtgctttctgatcgttctgaagcactcgaaccaactcgccctgccatcccgatacttctagctgttggtgccatccaccagcatttgattcaaaatggtcttcggatgtctgcttccattgttgctgatactgctcagtgttttagcacccatcagtttgcttgcttgatcggatatggtgccagtgctatatgtccgtatctggcactagaaacatgccggcaatggaggctgagcaacaaaactgttaatttgatgcgaaacgggaagatgcccacggtgaccattgagcaggcccaaagaaactttatcaaggcagtaaaatctggcctactcaagattctttcaaaaatgggaatatcattgctctcaagttattgtggagcccagatcttcgaaatttatggccttggtcaagaggttgttgatctcgccttctgtggaagtgtatcgaaaattggaggtctcacccttgatgagctgggtagagaaacattatcattctgggtgaaggcgttctcagaagatactgcgaagaggctagagaactttggattcattcaatccagacctggaggtgaatatcatgcaaataatcctgagatgtcaaagctgctgcacaaagcagttcgtgaaaaaagtgacaatgcatacaccgtctaccaacaacatcttgcaagccgtcctgtcaatgttcttcgagatcttctagagttgaagagtgatcgtgcccctattcctatcggtaaagttgagcctgcaacctccatcgttgagcgattttgtacaggtggaatgtcccttggagctatttccagagaaacacatgaagctattgcaattgcaatgaatagaataggtgggaaatctaactccggagaaggtggtgaggacccaatccgctggagtccccttgcagatgtagaggatgggtattctccaacacttcctcatctcaagggtctacagaatggagacactgccacaagtgccattaagcaggttgcatctggacgctttggggttacaccaacatttttagtaaatgctgaacaaattgagataaagattgcacaaggggcaaagcctggtgaagggggccaacttccagggaaaaaagtcagtgcatacattgctcggctgagaaactccaaacctggagttcctctcatatccccaccaccccaccatgacatctattcaatcgaggatctagcacagttaatttatgatcttcatcagatcaatccaaaagcgaaggtatctgtaaagcttgtagctgaagcaggaattggaactgtagcttctggagtatccaaaggaaacgcagacataattcagatatcaggtcatgatggtggcactggagctagcccaattagttcaatcaagcatgctgggggtccttgggaacttggtctttcagaaacgcaccagacacttatacaaaatggattgagagagagggtagtacttagggtggatggtggattcagaagtggcctagatgtccttatggctgctgccatgggcgcggatgaatatggttttggttctgtggctatgatagctactggatgtgtcatggcacgcatttgccacacaaacaattgcccagttggagttgctagtcagagagaagaacttcgtgctaggtttcctggtgttcctggtgatcttgtaaactacttcctctttgttgcagaagaggtacgagcgacattggcccaattgggttttgaaaagctcgatgatataattgggcgaacagatatacttaaagcaaagcatgtctctttggcgaaaacacagcacattgacctcaaatacctcttatcgagtgctggattacccaaatggagtagctctcagataaggagtcaagatgtccacagtaatggccctgttcttgacgagacaatccttgccgatcctgatatgtccgatgcgattgagaatgagaaggaggtttccaagacatttcaaatttacaatgttgacagggctgtctgtggtcgagtagcaggtgtcattgccaagaagtatggtgacacaggatttgcaggccagctcaacattacgtttactggaagcgcagggcagtcctttggatgtttcctaactcctggaatgaatattcggctagttggagaggccaacgattatgtgggaaagggtatggctggtggagagctggttgtagttcctgtagaaaaaacaggatttgttcctgaggatgctgctatagttggtaacacttgtctgtatggagctactggtggtcaggtatttgtgagaggcaaaacaggtgaaagatttgcagttagaaactcccttggtcaagcagtggttgagggcactggagatcattgctgcgagtacatgactggtggctgtgtagttgtacttggcaaagttgggaggaatgttgcagctggaatgacgggtggccttgcctatattctagatgaggatgatacactcgtcccaaaggttaacaaggagattgtgaagatgcagagagtgaatgctccagccgggcagatgcagctgaagggcttgattgaggcttacgttgaaaaaacaggcagcgagaaaggtgccacgattttgagagaatgggaggcatatctgccactcttctggcaactggtaccaccaagtgaagaagactctcctgaagcttgtgccgagtttgaacgagtacttgccaagcaagcaacaacagtacaatcggcgaagtgatctactgcaattcccaagtgatcagattagacaacaggaaggtgttctttggtactttccaggtgattttttcctgggaccgcatcaaggaaaacaaaataacaactggcatacttgtgaagcaccgaagtgcccccaaagactgcgattttgtggaagctctgcccaaggcatcttttgaaacgaagtttcacatgatcgtggaggattcttctttgcgcccttgcacttgcacgccctagttaaccacccccctgtaaattggtttgctgacgctaggttgctatttgcagaggcagtgaagacacacttctaaacttctccattcctgtacaggattcgtgtcctatgtaatcgtatttttggttctggacacattagttcttacatttatacccgtccagtgggggcatgcgagtcgcatgtgcatacagctatagtgaataaagtgtactgtcaagtagttttctc

SEQ ID NO: 17702 - DNA, 2387 bp, Oryza sativa
  ref <308>: DATABASE ACCESSION NUMBER: AK068131
  ref <309>: DATABASE ENTRY DATE: 2001-12-06
ggtgagccagaggatgcggaggaagttagttgatgcgtccttcttcggggatcacctccccagcgggtggaggctgcagcttgggatcaagcggaaggaccgcaaggcctgggtgaactgcttcagttatgtgagccccaagggacagagttttgctacttgccaagaggtttctgcatacctcatgtcccttcttgggtatccggagttcaaaacggataatattgagtatggtagcacacaacaacatggcttgtgtgctgacgatggtgttaatgttttaggtgttcaacaccaaattggtacaggtatggacagtcaaagtattttgccagttgcttctattaccttttctagtcattcaagagatcaagacgaaacagatgcagatgatataaattcttatgaatgtcaacaatgcaatttaacttttcatggtcagagtgcctatgcgcatcacctgatcacttttcacaaaatgggttctaaaaggcgtaagattaacaaggttggcaaatttggtgagccagtgataggcaaagatgggaaatttgaatgcccagtatgtaataagacgtttgaggaacagtcacggtactttggtcacgttggatcccatgcaaagtatcacgggctgactcctgaagcattcctacaaaccttgtcaggaaaggttggtaacgattcttttgcaggtttgtcatgtagccttcaagatttggtcggatcaccacaactgaatgagaagactactgctagtgaagcacgatcacagcatcacaattgttcaactaaacatggaggcaatagtacaagaggtatagacctttttaactcaaattgtccagctaacttcaatgggcataatcaaacttggtgtagacctgatgaaattcctcccaccacagatgctccaagcacatggacttatagaaataatgtgacgaactgtgctgatagaactgttccgagaacagcacctcagcccaatgatcacatggattgcagggttagtggctttgctgaagcaactaattttaacgatcaagcaggaagacaccaaggttttagaccttcctcctttggaactaccaaccattgtcaaggccagataattgatcatgcagtagctgcttccaagcatgctgaggttaataatagtatgaaatcaagagatgtcaacctcaattcacgcctgaacacaatatcctttcctattgcaactgcgaacaatgaaacatcgactgcccttaatgacgtgaatcggtcatgcattactggaaaaggttttagtggaagtttcagtaacaatgatggtgctgcatctatcgtgttgcccagttctggattaaacaataaaattcctagctccctcggtgtagctgacagatcatctattgctgcaagatctttcaatgctggttatgttaatgaaaatggtgcttctgaagctaacaatattggcaacaaaaacaataccatggtgtatcagacaagtttggccatgcgcccagtctctccttgtgatctgcaacttggatttagtggtcagaagcagcagatattgcctggttatggagaacttagaccagctgcgtctgggtcccctcagcttgggggcatggcagcaaacagttcaattcccaccagaccctctcagccgcagtttgggagtatggccagaaccgatgctttgcctactggaccctctcaaccagggagcttggccagacctaattttgtgcccacaggattttctcagtttgcaagcaggccacctacttctgtaccaccagccgattcctctcagtttgcagggggcatggccaggcaaaacattccgaccacgtctgaaccaactctagtattgggctatactcctcagatggtcaatggccctccagcccagctaggatgggatctatctttgtcaaggatggtcagtgaaggcatgctcccagtgttatgtatatggtgcaacagccaattccaccattttggccccattgatgcacagcaatctggttcgtttggtttcatttgcccagcttgcaaggagaagatgtcaggcaatcctaatgcgcccaataacggtccatggcaaccatgataactgttgtggctggtctacaatcatttctgttgctggatctttggtctaaggttagctgcggtgtgcctgcaccccagagttttagtagggtatctaggaacgatgtctgtattttgtggactctcttctgtacgtacttctgttgaaatgtgaagaaaaccccaagagaaaaacccactgaatgttgtacttttggcaggatggatctccagtaagattcaagggttgtacgcagccatcatccaaaaagagtttatgagatagattttgatgt

SEQ ID NO: 17703 - DNA, 981 bp, Oryza sativa
  ref <308>: DATABASE ACCESSION NUMBER: AK099039
  ref <309>: DATABASE ENTRY DATE: 2002-08-28
gtacccccctcgccgtcgccgccgccgccgccgccgacgccgccgcgaccacctctcgcaaggggattttgtaggggtttctgatccgaggagcgggcgatgtcggactccgaggagcaccacttcgagtcgaaggccgacgccggcgcctccaagacctacccgcagcaggctgggaccatccgcaaaaatggctacatagtcatcaagaaccgcccctgcaaggttgttgaggtttcaacctctaaaactgggaagcacggtcacgccaagtgccactttgttgcaattgacatctttactgccaagaagctcgaagatattgtgccatcttctcacaactgtgatgtcccgcatgtgaaccgtacggagtaccagctcattgatatatctgaggatggatttgtgagtctgttaactgaaaatggcaacaccaaggatgacctcaggctccctactgatgataacctgcttagtcagatcaaggatggatttggagaagggaaggacctggtggtgactgttatgtctgccatgggagaggagcagatctgcgcgctgaaggacatcggcccgaagtaaacctcacctgttccatgtgattactactgaactttcagttatgatcggtttgggtatgtaggaacaaggattctcttaaaacatacagagtcacaaccattaaggaattgtatcacaaaactcgtccccgccagtcaggctcttatttatctgggtctcgtcgtcgattcactgtcctaaatttcctgagttcctgtacccctaaaccaccatccctagacgttttgttaaccctttgggtatttggtagcaactttcattgtggagttggattgtgtgcttaaggtgaaaatatcatttgtgataaaccatgagactttgttgtgctgtcaccatgaccactgctattagcatctgcagatgcaacttttgacagttataccaaaagcttctccctgc

SEQ ID NO: 17704 - DNA, 812 bp, Oryza sativa
  ref <308>: DATABASE ACCESSION NUMBER: AK068132
  ref <309>: DATABASE ENTRY DATE: 2001-12-06
gctcctcctctctcgctctctctctctctcttccccttccggcttccgcctccgcgcctcgacgaccagggtagctcggccggcgactccgcgagcggcggggagggagctggagcatcatcgcacgtgactggagagggaggccccccccccccccccccccgaagatttgattcgagatgaatgctcccgaccgctacgaacgctttgtggtgcctgggggaaccaagaaggtatcatatgagcgggatacaaagattgtgaatgctgggtcattcacaattgagcgtgaggaccacaccattggcaacatcctccgcatgcagctccacagggacccaaacgtcctctttgctggttataagctccctcatccccttcagtacaagatccttgtcagggtccatactgcaaaccagtccacccctactcaagcgtacacacaggcaatcaatgatttagacaaggagcttgagaatctcaagcaagcttttgaggatgagaagatccgctacgaggaaaggcctaagcagggatactaggccaacactccttaaaatgcagaacctctgttgatgttagatctgatgcctgagcattagtagaaaaaaaaatgctactatgctgatcaatgaactcttttaagaaacttgtttatgcttaaactcgtacaacgcagttcatcctgatgcatttctgttgtctgtgcttggagcatgctctattaagacttgtcatctctgaactgccattgcatgaaaaacattaaaattgaagtgctacacatcgaagaaaaactactggcatgtggg

SEQ ID NO: 17705 - DNA, 1894 bp, Oryza sativa
  ref <308>: DATABASE ACCESSION NUMBER: AK068133
  ref <309>: DATABASE ENTRY DATE: 2001-12-06
ggatatcaaccaatcaccaccggcggccaccaccaccaccaccaccaccatcgcctcgccgccagccagatcctccccctcccccgcgccaatcacatcgcctcctccgattcccaaggattcttcccgctctctttccttccttccccattcatccgcttcttcttcttcttcttattcttctttcttgttccgatcggggattcggatttggggattccgaggcagcggccgcggcggaggcggagagagggagaggatggggtacgtggggcagcacggggtggcgacgctgcggaggtacaagtacagcggcgtcgaccactcgctcgtcgccaagtacatcctccagcccttctggtcacgattcgtcaacctcttcccgctctggttcccgccaaatatgattacactgacaggcttcatgtttctattgacatcggcattccttggctttttttattcccctcatctcgatacagcaccacctagatgggtgcaccttgcacatggaatgcttctcttcctttaccagacttttgatgctgtggatggtaaacaagcaagacgtaccaactcatcaagtcctttaggcgagctatttgaccacggatgtgatgcgcttgcatgtgcttttgaggccttggcttttggaagcacggcaatgtgtggaaaagctaccttctggtattggttcattgctgctgtcccattttactgcgcaacctgggaacactttttcacaaacacactaattcttcctatagtcaacggaccgactgaaggccttatgctaatctatttgtgccattttttcaccttcttcacaggagctgaatggtgggcacaagatttccggaagtcaatacccctactaaactgggtacctcttgttcctgaggtcccagtatatggaattgcactgtttctaatgatagcttttgctgtaattccgacgattggatctaacattcacaatgtgtacaaagtggtcgaggcaagaaaaggaagcatgctgctggcactagcaatgctctttccttttggtttgctgttggccggagttcttgtctggtcctacctatctccttcagatataatgagaaaccagccacatcttctagttattggaactggttttgcatttggctttcttgtgggcagaatgattctggctcacttatgtgatgagcccaaaggtctgaagacagggatgtgcatgtccctagcatatttcccatttgcaattgcaaatgcgctgactgcacggcttgatgatggaaacccccttgttgatgagcagctagttctcctaatgtactgcttatttaccgtggctctctacatgcattttgctacatctgttatccatgaaatcaccaatgctctcgggattcattgcttcaggatcactaggaaaaaggcataattgtgaaccatccacaattgccttgctctggttggcaatcatatgttatatttgcgcaaaaaggcaaatattttcaattattcttcatgaagattctgctcttcagatcatatttgcatttgttattcccaggattgctattatccgagattgaaattatcatcagaacttgtgctgataaggaaacgacgtccttggaagagttggattttgtttgttgtatcacctagaacttcaattcagtgatgctcggcaaaactttttttttgggggtacatattgagcagattggcagatgatacatttgtaatttttacattgtagcatcacctgagatgcaggtgtacaatttatgctaaaaatgatgctcattatgccttacatattattcatgctcttttttttgagagagagagtaaacttatatatacatactattatattctaatagattattgttcctct

SEQ ID NO: 17706 - DNA, 1354 bp, Oryza sativa
  ref <308>: DATABASE ACCESSION NUMBER: AK068134
  ref <309>: DATABASE ENTRY DATE: 2001-12-06
gcgaaagcccagcgagcgacggggagagatcgagccgagcaccggcgaggagggatcggcgatgatggacggcgggaggcggtggcagtcgcccgccgcggcggcggcggcggagggggaggacgcggcgggcggctacggcgtcggcggcgcgggggggccctcgaggcggcctccccgtcgcgggctgaaccgcgcgtcgccctacgggacggccgccccccgccggttgctccccacgctgcccgtggcctccaggatcttcccctccgtggcccaagaccacgccgccgccgccgccgccgcctccgacgataatcaaatggcctggcgtgaatcgctggaagtaaccaatgaaacacataggcattctatagaatggaacaccaattctacagccctggataataaagccagcctgctccaggaaggtgattgtagaaatcaaaacgatggcagcggtctcgctgaaattgagaatatcatcaaacagaaacatttttctagggatgaaacagaacgccttatagagattatgcgctcaaggactcctgatcattttaatgaatatcagagagttccaaggtcttccactaaaggtttcgaagccattccgttttcagacagatggtccactcctgcaaaagagattgatgttcgatcaccttgtgggactgaagtctttgtaccatcaaatgtgcttgatgttgcctcatcaccaattgaacttgcaaaagcctatatggaagcacagacctcagcatctgtacaagagtctcaaaagaggaaattcagagctttgagtcatggagttgaggtagagaattcatcctcaaaggttttccctaaaatagctacagattctcctgtatgctggccaggatctgttgtccgaaactatccgaattatcttacaccacagagcaataaaggaagaactctgcctccaacttcctctcgcacaacttatattggctcagttttcccaagatctaacaagtacacaggatcccgtgatgcctataataactcatctggaaagccacaattttcatctcctttccctgttggaagtaaggcaatatttgaggataaaacagcacctcttggtgctgttcttggggcgcaaccgtcaacaacatattccaaagaagcatatggagatactgttggtgcaactactcccttatttgcaaagaaatgttctgcttctaagaagaatgatggatccgcccttcaaggacatcatggcgaaggcaccactgaaagtggttcatcgctcgggtttgtttcaatggtagacaatatgccccattccaaatctgcggctttatctgttcatcccaagtcaagc

SEQ ID NO: 17707 - DNA, 1451 bp, Oryza sativa
  ref <308>: DATABASE ACCESSION NUMBER: AK068135
  ref <309>: DATABASE ENTRY DATE: 2001-12-06
ggctgaacactctcttcctattacctctctcatcctctccatctctctagtttctctctctaattaagcattgcaacaattcaaccaaaatgcagctaattcttcttctctcaaagccaagaactctccaacttttccccctcctcctctgcctccttctccttccatgtctctcccagcctctcccctctccttctccttcaccttcgccgtcgccttcggcgtcgccggcgccgccgccatcgctgccgctgtcgccgttcaatgagcggctggaggcggcgtacgtggcgttccaggcgtggaagcacgccatcaccgaggaccccaagaacctgacggaggattggtgcgggccgttcgtgtgcaactacaccggcgtctactgcgcggcggcgcccgacgatccgcacgtcctcaccgtcgccggcgtcgacctcaaccacggcgacatcgccgggtgcctccccgaccacctcggcctcctcgccgacgtcgcgctcctccacctcaactccaaccgcttccgcggcacgctgccgccgtcgatgcagcacatgcgcctcctcttcgagctcgacgtcagcaacaacctcctcgccggcgcgttcccggcgttcctcacctcgctgccggggctcaagttcctcgacctccgcttcaacgccttcgacggcgagctccccgccgccgtcttcggccgccggctcggcctcgacgccatcttcgccaacgacaaccgcttcaacgtgtcgctgtcgtcggcaagcctcaccaactcgacggcgtcggtgatcgtgctcgccaacacccgtctcgccggctgcctgccgccgtccatcggcgacatggcggacacgctggtggagctcatcctcctcaacaccagcatcagcagctgcatcccgccggagatcggcaagctgaagaagctcagggtgctcgacctcagccacaacgagctcgccggtgagctgccggccagcgtcggcgacatggagagcctggaggtgctcaacgtcggccacaacatgctcgccggcgaggtccccgaggccatctgcgagctacccaggctgaggaacctcaccatcgccggcaactacttctgcgacgagccggtgtcctgcctccacgtcccgctccgcgacgaccggatgaactgcatcccggactggccgcaccagcgctcgccggaggagtgcatcgccttcgcccaccgcccgccgccgcactgcgccgccgacggctgcatcgtcatccctccgccgtgagcgatcgatcatggcggcaggagtacgtaacgttgcatggtcgtcgttggtgacgtcatcgtcctagttggttggtagagactgcaaatctccatgtggttttctaggagggggtagccaattaatattctatcatccatccatgcatccaaatttcagaattaaatggttgttgtt

SEQ ID NO: 17708 - DNA, 1726 bp, Oryza sativa
  ref <308>: DATABASE ACCESSION NUMBER: AK068136
  ref <309>: DATABASE ENTRY DATE: 2001-12-06
gagcgcgagacactccagcctatcgagcggtcactactcactagcagttggaatttggacagcagcagcagcggtgagcgcggcggcggcggcggcggcgacttgctctcctcctccccacagtccagttcttacaggagacgaacgccggcgagccgcctccgccgcagctatggcttccaggacgctctccgtctcctccctcgcctccgccttcgcctccatcccccgccccaggccccctcctccgcctccatctcgcatccgcgcctcccctctctccaccgccgccgccgccgccagtgacggcgacgccgccgacggggtcgacaccgtggagcagctcctcgttacgaagccccccgcctcctcctcctcctcctccgcgggaaggggccggatcgaccggctcatgaagctgcagcgtcgcgcggacggggacttcccccccggcggggcggggcggaggtggttcccttacctggacgcgttccgggcggcggggggcgtggagctgactagccgggaggtgctggaggtgctggagccgcacatcatggaggcgcggcgggagcggatccgccgcgccgtcgagaaccggagctactccgtttgcctcgtcgtggaggggctctctgacttcgggaacgtctccgcggcgttccggtccgccgacgcgctaggcgtgcagtccgtgcacgtcatctcctgcgacaacaacaaaaggtatagagacaataggcatgtgagcatgggtgctgagaaatggcttgatatcgaattatggagctcaactgcagaatgctttgatgctttaaaaaagcgtggttatcgcattgcaactacttatttgggaaatgattcggtttgtgtgtacgacatggattggtcgcaacctaccgctattgttgtgggcaatgaacttatgggcataagtgatgatgctttaaagttgtcagacttgcactgcagtgttcctatgaaaggcatggtggattcttttaatgtatctgttgcagctggaatccttatgcaccatgctgtctgtgatcgaatttcccgcatcggtcatcatggtgatctcttgcctgaagaaagtagaatattgcttgcggagttttatttgcgccacagacagagcacagctggcatagttcacgaatatgccaaaagaaaggcaggaaacttcatggccaaactttgacaactatcattatagttactgaaggagaaatatacacaacctaggtattcattcaaagagatttgctttggcaattggagtttctggctctggcatatcatttttgacagagcagctggctttttacggagaggaactatcaggctgcttgaccatcatggtgcctcaagatgatgacttcagaacagaattttttgacaggactatgatctatcagagtatcaagctatcgcattatcttaacagatgacattactatttcagtcacattgcttgctacccaaatttggaagttgatgcaaaaactaagatgttgttttggatgctgacatataagaaaggatcgatgcagctttctctccgttcgctagaaccccagttgataatttttagagtttaactactgccttttaccgcgatgtgagacactgcactcagaactcaactctcttagcgatttaatgtcatgttttctctctcggattgttcacaataacagagctagagggttattttttggtt

SEQ ID NO: 17709 - DNA, 2201 bp, Oryza sativa
  ref <308>: DATABASE ACCESSION NUMBER: AK068137
  ref <309>: DATABASE ENTRY DATE: 2001-12-06
gtccaatggtcagtgcgagctgcaggtaggcgtcgcctcggcgagaaggcgcaggcggcggtgtgtacggcgtcctccccttcccgattccgcccgtagcctcctcctccgtggccagtgtggcctggcgccggcgtgcgcacagccggcgaggaggtttggtgggggatcgatcgacgcggccaacctccttccatctgcctccgtttcggttcgaatcgaaaaaaaatttaggggttcagttgaaccccggcaatccacgttaggttgtggaagaagcagccatggatccctcagggctcaacctgcaggggaatcctgctgagaaccaggagagctggacctccggcgtgtcagttgggaggggcaccccaaatttgggtgttgggacggccgtggcaggccggagctgcccgccattgacattgttcccgggatcctccctgtcgtcgacggcgttgctgaacgccatgcacgagggctcctttccacaggcagccctggtggcgggttccgggagcagcgccgatgagcagcatggtgggccccccgtacggccatcctacaaccttcctgcaggatgcacgcaggtgccgataagtatcctggtgttccacaggaggctgacggggaggggatccaggcgtcggagctttatgccggctcctgcactgtccggtgtttcagaggcagatggagcttctgggccgattcctcaaagtgatttcttgtcgcttggaggtccatctgaagtttttgcaggtgatttggcaatgaatcattcagaaccggccatttcatatgggtacaattcagagcatgcacctatgcttcttcagccaaatggtttatacactgaagcttccaacactgaaagtgaaagagaagctagccaactgcaacaatcagcggaagctgttatctgtgacagccacagtaagttggaatcggttatggagaaaattcagggtcaaaatcctcaagaatcaattggcttggttgcagagggttccactgatgataacattcacaagtaccatcagaaagctaaaagggccaggacacaaatcactcacagtgacaaaatggacttaccaacacaagctgtatctgcatgcaaggaaaaaacactaactcagatagagatgcagattgcagatgctgagagaactgaagcattcaagagtgaggatgccccagcacaaaagctgaagactcgaaggagaaagcacaggcccaaggtaatccgtgaggacaggccagccaaaaagcaaatgtccacgacatcaaaagaaaaacctctcaatcagaaacccaaaagaaaatatgtgtggaagaatagaaaccccagttctttggagaagtgcgcagagccttttagtgaccattcaatttctagagaatccagaactactgttagaagcagcattgcatcagttcgaagaaggctgcaatttgagttcggggagcatggggtgcagagggaccaatcatcaaggaccaattcatggtaccgaaaccaggagaaacctgtaaatgctgagagttctttgtgctcagtgactaaatcatccgtgcaggttgaacatgggcaggaattacacatggaaaattcaccagaagggttgttttttggcatcaactccaaactgaacaaaattttagatgagtacatacatttgccagaggccgcaccaaaaccttcagaggaaatcccactggctacttctggtcatgttagcgaggaactagcaaggaaacaagatgatgtgagacacattcatgatcacaacgaaaggagtggtctgatcacaacgaaacagaacaaaaaggacttagacctgaactattctaacacaaatggttttcagatgtattgctcggctagtttgttaccagaaatggactccacaaagggccgtatgactaaggtatcaaaaatggacaagaaccaaaaacgacattatggaggtgagtcctccctagctggcacacagagctccattatcatgagaactgcagctgagatgctagcagtttaccaagcttgtggtattaaaaagaagcgatcggcccgagtccgcaggaattcctttctttctgttatggatcttgagaagaatacttcacaagaatcaacaagattgccgcggtcatgcatggaagccctgtacgagagttcctacataaaatttatgacc

SEQ ID NO: 17710 - DNA, 1988 bp, Oryza sativa
  ref <308>: DATABASE ACCESSION NUMBER: AK068138
  ref <309>: DATABASE ENTRY DATE: 2001-12-06
gacgcgcacacgggcgaaaccccaaccaagctcctcctcagctcagcttctcctgtgctctgccctcctcttctcgcaggagtgagagaagccgaggaggaggaggaggaggcttttgtttggttgagacgccacaaactccaccaagggccaatcaacgaacgcctcgatttcttttaagcggcgtctcaaggtggaggccgaatcatctgtggccactttggcatctgccggaatcgatgctgtagcatccataaataccgcccttctctgccgccccccatctcccctccccctcttcttccacctcccaagagctcgcttttgagaaagaaaggtgaaaaatcttggtcggttggcccggccagccagccagccgcctcgcggtcgcggagatgatgaaggagtcgtacatggaggtgctcccgccggcgccggcgcactacttcgtcggccaggctgcggcggcgggcgggtggttcttgccggaccggcgcggcggcggcggagcgtggtcgcaggaggagaacaaggtgttcgagcaggcgctggcggcgctcgaccggaacgacccggagaggtgggagcgggtggcgctgctgctgcccggcaagacggtggccgacgtcatgacgcactacgacgacctcgagaacgacgtctgcttcatcgaggccggcctcgtccccttcccccactacggcgccgccggcggcggcggcggctccgggttcactcttgactgggacggcggcgatgaccccgccggccttgggttcaagcgctcctgctacatggtcggcggcaagcgcgcgcgcggccctgaccaggagcgcaagaagggcgtgccgtggacagaggaggagcacaagttgttcttgatggggctgaagaagtacggcagaggtgactggaggaacatctcccgcaacttcgtgacgagccggacgccgacgcaggtggccagccacgcgcagaagtacttcatccggctcaactccggcggcaaggacaagcgccgctccagcatccacgacatcaccaccgtcaacctccccgacgacgaccacggcaacccctcgccgtcgccgccgccgtccgtgctcaccgcgcactcctcctcctccgccgccgccgtctcggagcagttcggcgtgctcgtcgacggcaagcctccgccgccgccgctcggccgtggcgccgggcaccaccacttcatgccccatccctacgcccaggtgaagatcgaggccggcaattcgcacgtcgccggcggcggccgcctcgacgactccgttctggtgcagatgcaatgcggccagctgatgcagcctctcggttgacaaccctgttcctggagcagcaacccacgaccaaccatgaaaatgctctcgtctcttggtgtgctcgaggagggagatgcaactcgtgctcttgcttccaaccatcaatggagttctgaaaacgaaatgatcgcaacagcacgaaggacaagtagtaacagcacagtagccaggcattgcgctgctgctaaattaagctccctactaccgtgtatcccggatgatgagaggaagaagaagaagaagaagaagaatcacgagatagaagaaaaagaagaagaagaagaagaagcatattggacatggcatctctgcatttcgcatctgtgtacataagaccaagaccaaggttaaataattagttcacaattgatatttgatactccattgattatctcctgtgctatgggaggaggcacaggatgggtactactaccagctagacaccgtttttgttgatgtactattagtcaagttattattgtcatgcaagtattatttggagatatagcacgtagcagcagcatattgtctctgttttttttttttgtcaaggctctctagtgttcagttgagggtattagcattggtcaccctctcattgacccttgctttattaatgataattatggtttttatctgctc

SEQ ID NO: 17711 - DNA, 1659 bp, Oryza sativa
  ref <308>: DATABASE ACCESSION NUMBER: AK068139
  ref <309>: DATABASE ENTRY DATE: 2001-12-06
cagtggtcttcattctccagttcagtggtatgatgggccagtctactctaatgggcatcagagatcaaatactaattccacatcttatggttctaactcgtattcagcaaaaaatcagagccagcgcccaactgcaaacctcatgggtatgcatgcacagataccttcgtcgggaatgggtttgacatctcctagttatcataccaggatgtacccagacaacagattatatgggcagtatggtcagtatgggaacgcacttaaaactgggcttggtttcggatcaaatatgtacaactccagaaataatggacggtggggaattgttgatagcaagtacaagcctagaggtcgtgcatcttttggttttggcagtgagaaccaagatggcttcactgagcttaacagaggaccaagatctggaggattcaagcaccaaaaacagtttggaccttctgtcactattgctgtgaagggccaagccctcccctcagtcgggaaacaggagaatagtgccattccagataagggccaattcaaccaggaaggttttccagtaacatacaaagatgcaaagttctttgttatcaaatcttacagtgaggatgatgtgcacaaaagtataaaatacaatgtgtgggcaagcactcctaatggaaacaagaagctggatgctggataccgtgaagcgcaggagaaatccagtgaatgcccagtcttcttgttcttctctgtaaacacaagtggccagtttgttggtgttgctgaaatggttggtcctgttgattttgagaagacagtggattattggcaacaagacaagtggaatgggtgttttccaatcaagtggcatgttgtcaaggatgtacccaacaacatcttgaagcacattacattggataacaacgacaataagcctgtgacaaacagccgtgacacacaagaggttaagcttgagcaaggtcttgaaatgctcaagattttcaaggaccacatcagcaagacatcaatcttggatgattttggtttttacgagaaccggcaaaagctgatgcaggagaagagagctaagcagcaactgcttcaaggacagggctctcttgacaatgcttcacatgaaaaggagaagaatgcaattgatgggaaatccacagctcagaagcaggcattgagcaaggagggcacccctattgtcggcgaaatgctgaacgcctcaaaatctgcagttgaaagcagtgtaacaaatggcaattagcgcgatatattttctgcgttaattgccacagccgagcagtcagattgtgcaaattctgaaggttcgcggcgtggctgagcgatagctacttgggttgggacttggcaactaaatttcgtaacagactttctataggcttggtgcctggggagtgggtcagttcttactttgattttagctcgtgtgactggttttttgcgtcgttaggtctcatatattactcttatgacatcgggttttatgtaacccttatcctttttgttttttttagccttttcatctattgttattgttagcgaagcatccaaatttcgataaatctgaacaacagtaaggtagttttccgagttttgcagcactggagaaggtaataagacaagaactctggttttggttggtcctcc

SEQ ID NO: 17712 - DNA, 2586 bp, Oryza sativa
  ref <308>: DATABASE ACCESSION NUMBER: AK099040
  ref <309>: DATABASE ENTRY DATE: 2002-08-28
gagctgctgctgctgctagtgccaacagctgcatcctcccgtaggcgtaggcagctagctagctagctcgatcgaggccatctccatttccggcctatccctcttcttcttcctcctcctcttcctccgcctgtccggttcttgttctggtgctgctttgctcgacaccatccgattttttggaggcgattgccgtgctgtcaccggaaaaaggaaagagaagaaaagaaaaggctttccttcctcctgtgctgccccgccaacatcgtgttgaatctcgtcgatatatattttgctccgattggtgcctttttctcctggaattttgtgtcctgtttctctgtgtgggtggaaggcctcgcctttcaatccttccatcatcttgctgtccccccctcgattctttgcttcttcttcttcttcgaaagaaagaaattaaatattattacttgtttgatcttttccttttagcaatttctgccaatccccaggttcagtatttagtttccatccgagcagatttcttgttcttcgcttcaaaaatctgcgtatcgaattccatccatttttttgctttgtccaattcgtggataaagaaagagagggggagctacgaatccggcgagatggggaaggtaggggagaaggtgagggcgttcgcgacgaacaggtggctggtgttcgtggcggcaatgtggctgcagtccatggccggcatcgggtacctcttcggggccatctcgccggttgtcaaggccgcgctggggtacaaccagcgccaggtggcggcgctcggcgtcgccaaggacctcggcgactgcgtcggcttcctcgccgggacgctctccgccacgctgcccgcctgggcgatgctgctcgtcggcgccgcccagaacttcctcggctacggctggctctggctcatcgtcaccaggcagctccctgcgctgcccctctccatgatgtgccttcttatctttgttggaaccaatggcgagacatacttcaacacagcttcacttgtgacatgcattcagaacttcccaaagagcaggggcccaacagtgggtatccttaaaggatttgctggcctaagcagtgctattctgactcaactgtttgcagtattgcacacacctgaccatgccacacttgtcttcatggttgcggttggaccgtcattggttgccattggcctgatgtttgtaattaggcctgttggaggtcaccgtcaggtgcgaccatccgacaataacagcttcatgttcatctacaccatttgtttgctccttgcttcatatctggtcggtgtcatgctcgttcaagattttgtgcagctgagtgacaatatgctagtttttatcacggcggttcttttcatcctgcttattttaccaattgcaattcctgtgaccttgacattttcgtcaaaaactgaacatccgatggaggaggctctcctggctgaaccatcaaaaggacaggcaagtacttcacaagaaaaagagccagatgtattttttaagtgaggtggaagacgagaagcctaaagaaattgattcattgcccccatctgaaagaaggaagaggattgcagaattgcaggccaggctagtgcaagctgcagcacgaggtggtgttagaatcaggaggcgaccgcaccgaggagagaacttcaccctgatgcaggcattggtcaaggctgatttttggctaatttggttatcgcttctgcttggctcgggatcagggttgacagtgatcgacaacctgggtcagatgagccaggctgttgggtacaaagacgcccatatctttgtttcattgacgagcatatggaatttccttggtcgtgtcggaggtggctacttctctgagaatattgtcagggaacgtacatacccaaggcacatagcactggcttttgctcagatcctgatggctgctgggcatttcctctttgcaatggcttggcctggaaccatatatgtggcaaccttcctggttgggcttggatatggagctcattgggctattgtgccagctgctgtctctgaacttttcggtgtaaaacacttcggcgcaatgtacaattttctcacagtagcaaaccccacagggtcactgatcttctcaggtgtcatcgctagtaacttgtatgactatgaagctgagaagcaagcgcaccaccagagttctttgtctggacgatctcttttcgacatgagcttcctcgcagagggtcctctgaagtgtgaaggagctgtttgcttctttgtcagctcattgatcatgtcagcattctgcattgttggagctggccttagcctcatcgtcgttcacaggaccaagcgagtgtatgctaacctctatcgagctgtccgctgacttgaaatttccatggatagaagatggtgaatcccccttttgttgttccatgttacctgtattattgtgtacatgattcaagatacacaaagtctacctgtaaagtttcagatcatttcagagattgtattgtaagaatagctattcccaagtggaagtttacatgcactataaagtaatgatcatggggcattcttt

SEQ ID NO: 17713 - DNA, 4473 bp, Oryza sativa
  ref <308>: DATABASE ACCESSION NUMBER: AK068140
  ref <309>: DATABASE ENTRY DATE: 2001-12-06
gattagccaaagcatccaaacgcccgagaaaaaaccgcggcgatcggcggcggcggcggcggcggcgaggggtacggctacggcggcgatggacgcgtcgagcgagctgcagtgcgtggggaggctggaggtcgccgcgccgccgccggcgcgctacctccgggtgggctccctccccgtccccaccgactcccccgcctcgctccccgccctcctcccatcctcgtccccaactggagctccaaggtatcaaatgttgccattggagactgatctcaacacactcccgatgataccaaatattccagaaaaggttttcccgatggacgcaaagagtactgaaggatcacgatatggaagtggacttgccaaccaaaacttatcaaggaagtgtgaagcactggctgtgtcaggcctagctgaatatggtgatgaaatagatgtggttgctccaactgatatcctaaagcagattttcaaaataccatactccaaggcacaagtatctattgctgttaaccgtattggagatacacttattctaaacacaggtcctgatgttgatgaaggtgaaaagatattcaggagacaaagcaaccaccccaaaggatctgatccttcaatgtttcttaattttgcaatgcattcagtgagagcagaagcttgtgattgcccaccaagtcatcaaccatcaaaggagaagcaaacggcatccgctatcttgcgtggaccatttggccaaagggagggtccattggattcgccatcgtcatctagttttagcacttcaccttatctggaccagaatatcagtaaaagtagaaaaacatcacatggtgctcgtgaaagcctgtactggggtgcaagggaaaataagcagaaagttaaagggtctgaccctgttaagaaaaccactcatgttggtgacaaacccagatgcgacgtgcaagaatccgagaaaagtaggagggtgggaaacagtggatttcggaaggtttgcttttggcagtttcataatttccatatgcttttgggtagcgacttgcttatatttagcaatgagaaatatatggcggtcagcttacacctctgggatgtttcgagacaggttactccactgaactggcttgaagcttggctagataatataatggcaagtgtgccagaattggctatatgttatcatcaaaatggtgttgtgcaaggttatgagctcttgaaaaatgatgatatttttctacttaagggtgtatctgatgatggtacacctgcatttcatccacaagttgtccagcaaaatggccttgctgtcctgaggttcctgcaagataactgtaagcaagaccctggtgcatattggttgtacaagggtgctgaagaggatgttatacagctgtatgatctgtctatcttacctcaaaatcatactgctggtgatcatagatctacttgtggtcctatgtcttctttaatgaagaagggtagaaaggagtcgttgttctctttgggcacactcttgtaccgtgttgctcacaggatgtctttatcaaaggtgcctagtaatagagcaaaatgtgcgaagttcttcaaaaaatgtttggactttctcagcgaacaggatcacttggttgtccgggcgtatgctcatgaacagtttgcaaggctcatccttaggtgttacgaggagttggaattgacatctgaatcatttttgcttgaatctgaagttactcttactgacttggatgagtctccagacctgagccttgagaatttaccatcgaagcaaaatgaagtgctgacagagattagcgaggaaccagcaaccttagatggaatgttggaatgttcacggtcaggatcttctcaagcgtcaaatagtttagtggatccgggtcatgttgacattagtcctgtatcttcagctacaaaaggagatgttactgtggatagcttggtaatgtgtcagtctggaactcaggtatcaaggacaattgctgatgcaatatcctccaagttggcagctatacaccatgtatcacaagctatcaaatcccttcgatggaaccgacagctccagaatacacaagatgattgcgttggcaatgcagataccatttgggagaaacctgttgacttctctttatgccgatgtggtgacattgactgtattgaagtttgcgacattagagagtggctaccaaaatcgaaaatggatcacaaattatggaaacttgttcttttgctaggtgaatcttatctggcactaggagaggcatacaagaatgacgggcagcttcgtcgcactcttaaagttgtggaattggcttgtctagtttatgggtctatgcctaaaaatctcgagggtgagcaattcatctcatccatgtccaatagttcgttgagtgttgaagatggtgatctaaaggcaaatcttgttttggatgaagcagactatttcaaaaatgctaaatgtttcaattatgatgtttctgctgggcagttgcctccaaactatttattttgggttaaggcgtggatgcttgtaggggatgtctatgcagaatatcacagattgagaggtcaacaagcaccagtgttgcctgaacaaaagcctgatggtgaagttagaatgtcaaatgaagttgcaatggaggtcaaacgtcttaagagaaaactgggaaaggataagcagaattgtggcacatgttcactgataaattgtagctgccaaagtgatagggcaaatagtggcagcagtgcaagcagcagtagttctgaggcctctacactatatggatgaaagaaaaacaaaaaatcatctggcaggaacttccattcacagtctagagaaactaaagagaatcccagcacccaggactctatgggagattctgaaaaaaggtctgtatcgaatgttgaaattgatactaataattacaccatggaaaatcaatcaagaaataatgatggggatcctgataaatctaaagaagatgtttccagtgtgagggttggtggtatctttaagttccttggaggacctgaaccaggagatgttgaatacaatttgcattctgctattcattgctacgatgcagccaagggagtcatttttgcatttccagtgcccttggctgaaaaatccaccattcttaagaaaagaggctgggcattcaatgaactgggctgccataggcttgaaagtagaaatctgggtaatgctgaaattgcttttgctgatgctattaaagcatttcaagaggttgctgaccacactaatgttatattaatcaactgtaacttaggtcatggtagaagagctttagcagagcaatttgtgtcaaggatagatgaatttcagaagtatgattttcctcaagatgcatatatgcaatcctttaagtctgctaagtcggaatattttcaagctataaactattacacagcagctaagaggcaactaacatatgctgacaatgaggttgataaagtactttacaatgaggtttacactcagtatgcccatacacacctgaggcttggaatgcttttggcaagggaaagcttcttaactgacagttatgaaggtggatttgttgatgaatcatctaatagaacagttcttgagatttcagcaagtgatgctttcagagaggctttgtctacatatgaatctcttggtgaacatcgcaagcaggaagccgcttttggccactttcagcttgcttgttatcagagggatctatgcttaaggttcctcgatttaattgacaaggaggtcaaacagaagaatgaggataaatatcgtcagaaagctaagtggtatggttctttagcagaaaagaactggcagagagctttagaattttatggtccaaagacacattctaccatgttcttaaacatccttatggcacaatctgccctttccgttaacctctctgattcgttccactcaagtgtgatgcttgaaaatgcattggtgcacttgctggacggtcgccatgtggttgaagcaaatgatgagtattcaaacgacttggatctggacataaaaccgaaattctggagccagctgcagcgcctgctgaagagcatgttggcagctgctcgaccggcagcttctgtcggccaggccaacgccagcaacagcagaggagacaccgccaaactaaaagagatgtatcgtctgtcgctcaaatcaacctctctgggccagctgcacgcgttgcacaagatttgggtctcctaacacatctctgttgtacaaacatagacatcagattgctctacaaacgagtgttgtacatgttgattacatcgtcatcagcatctttgagcttgtaacttatgctgtcttttatgtttttatccatttgttatttattttttaaaatctctgggatgacttacatgctgattgtaaatttgcaattgtagtaatagttgtggaatgtgttgtaacttact

SEQ ID NO: 17714 - DNA, 640 bp, Oryza sativa
  ref <308>: DATABASE ACCESSION NUMBER: AK068141
  ref <309>: DATABASE ENTRY DATE: 2001-12-06
ggcttcctcgcagatctaattggcgctgctgcctccccacggagctccatctcgcgaagctacttggcgccgccaccgcggtgttccgccccgtcgagctcgcggggctggccggcgcccttgccaccttgccgtccagctcgcagagctgctcggcgctgcagcggcgttccatcccgtcggcctcgcggaaccagccggcgccatcgccacctttctgtctggctgctcagcggcgccgcccccgcggtattgcaccccgtcgagctcgcgcagctggccggcgccattgccaccttgccgtccagctcgcagaactgctcggcgctgcagcggcgttccatcccgtcgagctcgcggaaccagccggcgccatcgccaccttgctgtccggttgctcagctttcctctcctcttcagtgctgcttggagattaggatcacagatgtttgagcaagcagtaaatcgacagaaggtgctcactttctggacttaatttgtttttgtcatagatcacgaacacactgagagatataaatacgagggttcgtatgtaagttgtatcttaccaactatttaccagtttgtcaagtgggtgctaatctctggttaaaagaaaataatatgatttcactttgtc

SEQ ID NO: 17715 - DNA, 1180 bp, Oryza sativa
  ref <308>: DATABASE ACCESSION NUMBER: AK068142
  ref <309>: DATABASE ENTRY DATE: 2001-12-06
gaaattgatttcgtcaccgccgaatcccccagcagccagccatgtcgtcgtcggcgtcgcgcgccgccagcctcctccgccgcacatcctccgccctgtcccgccgctgcgcccactcctcctccgccgccgcgccgtcccgcccgcccgttccgctcccacgtttccgcgccgccgccgccgccgcctcctcctcgccgtcctctgggatcacctcccgccgcttcctcgcgtcgaaatccccgtcgtcgtcgtcgccctccaaggcctccgccgacgagaacctggtgcgggtcatcgactccgagatcgagtgcattgttcagtcggaggagggcgccgcctccgcgaagcaaattgatctaccagaagacttcccttttgagataatcgacaatcctggtgaccaatccataacactcaaaagagaaattgcaggagagactattaaagctactgtctacacaaactttgatacacaagatttgaatgaggatggcgatgataatgagaacaatgaggaatcttttaagccagcaatccagatggtcgtcactgttgagaaaccagaagcctccatcttggaatttgaatgccacttcaatgatgatgaactggcaattgaaagtatgaggatgctggatcaaaataatagtgatgcggagaatttgtatgtgggaccgacatttcaggatcttgatgagagcttgcagaaggccttgcaccggtatctcgaagtgaggggaatcaagcactcactgcatgactggctgtgcgagtacatgatgagcaaggatgagaaggagtatctggtttggttgaagagcatgaaagaattcgttgggaattgagtgccggtgcgtaatgtttgtccctcataattatccagagctacattgcatagaagtcacgtttggtgaaagaccatatggtggttttatttgtcataaatccttgctgctgttacccagcactgtttgctactagctagctcgccttttatttaatccctttgatctttggatgattgtgattattttgctcttgtgcgtggagtttttgagtacttactgtcgaagtgtcatcataatttcaacgtgctgtctccacaccttctccagaaattattctgttttgtgcattcgtgcacgcattgtgcgttcacaatggatattatagc

SEQ ID NO: 17716 - DNA, 2944 bp, Oryza sativa
  ref <308>: DATABASE ACCESSION NUMBER: AK068143
  ref <309>: DATABASE ENTRY DATE: 2001-12-06
gagcttagaaccccaaccccccaaagcctcactcacttcgctgcagaggaaaaaaaagagagaaaaatctccgatggctctccaggcggccaccaccacctccttcctcccctccgcgctctccgcccgcaaggagggagcggtgaaggactcggcgttcttgggcgttcgtctcggcgacgggctcaagctggagaccagtgctctcggccttcgcaccaaggtagtaactgtaataatgttgttacagcactctgcttgctctgtgctgatgctctgtttgttagtgctaatattagtacttactactaactggcgagtagtacaagtaattggctagttcgttcagtgaattgccaggttttcgtttctagacttcacgattattagtttcagactttcagttatgttggaggagcttaccactgtggctctgtggtttgctctgtcagattaggggcacccgtggcgttgcaaatggttatgcctgtgtttggcattaatcaactggctaatgagattatatcatgatgattctctcatcgttttagctatgacaatgtcaggggcttgttttgttttcacaggtgtgcagctttgctaattgctagtaacatcagtgtgtgccgccattgttagtgcaaccaagtagcctttgtgtctggttaatttgcaacttcaggttgacatttggatttgctgagtgagtgtatctagcattgcaaactgatgtgaattttgacgaacttttagtgcaagattgcaaggtttgcttgatgtacttagaaatggtagttgctcacaactctgacagcgccacaaaaattgtattatacttgattagcctggcattttgacttcctattgatctggattttatgtcagtgttagtttgagtatatatagcattgcaaagtgatgcgaatttgggtaacttttagtgcaagattgcaaggtttacttgctgtacttagaaatagttgctcaaaactctgacatcgccacacccccaaaaaattgtactactacttaattagctttggcatttcaagttcatattgatgtggatcgatttcataaacttgattttactgcaagactgtcaagtttgctccctgtaatttcataaacttggttccgcatgtaaactagacgaatttattaagcctaattaatccatcattagtaaatatttattgtagcatcacattattaaatcatagcataattagattcaaaagatttgtctcacaatttacatataaactgtgcaattatttttttccccacatttaatattcttgcatgttcaaacatttgatgtgatgtttttggccaaaaaattttttatataaaaacaaaggcctagtttgttcatatatcttgacattgttgccacgaaaactgaaactctcctgcagagggtgagcacgtcgtcggtggccatccgcgcgcaggcgtcggcggcggtgtcgtccccgacggtgacgccggcgtcgccgtcgggcaagcagacgctgcgcaagggcacggcggtcatcaccggcgcgtcgtccgggcttggcctcgcgacggcgaaggcgctggcggagacgggcaggtggcacgtcgtcatggggtgccgcgacttcctcaaggcgtcgcgcgccgccaaggccgccggcatggagaagggcagctacaccatcgtccacctcgacctggcgtcgctcgacagcgtcaggcagttcgtcgccaacgtccggcggctggagatgcccgtcgacgtggtggtgtgcaacgccgccgtgtaccagcccaccgccaagcagccgagcttcaccgccgacggcttcgagatgagcgtcggcgtcaaccacctcgggcacttcctcctcgcccgcgagctcctcgccgacctcacctcctccgactacccctccaagcgcctcatcatcgtcggctccatcaccgggaacacgaacacgctggcggggaacgtgccgccgaaggcgaacctgggggacctccgggggctcgcctcgggcctcgacggcgtgtcgagctccgccatgatcgacggcggcgagttcgacggcgccaaggcctacaaggacagcaaggtgtgcaacatgctgacgatgcaggagttccaccgccggtaccacggcgagaccggggtgacgttcgcgtcgctctaccccgggtgcatcgccaccacgggcctcttccgggagcacgtcccgctgttccgcctcctcttcccgcccttccagaagtacatcaccaagggctacgtctccgaggaggaggccggcaagcggctggcccaggtcgtcagtgaccccagcctcaccaagtccggggtgtactggagctggaacaacaactcggcctcgttcgagaaccagctctccgaggaggcctccgatccggagaaggccaagaaggtctgggagctcagcgagaagctcgtcggcttggccgatcacgatcagtgagtgagagtgatgtgctattgattttcgtctaggattttgctgtgctcttcttcttcttctcctctctaccaagaaagatcgatggaggagaatttgtaggacgcgtttctcacgaattacttagctgttaatgatcagcttgatgtgtacgatatgatggtgcagagtgaaagttgtgttgttcactggtggatcatgggatgggaatatgggattgttgtaagatgtaactcaagtgttttcttttttgggattacttttggtaataagagcttgggtgatcgaaaactacagatggtttttcttttaagttgtatgatctctgtggagtttttgagtaatttgtagttttgtaccctatcaaagatcatctctagctgcctctgagctctccaactctatatgtccatctctagtatatatgtcccatatttctgactgaaaattttcaagtcggttggttc

SEQ ID NO: 17717 - DNA, 1362 bp, Oryza sativa
  ref <308>: DATABASE ACCESSION NUMBER: AK068144
  ref <309>: DATABASE ENTRY DATE: 2001-12-06
gactagttgcgtgcgtcgtctcctctcctttcgctgacctcttcctctggactatggccgtgtccagaaaaactagtttcgttgctgttctagattcttcttcctgcttgcctcttcttgatatttgccctggtctagctgtcttggccttatagcagacagagctgtattctctggtgattgaacagaggattggaggttgttcttggttcttggaggagaatcatctcccttggcagctctctacaagcaggaggaagaagacgacacggcagtacagaggatcaatggaggaagaaccgagtgcaacgtgtaggtacttttgccacatgtgctcgctgatcgtgaggccggagatgggcatcgaggaggtgaagtgcccccactgccactccggcttcgtggaagagatggtcggcggcgacgacgacgatggacggcgaagcggcaacgccgccgccggaggccgcggcgctgccagtgaggagaacgccgacgacgaggcgacgcccgctccgcctccttgggcgcctatgctcatagacctcctcggcgtctcgtcccgacgccacggcctcgatgatggcagcagcgacctcgccgccttcgcgcggaggcagtaccgcaacatcgccttcctgcagctgctcagcgcgctccaggacgacgacgaagccggcggcgacacgcccggcgactcggggcgcgagcggctcgttctggttacccccgcggacggcaatggcgccgccgcgacgtccggcttcacgctcggcgacctgttcctcggccccgggctggacctgctgctggactacctggccgacaccgacccgaaccgtcagggcacgccgccggccaggaaggaggccgtggccgcgctgccgacggtccgggtacacgacgcggccggcgcgacgtgcccggtgtgcctggacgagttcgaggccggcggcgaggcgagggagatgccgtgcaagcacaggttccacgacggctgcatcctgccgtggctggaggcgcacagctcctgccccgtgtgcaggtaccagctgcccacggacgacgagcccaccgccggcaacgtcgtcgttgcagccgagggcggcgacgagctcattggcaatgcacgcggcggcggcggcgatggtgatggcgacggaggaagcagtggcaggaggcgctggctctcgtggccttttggcgggttattctcgcacagatcgagcaggaggtcctcctcgtcgtgacggcaaaatgcagcaaacaatgtgattagttcagttgtctagttgagtagttgtatgtccctgcatcagtgcattcttgtatagttggatagctgcatttgttctttggtcg

SEQ ID NO: 17718 - DNA, 1886 bp, Oryza sativa
  ref <308>: DATABASE ACCESSION NUMBER: AK068145
  ref <309>: DATABASE ENTRY DATE: 2001-12-06
ggcctccaccgccgtccttctcctctctcccccaatcaccgcccacgccacccaccaccatggcctcctccgcctccgtttctcccgccgccgcctcccaccaccgcctcctcctcccctgctccccgcgccgcctcccccgcccccgcccccgccctcgcccgcgcctcctccgctccgcccgcccccgcctcgtcgcctgccacgccgacaccctcctcccctcctcgtcccccgccgccgccgccgccgcgtgcgcctccaccgcctccgccaacgggttctccgactggctgcgggagcacgggctgccgccggggaaggtggccatcctcgaccgacccgtcccctgcttccgggagggcaaggacctgccgctgcactacgtcgccgcggggcaggatctcgaggctggggatgtggcgttcgaggtgcccatgtcgctcgtcgtcacgctggagagggtgctcggagacgagtccgtcgctgaattgctaacaacaaacaaattatctgagctggcatgcttggctttgtatctcatgtatgagaaaaagcaaggacaagattcattttggtatccttacattaaggagcttgatcgccagcgaggaagggggcaattagctgttgaatctccacttctgtggaccgaaagtgaactgaactacctgaagggtagccccatcaaggatgaagttgttgcaagagacgagggaataaggcgagagtataatgagctcgacacactgtggttcatggcaggttcattgtttcagcaatatccttttgacatacctaccgaggcttttccatttgagatcttcaagcaagcttttgtcgcagtacagtcttgcgtggtccatttgcagaaagttagtttagctcgaagatttgcgctagttccattgggcccaccactattgacctacaagagcaactgcaaagcaatgctgacagctgttggtgattctgttcggttggttgtggatcgaccatacaaagcgggagaaccaataatcgtctggtgtgggccacagcctaactctagattgctcctcaactacggttttattgacgaagataatccatatgatcgtatagtgattgaggcatccctaaacatagaagatcctcagttccaagagaagagaatggttgctcaaagaaatgggaagctggctatccaaaatttccatgtctgtgtgggtaaagagaaggaaacaattgcagaaatgctgccctatttgaggctaggatacatttcagatccagatgaaatgcaatccatactttcttcagaaggtgatacatgtccagtcagtccatgcacagagcgagcagtacttgaccaacttgttggatacttggagtcacgattggctgattatccaacaactttggatgaggatgatgctatgttggcagatggcaatttggaaccaaaaaaggaagtcgctactaggcttgtaagattggagaagaaattgttgcatggttgtctccaggctgctaatgagttcataaatgatttgcctgaccacactgtgtcaccttgccctgctccatttgctcctgaattgaaataagaaaagtaaagcatgcagcgagcattaattcttgcaacatgggtgtcacttctaatggtgttctcattaatgatcacatccagttgaagtgcattagaaggaaatctgaagcctggctgacgggtgtaatagggatttcactgcccgcatgcagatttggcgattagttgcattgcacacaagtgtgcacggatgttttgttaacctagtggcttttatattcactgagtagattctgtacattctgatgattgactgagatggtaatgccaatgtacatgttcagtctcatttgtc

SEQ ID NO: 17719 - DNA, 3024 bp, Oryza sativa
  ref <308>: DATABASE ACCESSION NUMBER: AK068146
  ref <309>: DATABASE ENTRY DATE: 2001-12-06
tgacttgcaagtcgtatccgcgccactcaaacggtctcctccatctccaatcccactcgcgcggccatggcgttggccatgacctccacctcgccgcagccaccgcctccctccccacgccggcggtggcggcggcggccgctcctgcgaccgggggtatccagtccgccctccaggtgcagacccagcccgagccccaaagccaaggccgccctcccgctcctctccgacgtggggcgcgatcccaccgccatcaagtactactcccgcgtcgcatccaacctcgtgggcgcggggcggctccgggagttcctcctcgccgccgagggcctccgcgcggcctccggggacgctggattcgaggggcgcatcagccggcgcctcctctcgcgcggcgtcgccgcggcgctccgcgaccaggggcttccccacgtgctcgagttcctccgcgacgccggccgcgtcgggatccgcgccgccgtgatgctcgacgctgacgcctacgacaccgtcgcggccgcctgccggctactgctggctgagcgcagcatgacggagttcgtcgaggccgtggaggcgctagctcagtgtggattctttgttcaaggcattgtggatccgatggatgtattgaaaatatttgtcaagaagcgtgacccaaatatggcaataaggtatgcacgtatatttcctcaatcccaacttttgctgtgcaatacaatggaagcttttgggaaaagaaaggagttaaagcatgctctaacagtctttggagcactcaaggatcagtttggaggtatcaatatgtttgcatgccgaagtatcatcgacatatgtggtcattgtggttcttctgtgcaggctcgaattatattcgaggggcttcttgctgataagattactccaaatgtctatgtcttcaacagccttatgaatgtgaatgcccatagcttcagctacaacttttcagtctacaagcacatgcaaaatcttggcgtccctcctgatttgacatcatataacattcttctgaagacatgctgcaacgctaaggagtataagttggctcaagaaatttatgaggaaattaagaaaaaggaacagaacggtcttttaaagttagatgtttttacatacagtacaatgatgaaggtgtttgcagatgcaaaaatgtggaagctggcttccgacatcaaacaggatatgcaatcagctggtgttcgtcttaacctagtcacatggtcatcattaatcaacgcctatgcaaattctggtttagttgaccgtgccatagagatacttgaagaaatgacaagggatggttgtcaacctactgctccatgcttcaatattatccttactggttgtgttaagtcatgccagtatgatagagctttccgcttgttctatgactggaaagaatatggagtcaagatatctctatcccctgaacagaaaggatgttttggtgacaacttctcatactgtgaagaacatacaagtaacagcagtactctgttagtggttccatttagaccaacagttacaacatataatattctaatgaaggcctgtggcacaaatggagaacgcgcaaaatctgtaatgaatgaaatgaggcgaaatggcctttgccctgaccttattagctggtctattctgatggatatttatgggtcatctcaaaacagggatggagctattcaggcactcagaagaatgcaacgtgttggaatgaaacttaatgtcactgcatatactgttgctattaaggcatgcgttgaaaacaaagacttgaagttggcattgcacttgtttgaagaaatgaaagcacatcaactgaaacccaatttggtcacatacaagactcttttgacagcacgcaataaatatggatcattacaggaagtccagcaatgtttggcaatctatcaagaaatgagaaaggctgggtatcaagcaaatgactattacctcaagaatttgatagtggaatggtgtgaaggagttttgtctagcggtaatggaaatcgagaatattaccaattggatcagaggaaagaatcattcaagctcgttcttgagaaagtgacaacattcttgcagaaagatgttgatcaaaaccaaactgtcgatgttcgtgggctttcaaaggttgaatctcgcgttgtagttctctcagttctccggaagatcaaagagaagtatctactaggacgagcagttcaggatgatgtagtaatcatcactggtcatgggaaggcatcaagcgccaaggccgagactagtgttgtcgaggtcgagcatgcaatagttgctgttctgacggatgagttgggtcttgaggttttaattggacctggaagtcgcccggcttcgtccaaacccacagttccagctcgttctaggagtcatttagatctagcttctaaacatttttccaggagaccgcaggggatgataaagatcccgatcaactctctgaatcattggttgaagaggaaagctgtgaggactgtgcagtgacagttcctcaaccttttgcagagtcatcctaagataaggtagtgtatacagatgtacaggttggctggtgctactcagtgacatcaacccaacacggtttcacaagaaggaatttgtggacggccatccagatacggtaaaacatcagaattaaagttattaggttattgctggaaacttgcaatccccgcaattccatggaaactgaaaaacatgctgaccgagtacagtgaaatactccactgtctgtggattttgagcaccattgcctaatatagatttgtaacaagtttgttcgctcaagatttgaaacctgattgcaaaacaaatgtccaagatgcccatggctgtattgttgtgcctcttaaaaacatgccatgatgtgctcagttacacatgtgaacagctccaattctacattgatccaaacatggagttggcacataaatgctggaatacattgttttgaatacatgctcaggatacatgagtaatatc

SEQ ID NO: 17720 - DNA, 2226 bp, Oryza sativa
  ref <308>: DATABASE ACCESSION NUMBER: AK068147
  ref <309>: DATABASE ENTRY DATE: 2001-12-06
gcgagcgtgcatatgtatacgagcatctgccttggtatcttgtttagcggaaaacaaaggaaaggttttcgagctacatttgcttaaactgaattgcgtatgtgtctctccagtggctgcactgaacacgatcctggggagatggggcctgcgggcgtcgccggcgtggaacatcagcggcgagccctgcagcggcgtcgccatcgacgagaccggcgtcgacaacaaccccaacatcaacccggccatcaagtgcgactgctccttcaacgccggcaccgtctgccacatcatcagactgagagtgttctcgttgaacgttgttggtcaaatacctgaggagctgcagaatctctcttatctgaataacttgtatggcctctaaactttctcttctctgttttgaagataaagcagtaaagcactactttttctgagagctagctagtaggatgtagagaacatcgactgaggaatggcaattgagatgctcttcagctcttgagggtccttttatccaatttatgaataatcttttgagtccaacttctcatggtaaaattatgctaaaaggatatatcacttcaaagtgctaaatctggaagaaagaatcagttgtatgcgccgacaagatgggtgcacatgtcattcacacattcttggaaaaattcttaaggtgtgatctttgtgggggtagattatatataattgttctgtctgttgactgtgatttggcttcaatatagcagatattgggaaatacattatatagcagaagctataatcctataccacaatcttgatagtattaaataagtatggaacaaataccatatatatgttttacgaggacaatacacataaatattttgagaagtttgaaaataaagcttgcagaatacctatcaccataccctgttctccattgtgttactcaagcgttcagtaaaaaaatcctaataactagcgaagaactatcatcttcctcatctagaaaaactagcaagaataatcagggtacaggagcctgattatgaagtgtttatgtttagcttgatggttttgatattactgaagggatcttcggcgaaattacttgacgggtcccctgccatcctttattggaaacttttctgccatgcagtacttggcggtgtccctcaatccgttatctggacctcttccgaaggagatcgggaatcttagaaatcttctatcattgggcattagttcaaacaattttactggtgaactccctgcagaactgggcaatttggaaaaactcgagcaaatgtatattattagttctggcttcagtggtcccttcccttcaacattctcaaagcttaagaatttgaagattctgtgggcatcagataatgatttaacaggaaaaatacctgattattttgggagctttccaaatttacaagatttaaggttccaaggaaattcttttcaaggtccaattccagcaagtctatcaaatctaaccagattaacaagtttgcggatcggtgatattctaaatgggagctcctcgctgtcgtttatctctaatctgacatctttgaatgtcttaatactgaggaactgcaagatatctgataatcttggaacagctaacttttctaagcttgcagggttaaccttactggacttgagctttaacaatatcacaggtcatgttcctcaatccatactgaatctggacaagcttagcttcttgtttcttgggaacaacagcctttctggaagcttgccatatgacaaaagcccttcactgaacaatttagatttttcatataaccatctctctggaagctttcctccatgggttactgggaacaatttgcaactgaatttggtggctaatgacttcattcttgatagcaccaacaatagcattttaccttcagggctaaactgtctccagcaagatactccttgtttccgtggttctccagaatgtataattccaagtttccaactcttcactcacattggtagttgatatgacctcagtactattataaccatctcaattgcagattattcctttgcggtcgactgtggcagtaataaatctacaaggggatcagataatactttgtatgaaactgatgctcaaaacattggagccgcatcttattatgttagtgacaatgcgagatggggtgtaagcagtgtaggtaaattcaatgaggcttccaatggaagttatgc

SEQ ID NO: 17721 - DNA, 3544 bp, Oryza sativa
  ref <308>: DATABASE ACCESSION NUMBER: AK068148
  ref <309>: DATABASE ENTRY DATE: 2001-12-06
gtggggcccattcggccattccccaatcccaaccatcgcgtcctactccagccgccgctgccacccacgtccgtcggcgccatggccgccgccaaggagctccttcgccggctccagcgaccagcgtccctgcgcggctgcagttcaactgtttttggtgtcgtcccctctgtcctatctctttctgcttcttctcttcagcctaaaaaatttggtcattcccttttgtctgctttccaatctgcaaaagcacataattttttcttcatctccattttttcttcttctccatttaatctttcttctatgctattgaatcataacggtacgtttaatttatccaatcaccttttttttcacactttgattttcatgtgctagatggataactgatggtggtatgactgaatttgattcttcagaaggcctttattggatttatggattgaagccaactttgtatagttcagttttctagcccttttgcatgaaaaatatatttgcagctgctcatttctactgccggttagtagaactgaatctaaatatattcagatttttgctcctggtgtgtttcgtgctcatattattggattgccaaaccctgccataaattcatgaattcatgaattgttgagtctcgggagatcaaaattgctccgaggagggagaaaagcgcgcgcgaatggcgctcctaatgggggcgaaacccaccgccccattatactcctccctgctccagtgctgcatcagctcctgcgcattccggcaaggcaagtccgtccacggcagggtcgccgccgcgtccgcctctcctccggacctgcacctgagcaccaagctcgtcatcttctacgcgcggttcggcgacgtcgccgccgcccgcaaggtgttcgatggaatgccgcacaggagcgtcgtgtcctggacggccatggtctccggctacgccaggaacgggcgcccgcgggaggcgctggagctgttcgcgctcatgcgcgcgtcgggcgcgcggccgaaccagttcacgtacgggagcgcggccagcgcgtgcgcgggggccgggtgcgccaggagcggggagcaggtgcacgcgtgcgctgccaaggggaggtttgcgggcgacatgttcgtgcagagcgccctcatggacatgcacctgaggtgcgggtccgtggaggatgcgcggcagctgttcgcggagatggggaagaaggatgtggtgtcctggaatgccctgatcagggggtttgtggaacgcgggcatgacggtgatgcgcttggattattctcttcaatgctgaaagaagcgatgattcctgaccattacacgcttggaagtgctctaaaagcatgtggaatagtcggtgttgctgtcaatgttgagctaattcacagttgcatcatcaaattgggttactgggatgaaaaggttgtcatcggatcacttatcaactcttacgcaaaatgtcggagtatgagcagcgcaagagtgatatatgattccatctctgaaccagatctcgtgtcatcaaccgcactgatcagtgggtacaccatggatagaaactacagtgaagatgcaatggagctcttctgtaaaattcatcggaagggtttatggattgatggtgttctattaagctcagtgctttgcctttgtgcaagcgttgcttctgcaagatttgggacacaaattcatgcatatatgtgcaagaagcagcctatgggtgatattgcattggacaatgctctggttgatatgtatgcaaaggcaggagaattttcagatgccaagcgtgcttttgatgaaatgccctatcggaatgtgatttcttggacgtcacttattactgcctgtggaagaaacggttctggagaagatgctgtgactctttttaataggatggtggaagatggtgttaggccaaacgatgtgacattcctttctcttctatctgcatgtggtcattgtggtttgacaaacaaagggatggagtactttacttccatgatgagcaggtatggtattgatccaagagctgagcattacagctctgctattgaccttcttgctcgtggaggccagttagaagatgcatggaaacttgtccagaagacaaacttaaaacccaactcatcaatgctgggtgcaatgcttggagcctgtaaattgcatggaaacatgcttcttggagaaactgcagccaagaacctttttagtatagatcctgggagttctgtaaactatgctgttcttgcaaacatgtatgcagaatgtagtctatgggaggatgcacagaggacgagagaagtaatagatgaaacaacagatggaaaggaagttggtttcagtgtcatctgaatatgacagaaacttttccactgcaagaaatttgtatcacagtttttagccactgatagatgcatcagatgaacctcaaattctgggccactttgacaagccgcaacacacttcagagttcagactccagagttaaccaatttctgcctgttcagttaaacagtgaatagctcatgacctattgacctatcacaaattcacctgccatcatgttcgttcagtggttgcgatggctctatacttctggatagcacaccaggatcaccatctgagaaggaatcaataccaaacctcagtctgcgaggttttggcacaatagaccgtgtcaaagctaagctggagcaagcctgccctggagttgtgtcctgtgctgatatccttgctctggtagccagagatgttgtcttcttgaccaaagggcctcactgggaagttccaactgggcggagggatgggacaggatcagtgaaggatgatgctgtgaacaacctccctccccccttcttcgatgccacgcggaacttgtataaattcttcatcccaaagggccttgacgcaaaggatcaggtggttctgctaggtgggcacactcttggaacctcccattgttcatccttcgccagccggctgtacaacttcagcggcatgatgatggccgacccgacgctggacaagtactacgtgccgaggctgaagagcaagtgccagcccggcgacaagacgacgctggtggagatggacccggggagcttcaggacgttcgacaccagctactacaggcacatcgccaggggcagggcgctcttcacctccgacgagacgctcatgctcgaccctttcaccaggggctacatcctccgccaggccggcgtcgccggctacccggcggagttcttcgccgacttcgcggcgtccatggtgaagatggggaacatgcaggtgctcaccggcgcccagggggagatcaggaagcactgtgcctttgtgaattaggctgcaaatatatatacaaccgctgaactgcatttgtctgaagtgttagctgtttgatattccttggtatatgtagaattattgtgaaatatgttttgttatgcctttgtttgtattatgatgtacaatcaaagtaaactatttgcttcattcaaggaaataaaatgttgcgtaatgccttcggtg

SEQ ID NO: 17722 - DNA, 1017 bp, Oryza sativa
  ref <308>: DATABASE ACCESSION NUMBER: AK099041
  ref <309>: DATABASE ENTRY DATE: 2002-08-28
gagtggcgttccactgaaccaggccaagccagacggacaagacttcgccgcagccgcgtcctcctcaccgcgccgccgtcgcaatggctacggccatcgcagcctccgcgttcctctcctccgccttcgccagggacaggccgctcccccgccagcggcgcgcggcgaggcccgcgacccgccgcgccgccgcggggggcctgtcggtgcggtgcgagcagagcgagaagcagaagaggcagccgctctccgcgctcgtcccccgcgagcagcgattcatgttcgaaggcgacgagctctgcggccccgacatatggaacacaacatggtaccctaaggctgcagatcatgtaactactgagaagacatggtatgttgttgatgcaacagacaagattctaggtaggcttgcatccaccattgcagtacacatcagaggaaagaatgaggccacatacactccaagtgtggacatgggggcttttgttgttgtggttaatgcagagaaggttgctgtttctggcaaaaagcggtcacagaagctctacaggaggcactctggacggcctggtggaatgaaagaagaaacttttgatcagcttcagaaaaggattccggagagaattattgaacatgcagtgcgtggcatgcttcctaagggcagactgggaagaagactgtttacccacctcaaggtgtacaagggagcagaacatccccatgaggctcaaaaacctgttccactgcctatcaaggataaaagaatacagaagtctgagaagtagataattcctgtggagactaagaaagacacaacaatctcacgtaaattcctcccctcgagattttgtccaatctttggaatgtgatgcatctgtctgtttggggaatggagtgtaaaattttttgtaatttacttcctccaaaagtttgtgtttctaagtcatagttcttgttgattacatatcatgtacctaataccgtacgattttaagcaatccgatatttccatatccg

SEQ ID NO: 17723 - DNA, 1226 bp, Oryza sativa
  ref <308>: DATABASE ACCESSION NUMBER: AK068149
  ref <309>: DATABASE ENTRY DATE: 2001-12-06
ggtgagttctgacttatctgcacattggtgagacagtcaatgagtgcagatgagactgcagagattaaccctgtcttgtccagagaataatctttgatttcagagcatcttgccactcaaatatctcgcatacatacataagattcgctcgcatgatctgagctgttttgtctgaatttctgaatgcagctgaggcagaaatcggtgagagtggtaggtgtttgttgcgatcgttgaagcatgaagagcagcagccaagaagcgggagaggaggtgtccgagatcagcagccaggcggcgtccaacaacaacgagacgtgcaactcctcctccggcaaggtcagcctcgacctgtcgctcaccgtcgccgccgccgccgcggcggctgcctccgccaccgagtcgagcaccacggacagcggcggcacgcggccggcggcgacggcgacggcgacggcgcgcgagccggcgcgggtgttcacgtgcaactactgccagaggaagttcttcagctcgcggcgctgggcgggcaccagaacgcgcaccggcgggagcgcacgctggcccggcgcgccgtgcggctcgacgcgttcccctacggctacgccgacgtggcctcgctgccgctgtacggcgccggcctgtaccccatcggcatccaggcgcacgcgtcggtgcaccaccaccaccctggcgtggcggcgccggcggggcgcgccgagttgaggtcggcgcgcgcgctgctcggcccgatgccgttcttcgtgcaggcggcaggcgatgaggatgccagcttcgggtggccgggcagcttcaggccaccgcccaccgccgccaccaccatccccgccgccgccgccgccccggtcgccgtcaactccggctcctccaactccaaccacggcggcagcgtcgtcgtgcaggccgccgccgacgagcccgacctcacacttagactctagctgtcccatccatccatccattagtctggtgtaacattcatcaggttgctcctgatcatctcctccgtttgtgagtagaattcttgcttgcttgcttgcttcgctctcgatcctgctgcttgagcttgacatcaaccaacctgctagtaaattactattgcttcaaatgcatgcgtggaagtattgtttttgtaaatacagcttagcctatcctaatatgattgtacttgtgccctagctagacgagatgatcctcctttgagc

SEQ ID NO: 17724 - DNA, 3687 bp, Oryza sativa
  ref <308>: DATABASE ACCESSION NUMBER: AK068150
  ref <309>: DATABASE ENTRY DATE: 2001-12-06
gctcccgaattccccgccccgctcatctcgcctcgcaggcccgcccgccatgagcgcctcctcctccggtggccgcggcgcgccgccgccggccaccgccgcctcgcccggccagaagcggccgaggggagacgaccccgcgtcgccttccaaccgctccgaatccgcccccgccaaaaaccctcgccgcgccttctcctcctcccccttcgccgacttcgggagctacatggccgcgaagaacagcaagctcgccgcgcagttcgaggctgacgcctccacgtccgccgcggaggttaccggcggcgtcttcgctggcgtctccatcttcgtagacggcttcaccgtgccctctagccaggagctgaaggagattatgctgaataatggtgggcggtttgtcaactacttctcgaggaatacggtgacgcacatcatctgcacccatctgccaaatagcaaaatgagtaatctgagagcattcagtaagggacttccagtggtcaagccagcctgggtggtggattcccttgcagagaacagactcctcagctgcgtcccgtatcaaataagtcagcataattcttcaagccgaaagcagacgaagctttcttctttcttttctgggagacattatcagggggaactaaatgatcaaagcaattcccatgagctacaatcttcttctgttcaggagggatcacaagaccataacagtggttgtgaaaaggaagggtcactattgaaggaggaggcatcaaaggactcactatcctctgatgatcataaagcttcaatgtttgaagaacaagatagtgaagactttgttgatgaggctggtaatgcttatgaaacagcatgttcagagaggagggataatgacatggatggtaaacttcatgttgctgagtccccagatattaggtcaaggtgttcaaatttgtgcagtacaagctctacgggcagtcatttgtcattggattcgttggatagaaatgcaactaaatcttctagtcggacacattcaaccctcacagatccaaattttgtagagaactatttcaagtattctcgactgcatttcattgggacctggagaaatcgataccgcaagcgcttctcaaatttactaggtgataaaagcagtaaggggaaccgtgatcattcagggaagaataacacgatcattcatattgatatggactgcttttttgtatcagttgtcatcagaaataagccagagctgcatgacaaaccagtagcagtttgtcattctgacaatcctaagggaactgcggaaatatcatctgcaaactatcctgcacgaaattatgggataaaggctggcatgtttgttagagaagccaaggctcggtgcccccacctaatgattgttccgtatgacttcgatgcatatggggaggttgctgaccagttctatggtattttgcataaatattgcagtaaggttcaggctttgagttgtgatgaagctttcctggatatgaccgaatgcttacatgataatccagaggaagtaacacagaaaataaggaatgagatttttggtacaacaaagtgctctgctagtgcaggtatttctggaaacatgctcatagctcgtttagctaccagatctgcaaagccaaatggacagtgttttatttcctctgagaaggttggtggatatttaaatactctttctatcaaagcactcccaggcattggtcatactgtttcagataaactaaagagcaaagaagtggaatactgcggccagcttcgcaacattccaaaggaatctctccataaggattttggtaaaaaaattggtgacatgttatggaactattgcagaggaattgatcattcagttgttgaagctgttcaggaaacaaaatctgtcggtgctgaagtcaattggggagtcagatttaatgataacaaagatgctgagaattttcttgtcaacctcagcaaggaggtttgtctacgcttggaaggttgtggagtgcagggtcgtactattacccttaagttgaaaacaagaaggaaaggtgctggagagccaatcaagtttatgggatgtggtgactgtgaaactgttagtcgatctatgacgattgcaggtgcaactgacaatccagtcacccttcagagaatcgcaaaacagttattctcatcattctgtgttgatgtgaaggaagttcggggagtaggactaaaaatttcaaggcttgagcatgcagatttggctcggggagcaccacaagggaatatgcttgaatcttggcttgcttcaccatctgacaagctcaagaaacacagcaccgagaaagcttgcttgctcaaaaatcgtgatgatgcagcaactagcgagcggagaggttttggaagtatcagaccatcaggtataggagggacttctcgttcatcagaagtgaaccctccaagtgacaggtccactcgagttggtgttgagctgccaccattgtccgaacttgatttggaggtcctaaagaaccttcctccagagataatatatgagatgaatgacatgtacaagggagaattgcatggttttctggggataaccagtggtgacaaagccaaggaaagcaatacaaaatctcttgtttttccagcagttgatcagaatcttgtgcctgttcttgacacgaagctgcatggagatggaaagcacaaagactccatacattttaaaaaggaggcagatattaaggggccttcaggtgaacaactctctgaattaaaacaagccaatgctccacgttcaatagccagtgaattggttgatataccaactaaaagtgtcatacagcatgatttcatgccaaattctttaagccaggcagacgtcacagttcttcaggaattacctgaggatgtgaaggctgatttgtttaatgcgcttccattgcacagatcaggagatcctacatgcagcacttcacatgtttctgaaaacaaatttccccaggatggaagaagcgatgatccaaaacaacatccacagatttgtcacctgccagggaattcccaaaaatggattgaagagttcagagttagccattgtctgatactgaatgttattgcagagcaacacacagactccatctccagtcgacctttatcttctgttttagaacctgtaatttcctaccttcccctgtgccctaactcaggcactgaagaatggaacgaagcatttgcaagcctttctgaacttctgacacaatatatacaccaaaaggttgaatctgatattgaagagctccacaaatgtttccggcttttaaaaagattgtcatcaggatcagagcttttcctggaattgcacgatagcattcttcctctcttacaggattctgtcaggcagcattatggtgggatactacatttatagtttattgttcaagtacaattagccattttgccgtcgaaagggccaagagaacctgttgagatctttgctccgatttacctcaacggctaaccatcatggactgttctcctgatcgtgttgtcgctaattccacttggatatggaccgagccggtttttttgttgctgcaaacctacaaagttgtcctttatacctgtaaatataactagtattattactagcactactacattgacggctctatgcaggctgcaacttgc

SEQ ID NO: 17725 - DNA, 1197 bp, Oryza sativa
  ref <308>: DATABASE ACCESSION NUMBER: AK068151
  ref <309>: DATABASE ENTRY DATE: 2001-12-06
gactccagccagcgagcgatccacctcgatctcttctcttcctctctctctctctctctctctctctctctctctctcctgagcgccaatcgatctcgtgatctagagctcgcttcctcgacttcgtgtcaaacaccgggaggagcggaggccgatcggagcctaagcggggctcgcgccaggagctggctaaccacaggcagggaacggcggcggcggcgcgcgaggcgtcggcgtcggtgtcggagctggcagagctggacggcgcaagggatcagccggaggagcaggacgccaagttcctggtgctgcggctgtacgaggcgctcaactccggggacgcgcgcagggcgcaggagctgctcgcgccggacctcgagtggtggttccatgggccgccggcgcaccagcacatgatgcgcctcctcaccggcgccgaccacggcgagtcaaggttcctcttctcccctcgctccgtcgacgccttcggctccaccgtcatcgccgagggcaccgacgacacccgccagctctactgggtgcacgcctggaccgtcggccccgatggggtaatcacccagctcagggagtacttcaacaccgacctcaccgtcacccgcctctccgcctccgccgccaagaccaccgccgccatttcttcctccaactccaaccacgcctcctcttcggcgccgccgccgccgccgtccaagcccaagtgcctgtggcagagccgccgcgccgaccgcgcgcacaagtcgctgccgggcctcgtcctcgccatctaagaacgaactcaaaagacatcaagaactcaaggcgcaaaaagcttccctaaattaatcacatataaaaaaaatcaagcgatacttatcaatagtgattagctaaataaataaaaacggaagcgcacgcactgagtgaagtcactagctatagtttattgcttatgggctaaagccgctcagctcaactgagctgcttcaggtttgcgtgattaatcccactaccactactgcaactagccagccagttaagtagtgttgcttttgcttgcttgtctgaaagctgaatcagcagtgtgaccagtagcatcagtagctttggtccaagtcattatggattatgtaagtgtgtactccttccacggtaaagctaaaccgtggctgaatatgaatgatggtctgttgttgttgc

SEQ ID NO: 17726 - DNA, 1468 bp, Oryza sativa
  ref <308>: DATABASE ACCESSION NUMBER: AK068152
  ref <309>: DATABASE ENTRY DATE: 2001-12-06
gacccacaacacaaggcgttactccggcacctcccgcctctctctccctcgccatggacgcggcggggaggaggctcgcccgcgtcacggcccacctcctgcccagctccctcccgctcccgctcgcctccgcccctaccctcgcgccttcccccgccgcgtcgccagcgtcggacagctaccgacgggtccacggcgacgtgccgtcggagcccccggagtggcgcgcggcgacggacgagtccgggaagggcttcgtggacatcctctacgacaaggccgtcggcgagggcatcgccaagatcacaataaaccgccctgatagaaggaatgcattccgacccctgaccgtgaaggagcttatgcgtgctttcgaggatgctagagatgatagttcaatcggagtcatcatactaacagggaaggggacccagtccttctgtagcggcggtgaccaggcgttaagggatgctgatggatatgttgattttgatagctttggcaggctcaacgtcctagacctccaggtgcaaatacggcgccttccaaagcctgttatagcaatggttgctggttatgctgttggaggaggccatgtgttgcacatggtgtgtgacctaacgattgcagctgacaatgcaatttttgggcagacaggtcctaaggttggaagcttcgatgctggctatggcacttcaattatgtctcggttggtaggaccaaagaaatctcgtgagatgtggtttctgtcacggttctacacagctgatgaggcagacagaatgggtctcgtcaatgtagtagtaccactcgctgatttggagcgagaaacggtgaaatggtgccgaaaaatcttgaggaacagtccaacagccatccgggtgctgaaatctgcactcaatgcagctgatgatggccatgttggccttcaggagctcggtggcaatgcgacactgatcttctatggaactgaagaggcaaaagaaggcaaaaatgcatacatggagcgacggcgccctgatttctcaaagttccctcggaagccttaaaagttgaacttgtgcactactagtacagatttctctacaattctgctgtatgtcatgacgcagactgaaatgctactcaaatctccgtttcctcgtcaactctgccggaagcataggtgggcgtcccaatgattgccagccccggtggacgggtgtagaagcgagatcgttatcctttacatgtcatttgttagttggcatttttataggtgtaaattgcagtgcttacgtatatgtgaatattcatcccgacatatcatagccgctggaaataaatggccttgtggtgcattagttatttgatcctataacaattggcctatatttatttttttgctggttgttttgtttgcttttcaatttattttaataactttttcaaggatatttatctgtaagaatttggatgtggcttgttg

SEQ ID NO: 17727 - DNA, 2255 bp, Oryza sativa
  ref <308>: DATABASE ACCESSION NUMBER: AK068153
  ref <309>: DATABASE ENTRY DATE: 2001-12-06
ggacgggagccgcctgcctctctccgctgcgcgccgcctctttccaattccacctcgccgcttctcctctcctctcaatctctcatccctcccttgtcgtaccgcatccgcatcagcaccaccatctcctctccgcggcggcgccgcatttccttccctcgccgaccgccaccaccagcggctccgcttgctcttcaaatgactcttgacatcaggaaggattatctctgttttccttgctgtggatgctcaataatatgccaaattcttaggccaaggtctatttggatctcgttatgctagtatagacaacgttccattctccttagtatggccaagacatctcttcctcctggattccggtttcatccaacagatgttgagttgactgtctattacctgaagagaaaattattgggcaaacacttacggtgcaatgctgtttcagagcttgatctatacaaatttgccccttgggatcttccagagaaatcttcgttgcagagtaaggatcgagaatggtatttcttttgcccacgtgataggaaatattctagtgggtcaagaacgaaccgatcaactgaagctgggtattggaaagctactggaaaagacagaccagtaatatataattctcagactgttgggatgaagcgaactttggtgtttcatcttggcaagccacctcggggtgatagaactgattgggtaatgtatgaatacaggctggaggacaaggaactgtctgcttctggtgttaaactggatgcttgtgttctctgcaaaatctttcaaaaaagtggtccaggtcccaagattggggaacagtatggtgctccattcaatgaagatgattggaatgaagcgaacggggagctatcctcttttgccttttctgtgcccccttgtgcgctggaatcaagtaatggcaggttaaacacagctggtcagcagctggctgttagtgataatattggatcttctttggaccattgttcagaaactaatgacaagatcgctgttggtggctgtgggacgactagtcctagcgttccttttgataccatacatacccagcagctagatgagattatcagttgtttctcgacagatcttttgaactccgttagtcgagatggttcattgcctgactcaactgctgactatgataatgacaatgaagtatcgtccgatgatggtgaagcaatatttaatgaacttgatgaacttgattcccaatcagatgagagcatttccaaccattgtaactcatgtggtgaagacttgattcctcctacgctggaagtacttaaaactgaacagtacttggagctgaatgacttgtccttttctcttgccgatgatcctgatccatgtaacctgctgctgacaactaatctatctgatcagaaccatccagaattagagaccaggtttgagcaggggtctcttgttgacatctgcaataccactaatgctaccatatccaatgctgcctgttcagcgtcaacagttggtgatcatgtgacctgaatcacaggtatggctcctatacctatagcctgaaccagacgggggttcgttcgctcgctgttacttgaggcatgtcatggttcttctgtttcctgtttattgaagtgcattttacagctcaaacaggaaggcgctcagattatgagattgggagttgcagctagtttgcgaagattcagtttgggccaattcaggagaattcgtggttcatggacatttcgcttaccctagtttgcgaagaagattttgtcaccaataagggatcggtacgaataactcgttggcgacgttggatcacttgtccttaaaaagatgttggaagcctgattctggagcggacagccttacattcctggtgatcccctgagcttgtgtggtgcttactgccgtccaaattagtactcctaggcagctagtaggaatttcctctttttttttcctgttttacctgtacgagcggtctgtctgatcatctgatgtatgctaacgtcaatagcgagttacgcagcagcgtagtacaaagctcaactattaggctagattagagagagacggcgatggtgacttttcgcaacgaacctagattgaacatgttgcaaactaaatgttggcacagctaaatattcttaaaaccaacgactaaatgtaatatgcgcaaatctttgaccatacccatacgttgcagatgcaattaattaatgaaaccttacatctgatttttc

SEQ ID NO: 17728 - DNA, 1772 bp, Oryza sativa
  ref <308>: DATABASE ACCESSION NUMBER: AK068154
  ref <309>: DATABASE ENTRY DATE: 2001-12-06
gacctctctcttcttctcccacaagtcagagaaggaaggatccaatactagaaaagggaaaaaaaaataaatcaaaatccattccccttctccttccccaaacacggtgtggtctgcacgcgactcctcccccctccgccgccgccgccgccgcagcgagaccccggcgaatggcgtcccgcatcgcctctcgcctcctccgccgctccaacgcgactctaggcctcatcaggagttattcacatgccaggaactacagcagtcaactttcagctcttattccaattggttcccagagctcaaagcttacaagaagacgctattacttgccaaatgcctctccgtaccaactctggagtaggtcatttgcatctgacaatggagaccaggttgaagctgttgtccctttcatgggtgaatctgtaactgatggaactcttgctaacttcttgaagaaacctggtgacagagttgaggctgatgagcccatagcacagattgaaactgataaggttactatagatgttgctagtccggaagctggtgttattgaaaagttcattgctagcgaaggtgatactgttactccaggcaccaaagttgctatcatatcaaagtctgcggcaccagctgaaacacatgttgctccgtctgaggattcaaccccaaaagaaacgcctccaaaagctgaggagacaaaaccaaaattagaagagaagtcaccaaaagcagaacctcccaagatgcctctgccacccaaaacctcccctacagaaccacagctccctccaaaagaacgagaacggagggtgccaatgccaaggctcaggaagcgtattgcaaaccgtttgaaggattcacaaaacacatttgcaatgctgaccacatttaatgaagttgacatgactaatttgatgaagctgcggtctgattataaggatgagtttgtcaccaagcacggtgtcaaattgggtctgatgtcctgctttgtcaaggctgctgttacagcacttcaaaaccaaccaattgtcaatgctgtcattgatggtgatgacatcatatacagagactatgttgacatcagtgttgctgttggtacttccaagggtcttgtggtgcctgttatccgagatgctgataacatgaactttgcggacattgagaaagggataaacgcccttgcaaagaaggctactgagggggcactctcaattgatgagatggcaggaggaacattcaccatctctaacggtggtgtttacggaagccttatcagcacacctatcatcaaccccccacagtctgctattcttggaatgtactccattgtacaacgccctgtggtcgtggacggcaacattctcgcgaggccaatgatgtaccttgcgctgacatatgaccacaggctgatcgacggcagagaagctgtctacttcctgcgccgcatcaaggacgtggttgaagacccacggagattgctcctcgacatataaactccgcgcgcgccaccaatcgcagcctgagagctgctttgtgctttgtctggaaaataatactgcaaatttttgactgatacaaagagttgcttttctgagaaagacgaaatttgagttgaggataccgtgaggggttctctgacaattatagacgagagcaccaaatccgaatcttaaatcttatatatcagcgcttattccattttgggatgtagttccctaaacaatttgcttttagtttcaatgcaagagcaatagatcatgcattttttgttt

SEQ ID NO: 17729 - DNA, 1971 bp, Oryza sativa
  ref <308>: DATABASE ACCESSION NUMBER: AK068155
  ref <309>: DATABASE ENTRY DATE: 2001-12-06
ggcggcctccacctcctcccccgcgcgcttacttggatcggcgagatggggtggaagggcatcctggggttcgaccacggcgttgtgcaggcgccgctcgggcccgacatctccggcccggagctcgccgccgccgtcgccaacgccggcggcatcggcctcctccgcctccccgactggccggcgccggatcgcgtgagggatctgatacggaggacgaggagcctgacggagaggccgttcggggcggccattgtgctggccttcccgcacgaggagaacctacgggtggtgctggaggagaagctcgccgtgctgcaggtttactggggagagttcccgagggagcgagtcgatgaggcgcacctcgccggtgttaaggtgttgcatcaggttggtagctttgaggaggcagcgaaagctaaggaagctggtgtagatgggatcattgttcaaggctgtgaagcaggggggcatgtgattggtcaggaaggactgttacctttgctgcccagagtggtggatctagtttcagatactgacatttcaattatcgccgctggtggaattgtagatggccgtggctatgctgctgcattggcacttggtgctcagggcgtttgcttaggaactaggttcttgaccactgaagaaagttttgcacatcccttgtataagaaaaggctaatcgagattaattgcacgggctataccaatgtgtttgggcgtgctagatggcctggtgctccccaacgtgtcctgaaaacaaccttctatgatcagtggaagaatctcccagaacaagaaacagaggaaaatcaacctatcataggccacactatcatccatggtgtgggatattcgtcggttcgctggtactgttcctaatgcgacaacaacaggtgatattgatagcatggtcatgtatgctggtcagggtgttgggctaatcacagagatcataccagctagtgaagttgtcaaaaggttagtttctgaagcacagcacgtcatcagagaaaagcttttgtgaatttcctgtactgtccaaggagcagtaaatactatctggtttttgtaagcaaggaccaatgaaaataaaagagtccaccaagctgtccatttccccaaacaagtccacggtgttgttacatagtatatctgcagaattacacagtattgattgcttctacatctgtttgtaagtaacaactattgaaatatagattttgcaaatgtattctcttctttcggcttcaatgttgtactaggagtacaaagtatgtccccaaaattgtactagttgtgttgctttattaccaggacaagctgcccaaacactatgagtaactgagtttattacttctacatgcatgctgtggactaatggtctgtgttagactggtagtctggtattttgaatcgagttggacttggttggggtcttgcagctggagcatatggcatgtttttttctgcccagaaactattgatgcactggtcggacctttcaccaacctaataactagagagggcttgcttcagttcttggaccacgctcacctcattgcccatccctttgggcttctgtctatagataatgcttcggaggtaaagcagataaaagaacagtggtgctacaatttctgggaccagcctctgtgggctgagttggacactgacatggatttttgtcctggcaatggttggaatatgtgctcgatttatagctctggaactgaatgtccacatgaagcagtgtgttgaatactgtaagatctttgatcgagctttctgattctattctatacttccctcttatgttaatgtgggagctttctgattttgttctaatacttgcctcttatgttagtgtgaggatatgtaaatgtgacaccttttatgcttattgcagcttcacaaaggtgtatcccatgccttccattgattaccttcattggtaacacatcc

SEQ ID NO: 17730 - DNA, 884 bp, Oryza sativa
  ref <308>: DATABASE ACCESSION NUMBER: AK068156
  ref <309>: DATABASE ENTRY DATE: 2001-12-06
ggtcatgcagatgcagaggtagaggcagatgcagatgcaggcggcgcggccccgcgttggtgtccgtcctcgcggtggcattcggccgtttccactgcccaccttgagcttcaacaacaactccaacaggagtgcgtgtgcgtgtgcgtgtgcggtgtcggtgtcggactctgagcttgcggcgcgcgggttcgcggtgcggcgcagctcgacggggctggacgtgggggcgctgaacgaggtgttcgcgcgggtggggttcccgcggcggcaggaggagcggctgcggcgagcgctggagcacagcgaggtggtgtggctggaggactcggcgtcgtcgtcggcggggcggccggtggcgttcgcgcgcgcggcgggggacggcgtgttcaacgcggtggtctgggacgtggtggtggagccgtcgtgccagggcctcggcctcggccgcgccgtcatggagcgcctcgtcgccgacctgcgaggcaagggcgtctccaacatcgcgctctacgccgagccccgcgtcgtgggattctaccgcctcctcggcttcgccatggaccccgacgccatcaggggcatggccttctaccgctcaaggcaacaaatacaaaacacctcctcctagctccttttctatcttcttcttctccgatcaatatatccaaaacacatattggattgcatattaatttgcatgtgtatgtatgtatattcaagctgattattattgtctagacacacacacacacatgcagagtgaaatcaactcatcaaatacatatgtagttgcagctgattgcaaccagtaatccattccattcatcacacttgctaattacacttcattcttgttttacctctctctctctctctctctt

SEQ ID NO: 17731 - DNA, 1710 bp, Oryza sativa
  ref <308>: DATABASE ACCESSION NUMBER: AK068157
  ref <309>: DATABASE ENTRY DATE: 2001-12-06
gagcaactcatcagcacactcactctgcaacaagcatgcagacgccaaccatgtcgacgtccatggccacgccggcgaagctcccctcaccgccgtcgctgccgatagcgaggcaatgctgctgccacctgctgcagctagggcggcgcggcggcgcgggcgtggcgcgggcgtcggcgaagaagaagaacccgtggctggacccgttcgacgacgggcccgacgacgagttcgactaccgcggcgcgttctcgggggggaagcaggaggaggacccgcggccgccggaggacccggcgaacccgtacgggttcctgcggttcccggcggggtacaacccggagctggatagcctggcatccaaggtgcggcgcgacgtgcggcgggcgtgctgcgtggtgtccggcggggtgtacgagaacgtgctcttcttcccggtggtgcagctgctgcgggacaggtaccccggggtggtggtggacgtggtggcgtcggcgagggggaagcaggtgtacgagatgtgcaagaacgtcaggtacgccgacgtctacgaccccgacgacgactggcccgagcccgccgagtacacccaccagctcggcgtgctcaagaacaggtactatgatctgatcatatcgaccaagttggccgggatagggcacgcgctcttcctcttcatgtcgtcggcccgcgacaaggtcggctatgtttaccccaacgtcaacagcgccggcgccgggctgttcctcaccgagatgttccggccgccgaccaccaacctcgccgacagcggctacaacatgtatcaggacatgttggagtggattgggcggccagcgaagggtgtgccggagcacccggtaccgccgttgcgggtgtccatctccaagaagctccgagcgttcgtggaggacaaatatagccgtgccggcgtcgagaagggcaagttcgtcgtcgtccacggcatcgcctccgactccttcgccaacatgaggtcgaggggggacgatgactgcctcctccctctcgagcattgggctgagatcgccaaggagatcagctctgaagacaatggtctgaagcctctgtttgtgatccctcatcagaagcacagggaagaggttgaggagactgtggggaaggacaccaatatcctgttcatcaccactcctggccaactcacctgcctcatcaacgactccgtcggcgtcgtcgcgaccaacaccgccgccgtccagctcgccaacgccagggacaggccatgcgtggctctcttctcatccaaggagaaggcgaggctgttcctgccgtacttggaggagaggaagggctgcaccgtcgtcgcgtcggagaccgggaagctgatcgacatcgacgtcgaggccgtcaagaaggcggtgaaggagttcaaggccgccccaagcgttgcattggctcaaacatgatgaagaccatcatcttcttgttgcactgtacatagatctgcacggttacagtgagctcgcctgagcaagtgagcagcaaaagctccttgcctggctctgattcaatgtgtcttgtagtcgttcagttcagctacaaatgttccacatacaaccgcatgaaatgcccaaactcaccttgtctactgctcaccgagcagacaagcgatgcagcctgtgttactctgtttatagaatggaaatggcatacaccttgcacgtttttatg

SEQ ID NO: 17732 - DNA, 1375 bp, Oryza sativa
  ref <308>: DATABASE ACCESSION NUMBER: AK068158
  ref <309>: DATABASE ENTRY DATE: 2001-12-06
gagggggcgcactatgtgctggagctggacgtgtacgcctcactgcccgctactgctgctgctgctgcatctgctcttgctcttgctaccaattaaacgtcaccctcacccctcctcctcatgctgcagcctgcagaatttatgtatcggttagtcgtgaggcaacgtcagcaacctccaggaggtgaaggttgatcaagaattatatcaagaataaggactatcctgagcaaggagagtgttgaagagaagcccttgtcggtacgcttgcgtatcccacaagatgatcggagtgcggtcttgttctaggtctcgttccccagtcgactgcctgtggcatgttaaccgggcccttatattattttgtcttccgctgttgttctctgatagttgttggcctacctggccctaatatccagggattggtacgaataaacacagaagatttccgatttccaaaatcgggggtctacacccatcggccagcttctcctcctcggagctcctcttcacagtggcccgtctttgtcgctcatggcgacgatgccatcaacacgtcatggatgggtgatgcttcctgtcggtgatggcggctgtggcagtgactagcgagcggtgcaccagggaagagggccactgactgccaaggtggatatataggagcccggcgcgatgcggagctgggacggcggcaggctccatgcgaacctggtggcgcgacgttgacatgctcaacagcacctaggcggtggcgaggtcattggcacggaagtgcatcatgtcctcactgagcaccctcagcgtcacctcctgtggacggtgccagtttggtcgcatcctcttcctcttcctgcccatggcatgccggcaaggacggcaacaacattgtctcgttgatagctacctggatctggaggacaaggcagtggtggtgatgagcggagtaggcgcgccgaacatcgttgaatccggccgctgcgctggccaccccaggctccactccgacgagatagcttcgtgttggccaacgcatcgtcgaggctgaggacggtgacgaggaatggaaggagctcaaaggaggtgagggagaagataggcacgtcaaagagagaagaggggaggatacaggaaaatgatgaaacatacatgtgggcctcatcagtcatgttagggttattttggtctatatgaagatgaaaaacgtgacggcgatggcattgatccaactttataaagttccagtagcacccagtcgatatcgcgaataatagtggtatttttctaatatggtaaaattacaatgacatggatccaattgatcctattaaaccttgtcataaacattactagtaaattatatctataaacacaaagc

SEQ ID NO: 17733 - DNA, 2395 bp, Oryza sativa
  ref <308>: DATABASE ACCESSION NUMBER: AK068159
  ref <309>: DATABASE ENTRY DATE: 2001-12-06
gggttacttgtgtcccagtgagtgacaatctaatcctgaccagatacagcggttaattaacaggttaagcgcagggtatcgacgcgatggacactaggcatggccgagacaggaatggcgcgccggcgaccaggagcgccatgcttctcctggccgccgccgtgttcgttgggtggctcatgatgtgggtcatgttgccgaccaggacattcagctcgacgtgggcgccgacgctcgcctcccacacaaattccacctactttggcaaacaagggacgagaatcgtgatctacgtgttcccaatacctgtgcatgtctgaatcgtgaactacactgactttgccaatactgtttgtcagtgtagttgcgtgcatttacctgcacttgctgaagaggagcggcgacagtactggggtccaaagtcagagaggagtattctgtacgagaatggcggcctggaggagacctgtgctggtgagaggtccactgggaattgtgacaggcatagaactcgccttctttctcttgttcctggcactcctggtctggtcctactccgccttcatcaacctcgacttctccaagatccatgtcaagcctgtcgagaaaatgtcgaccaactcacgataaccatgcattaactccgtccaaaaaaaaaagcaaaataatactcgtatatgtttcatctatgatctgtaatttacttgtgtgctaacttttgtaagtatgcgaaatgttcttaggtggcaggcgaagctggacagagcagcgctgcggcttggccacgttgggagcttctgctgcgcgttcctgttctttccagtcgcacgcggctcgtccctgttgccgctcattggcctcacgtcggaagccagcatcaagtaccatgtctggctgggcaatctcgttatgctcttcttcacagctcatggactctgctacatcgtcttctgggcatcgactgatcaaatccacgagatgctgaaatggacaagaacgaaagttgcaaacgtccccggggagctcgcgctgctcagcgggctggtgatgtgggtgacggcgctgccgcgcgtccggcgccagatgttcgagctcttcttctacgcgcaccacctctacgccctcttcctcgtgctcttcgcgctccacgtcggcgtcgccttcttctgctccatcctgcctggcgtgttcctcttcatggtcgaccgctacctccggttcctgcagtcccgcgtccgcgtccgactcgtctccgcccgcctcctagcgtgcgacgccgtcgagctcaacttctgcaaaagcccccatttgacgcacagtccgatgagtacggtgttcatcaacgtcccatgcgtttcgcggctccaatggcacccattcacggtgacgtcgagcagcagccttgagcctgacaggttaagcgtcgtcgtcaagagagcaggaagatggacggagaagctgtacgagacgatctcgtccctgccgccgtcgcagcccgggcacctcgacgtctcggtcgaggggccttacagccaggccacaccagcaagcttccttcagtacgactcgttggtgatgatcagtggcggcggcggcatcacgccgttcatctccgtcatacgcgagctcgttcaccggagcggcacggcggcagaagccgcgacgccgagccttctcctcatcgccgtgttcaagacgtcggctgacctggccatgctggacctcatcgtccctgcctccggtgggttctccgacatctcccgcctcgaactgcgcatcgaggccttcgtgacgcgagaaagcgtgccctccgcgggcgatgtcgtcgcaatcgcgcacaaggtgcccgcagaggaggtcttgttcaagccgtcgccgtcgcacgcgcccatcgccccggtgctcggccacaacggctggctctggctcgccgccgtcgtctcctcctcattcttcatcttcctcttgctcgtcggcgcggtgcagcgcctgtacatataccccgtcgacggcaacagcaaccgcgtgtacccgtgggcggcaaggacgttgctaaacctgctgctcctctgcgtcggcatcgccgtggcggcgagcgcggccgtcctgtggaacaagcggaggagggccgaggaggcgaagcaggtcgagaacgtggcgacgccagcgtcgtcgccggcaacgtggctcgacaagccgcgtcgtggggacgcagaggtaggccgtcgtcccgatctcagaagtacgatgcaccgttcaatcttgttctccttttgggtcgaattggttctgttacctttgaagagtgcgtgaaatgcgaaatttgtctgtgcaacgatgttgcttgtcgaaacaagatttcggcaataataaaagaggtggctatcaagcttgg

SEQ ID NO: 17734 - DNA, 996 bp, Oryza sativa
  ref <308>: DATABASE ACCESSION NUMBER: AK068160
  ref <309>: DATABASE ENTRY DATE: 2001-12-06
gagcaagcactcccagagccaaagccccctccacatcccaagttcctaacctgacctccaccatgagagattaacatcccaaccagctgctgctcgcaacgtacgtagcatcttgcccgcccctcgtcgaagtccgacccgcagctagctcagccggcggccggcgagcacaacgtacgtggtggggtcgcactcgcgcaccaccggcggagctagctagctagcgttgcccctgtctctgccaccgctcgtcgccgcggccggcctgcctgtagatcgtacgccgacttcgacgacgtacggccacctcctcccccaacgaattagccatacggaaggacaagctgttctatgcagttttttaattaaggggtaaagtccatcttactctccaaatatggcaaaggcaaagaaaaagaagaagaaaaaaaaccccaaagcttacttttgaataattggattggacagtcataggaaagaaaaaataaatgaatggctagccgcccccgtcgcactgctcgtgcaccaaaccgtttcggttttgaggaagttagagttgagccagaggcagatcatgaggaagactccatcattaacatgttggtagctgatttggaagcccatgagcaaggtagagctgcaagacgggccccacaacaggcagggatgcagtgaatgatggagacaatggccaatgcagctcagtgccataatgtgtttcgcatgaggccagacaaaattcatgcattgtttgggatattagctatgtgcaacataggcctttagatttatcacatgacatataacatattagtagtgccagttgctctgatttcaagtgatcatatatatgactctacatgcattaagatatgagatttacagcactgctgtctgtacagatgcttaagttagttctgaccatatgtagatatgtcaaactatgcagctgtacattacttaatcatctacatgcagcatagtttccattttatt

SEQ ID NO: 17735 - DNA, 1374 bp, Oryza sativa
  ref <308>: DATABASE ACCESSION NUMBER: AK068161
  ref <309>: DATABASE ENTRY DATE: 2001-12-06
ggtgtcagatatccacacgtgccccgtacgccgccatcgccatggctctccccctcgtccgcctccccccgctccccgccgcgcgccacccaccgctgctccgcctccccaagcactccgttccgcctcacggcggccgcgtctccttcgcctgttcgtccggtagccgcgccgccttcgctgcctgctgtgctagcgcctcggtggccccggcggcggaggcggaggcggtggtggaagagcccgaggggccgaggacgcggctcatcgcgcagaacatcccctgggactgcacggcggacgacatgcgcgcgctcttcgggaagcacggctctgtcgtcgatgtcgagctctcgatgtacaattcgaccagaaacagaggattggcgtttgtaaccatgggttcagaagaggaggctctttcagcactcaaccatctaaattcgactactctaaatgatagaacaattaaggtagactttactagatcgagaaagaagcagtatgttgtgccatcagctcccatgccgaagcacagcgtttttgtgggtaatctgacgtggagagtgagatctcgccatcttcgtgaattatttgcatcaaccccaggtgttcaatcagttgaagttgtcttccataccacaagtccgaggcgatctgctggttatggatttgtttccttttcctcaaaagaggcagcagaggctgccatatctaccttcaatggcacgaaattgatgggaagatccattaacgtgatgttcaaagatgacaatgccaaaaagaataaatctgctgcaccaacggaagaggatctgaaggcagaatcatctgagcagattgttagctaagcatcaattgtcatgggaacacaccgagaacttaaatgattgaggattgcttaactgacattttcccagtctcccagctgctggtcagttttgctcattcaacgcctcgtgagttctatattacagcgttgtttatgctgtccacttgatatggatgacatatgacatttggaggtcagctttatgccatgagcacaaaatatatgtaagcttttcttgacacccaggttaattaattgtagatagagataagtctcaaggatctcagccgtaacccgatggatttagcgataatttgtttattgtgaaatatttggctgaaatgtataaatcaccgggataactttaaaggctaaaagctactactggtattgttttcagtctgtacttgtcttcgtttttatgtgaccggaagattgtagaggccgggtttaatctaatccattatctaaaataaatgtgaccggaagaactgtgacaactgtcaaattaatatatagccttcacatcagttccaaattgc

SEQ ID NO: 17736 - DNA, 1681 bp, Oryza sativa
  ref <308>: DATABASE ACCESSION NUMBER: AK099042
  ref <309>: DATABASE ENTRY DATE: 2002-08-28
ggggagaagcaaaccctcgcgccgccgccgctctctcccacccgccgccgccgccgccatggacgccggcgagacctccacctcggactcgctggtacttgccacgggcgccgcgcagggaccaaagaggaagccgcccccgaagcgcttcgtccacacgcccatcccgccctccatcctctccgacccaaccctcgccgctgccgccaccggcctcctcccggcggcgtacaacttcgagctccccaagacggcgcaccgcatccgctcctccggcgcccgccgcaccgcgctgcagcttccggagggtttgctcctcttctccctcccgctttcccacctcctcgcgcccttcctcgagccggacccctccaacgacgtcctcatcctcgccgatcccacctacggcgcgtgctgcctcgccgaccgccccgccaaggcgctcgccgccgacgtgctcgtccactacggccattcctgcctcgtccccgtcacctcctccctcctccccgtgctctacgtcttcgtcgagatccgtgtcgacgcccaacgcctcgccgacgctgtccgcgccgccttcccggaccccgccgatgcgccccgcctcgccatcgccggcaccgtgcagttcatttcggcagttcacgcagcgcgtgagatcctcagtcacgatggttaccagggcatcgtcgtgccacaggcaaagccgctgtccgccggcgaggttcttgggtgcacagcacctgccctgaaaaggtccgagggggtcggagcggtggtgttcgtcgcagacgggagattccacctcgaggcattcatgattgccaatcccggggtcaaggcctaccgctttgatccattcctgggtgtgcttgtgctggaggagtatgaccatgtcgggatgaagcaagcgaggaaggaggcggtgctggcagcaaggaaggccaagagttggggagttatactaggcacccttgggcggcagggaagcgtaaaagttctcgacagggtggtggagcatttggaggagaaagggctggaacacacagtagtgctcatgtcggagctgtccccggcaaggatggagctgtttggggattcggtggatgcgtgggtgcagattgcatgcccacgtttgtcgattgactggggtgaaggattcaagaagccaatgctgacgacattcgagtttgatgttgcactgggctatgttcctggatggtgggagaaggggagtagggaatgtggcagtggagatgccaccggttgttgttcaggatcaggaacttccacagattgtggttgcagcaatggtggttgtgctgacaaggactttgggggggagtacccaatggattactactctcaggatggaggtgattggaacagctgctacatgaagaagaagccctctactggagagagaaagctgcgagttcggattggcagcaaagttcaagttgaggataagcaacaaagctaatatcgttgaaacgagatatcaagagcagcttcatgtttcttcagaagttttgacaccagagttgaatagtatttttgatcttagcactgccgttacgagtgctgtgatatctgtatctgtacacagatgtaaactactcgatcctgcgccacactgtaatgctgtgatgttgtcttcccataaaggtgaaatgattct

SEQ ID NO: 17737 - DNA, 2475 bp, Oryza sativa
  ref <308>: DATABASE ACCESSION NUMBER: AK068162
  ref <309>: DATABASE ENTRY DATE: 2001-12-06
gagtgcccgagtgccgccgggctcgccgcggggcggcacgctcgaaacaggtggcggcggagatggagatgggcctcgaactccaaccagctgcagcgccgtagtctcctccactcgcgagaaggcagagggggaggggaatcggcggagaccatcgcagagttattctcctccctcctcttggaaggctgtgaaatcctccctggcgctgctaagcctccgagctccctccgagcttccgagccatctcaagatctcagtcagttgattactagctttcctttatgaccttgctgctagcttgtaaaagatgagctcaaaatgtggagctccaaaagttagaaaaccaacaatcaattaccaccgtcttccattagatggtcatcagtttgatctggatgcatttcttactaaggatcgtaatgccaataaccaatcgaagccaagtactcagtcaggaagcaaatctatagatagaagattaaccactccacagttagtatcagcattgactgggatctggaatcttgtcggccagccagaatcttccggcacagctcaaatatccgagagccatgaaattctgcataaagatgaacctgtgtgcttcagcaaagagcaaaaggaacatgcattgatgtcttgctgtgctgaaaactcaactggtctgagctctcaaaactttttatcaacgccaaaatcaatctttgaagatcttagtttggtgaagaaaatgttaatgctcacatcatgtagcagcatggctggtggctcttctacatggagacatgtgcatgttgggagtgcctattatttaaagtatcagaatatatatcccatgcaaaccagaatgatgcacacctatgctgtttctggcagtacggaatttaagaaggatcaaagctttagaagggacgataaccattccagccaaacaagaaacatgccaactgagctatgtactagctccagtgaggaggctcacatttacgaaagttctctgcatggtactaaatccaatctagagattattccagaatattgtagttcttcatcttgttcgtctcagcaaatggtgacttgtgaagagacaaggataatgccagcagaccaaatttcgagtaacacatgcacacttactgagaactcagtgtgcatatcttgtccggtgggtgatgttgtggttattaattcagaacacacagatcaaaatgttgatggtcttatgtctcaggagcactctgtagacaagtattcaccacagctggaatcatctgttcaacatcgattttatggtgctgttaatctgaacaggcatgctgtggcaggagcattagctggcacagtagtcagtgtttctctgcatccaattgatacagtgaagaccattattcaggttaacagttctcgacgaagttcattctaccacacgttaaggcgcgcccttgttgagagaggagttttaggactttatggagggcttgctagcaaaattgcttgttctgcaccaatttcagcaatctataccttaacttatgaaatagtcaaggggtctcttctgcctattttgccaaaggagtatcattcaattgctcattgcactgctggtggttgttctagcattgcaacttccttcgtttttacacccagtgaatgcataaaacagcagatgcaagtgggttcacagtatcagaattgctgggatgctttattaggatgtcttcgaaagggtggcattacttcactatatgctggatggggtgctgttctttgcagaaatatcccacattccgtaattaagttttacacctacgagagcctgaagcagttcatgttgaaatcagctcctgctaatgccaatcttgattctgggcagacacttttctgtggaggttttgctgggtctactgctgctctgtgtacaactccatttgatgttgttaagacgcgagtacagttacaggcactcagccctattagcaagtatgatggggttcttcatgcgctcaaagaaatttttcagcacgaaggcttgcagggtctttacaggggtttggctccaaggttggctatgtatatatctcaaggggctatatttttcacatcctatgagttcctcaaaacaattatgttttctgaacaagagcttcatgcaaggaacttttgatcacagaatgatgcagcgtggttcaggaacacttaaagcatctgagtttcaagaacaatctcatgaactaagtgggatggttctattaggctagaggattgtagacttgtggttactgaaccaaacatttcttaggtcttgatagtaaacatttgtacaagtgtacattacatttttggatacataggcaaccaaactggtgagcagccatttttgagtagaaatcacatctaggaaagcaaaattttgtatcatcaacacggtttgtaaattcccttacaagcaacctgtgactggatgtgcatcct

SEQ ID NO: 17738 - DNA, 4217 bp, Oryza sativa
  ref <308>: DATABASE ACCESSION NUMBER: AK068163
  ref <309>: DATABASE ENTRY DATE: 2001-12-06
ggcgccactccactcacttcatcactccactccaccactgaggagttctcgcgatgagctcagcgacgtcagtgagtgcctttgccatggcggctacctcctctgcggccgccgctgctccacctccgtgccgcttactcggctccggtcaggcacacctgcgccttcctccttctgctgctgctgctgctgcttcagctcgtcgccgcctgctcctccgctgcgccgcctcgggcggcaacgggaaaggcggtggtggcgacggctccggctccgacccggttcttgaggagcggcggcggcggcgccaggctgagctggcggcgcgcattgcgtccggcgagttcaccgcccaaggccccgcgtggattgctcccctcgcggtggggcttgccaagctcggcccaccgggggagctcgccgccgcgctgctcaccaaggtcgccggtggcggcggaccggagataccgcaggcggtggggtctatgagtgcggtgacagggcaggctttcttcatcccgctctatgatctcttccttacctatggcggcatctttcgcctcaatttcggccctaagtctttcctcattgtctctgatccagctatagctaagcacatcctgagggacaactccaaggcttattccaagggtattctggcagaaattttagagtttgtgatgggtacgggtttgatccctgctgatggggagatttggcgtgttaggaggcgcgccattgtaccagcaatgcaccagaagtacgttaccgcaatgataagtctcttcggatatgcttcagatcggctctgccagaagttggacaaggcagcaacggatggggaggatgtggagatggaatctttgttctctcgactaacactggatgtcattgggaaggcagtcttcaattatgatttcgactcattgtcttacgataatggaatagttgaggcagtgtatgtgacactgcgagaagcagaaatgcggagcacttctcctataccaacttgggaaatacccatatggaaagatatttccccgcggcagaagaaggtcaatgaagctcttgcgctgataaataagactcttgatgaactaattgacatctgcaagagattggtcgaggaagaagatctgcagtttcatgaagaatacatgaatgagcaagaccccattaccctccactttcttttggcatctggagatgatgtctccagcaagcaactccgtgatgatctgatgacaatgctcattgctggccatgagacctctgcagcagtcttgacatggacattttatcttctatctaagtatccaaatgtaatggccaaactccaagatgaggctgatactgttctaggtgaccgtttaccaacaattgaggatgtgaagaaattgaagtatactactagagtaattaacgaatcattgagactctatccacagccaccagttttaattcgtcgctctattgaggaggatatgctgggagggtacccaattggccggggagaagacattttcatatccgtgtggaacctacatcattgcccaaagcattgggatggtgcagatgtttttaatccagaaagatggcctttggatggaccaaatccaaatgaaacaaaccaaaatttcagttacttgccatttggtggcggaccaaggaaatgtgtaggtgacatgtttgccactttcgagactgtggtggcaactgcaatgcttgtcaggcgctttgattttcaaatggctccaggagctcctccggttgagatgacaactggagcaacgattcacacaactgaggggttgaaaatgactgttactcggaggacaaagccacctgtaatcccaaacctagagatgaaagtcatttctgattcaccagaaaacatgagtactactacatcaatgcccgtttctgctgctagtattgcttcaggagaagatcaacaagggcaagtctcagcaactcgaatctgagttatgacagcctcagcattgccacgacatacagattgagcatacaacactggaggtctcatagtgtgcttattgtacaaagaaaagctctccggttattttctcaggcttatcttggtgattcgcgctacaacactcttacagattagagatgcctgctattcaaaaacaccatggcatatatttacatatatacaacaaggccgaagcatatggaccactgcacgtctaaacctccagcagggcttccaactcgcgaagaacgtcagcacgggtaactatacctgttaatagtgtttggaactccatttagcatgcaacatactctgaattatcaatgttaaggatggtataaaatcaaggggaaaaaatgaaagccctttttttttctgtattggccactgctcaaaactcacctatcacttgtctgtcctgatttacaattggtaatctgtggatcttcttctttagcatcagagctgccgcatctgtagacattgcatatgccttgttagcttaactggtagctaagtggaaaataaccaaaaaaaataagggcgaaaacaacgatggattacccattactgttttgtcagatggtagagtgatggctggagaggtcatcacttctgcaatcttcgtctttgactgttacaagaagcaatagatcagcacttatttttgttgttgagtatgtgcgtgagtgagagggatatgtatcatgtatgtgtgtgtgagaggagaaagagagctgaccccatgagaagccctggcccggtcactcttgacgatcactccaacacatctgaggctggcatctataactgggagacctgagaccgtctcaaagtggcactcaacctcctccagcgtctgctcggcagtggctaccagcacaggcgccgacatggcttcactcaggagcgccacacgctggtcaattcaccaaccatgcaaccagttcagagtttagcaagatcttaagaagaagatcgacagttggtgatctgaagaagaagaatctatgtatatatggtgtgatcagtgcacctggttgtcggcttgagcagcggcctcctgtgactggaggtaggcgcggagatcgtcgtagctgagcagggagaagttctccggccactcaccggagatgatggcttcagggttctcgtcgatctctagccggaggctcccgtccatgaacgtcgatgcccggcaccggaagatcgtagccggaggccttcatttatagtgaactggatacttgcgtctattgtcagggagctgaggtggataggaatgcatgggaggtgctggcccaccaatgactgctactgctcagatcctattggtggactttgacctcatccatgctcagatcttttttaatactccattagtgcttgttagtatctcatcatcatttgtttctgctatcagagattcagaggtggcatttatcatagtccatgcatatggcaaaacttatggatctgcaaattgcaagctgaagatgactattttgcatattctgaggtttggctgaaacttagtaattagattgagattagtgtattcaggatagtgatttgagagcagcagaatggtgcatgggtggttttaaccaaggtgtcactgacaaggcctgaaacaggatatggttatatggatatgtactactactaccaagtacgatgggttgcattcatcagtgaagaagtcagggacagagcgggcgacgtggcgcgcggcgattggctggcgggattctcttgggcccaggtcacgtggcagtggataagccggatcatcctgacctttggtttggtactgagtaccgaccggccggccggtgagccgactcgccgtgcccgtggtttctttcgccgctggaaaacagatagctcgccgtgttaggtgggcgatcgatcttggatgcttcgatgctgtgtatgcatctgccaagttgcttgctgaacttgcagtcgagcttggccgtttgctgtagattcagtgctagatgcatcaagtgaaagctactactcctacaatggaacgggagaaaagaactgcatcataaggggaatatgatttgtgttagttgacttctaatttcttgagagatattttccgatttatattaattaactgtagcgtaaactcaaagttgcttgtgcatgggtccctgaacttccaagttcttaggataattctcagggtagaccccatcttgtc

SEQ ID NO: 17739 - DNA, 1005 bp, Oryza sativa
  ref <308>: DATABASE ACCESSION NUMBER: AK068164
  ref <309>: DATABASE ENTRY DATE: 2001-12-06
gactcccccccgtccggcgcgcggctcctccgtcgacccgccgtaagtaaaccttccgatggccgccgccgccgccgccgccgcctccgccaccgccgccatctccggtgcgttactcccccacgccgtcgcatgccaccgcttgccgccgcggccgcagctcctcgcggtgtcctcctcattccgccgcctctccctgaccgcctcccctcgccgggccagccgcctggtccctcgcgcggacgccagcgcagaagcgggagaaccggagcccgccgctgaggctgaggctgaggctgttgctgcctcgactgacgctgaggtggaggagggtgaggcggaggcggctgtcgcggtggcggaggaagagcaggaggaagaagatgagcctccgccgccgagcaagcccccggttaagttcggggagatcattgggattctgaacaaacagttcattgaggaggctgaaaaggtgaagactttaccagatcttaggcctggtgacatcattgagcttagaatgcaacggcccaacaagaggagattgtcgctctttaagggcataattatagcaaaacacaaatctggtgttcacaccacaatccgtgtcagaaggattattgctggtgtcggagttgagattaccttccctatatattcacccaggatcaaggaaattaaagtaatcaggcacaagaaagtgagaagagcaaagttatattatttgaagcacaagcttccccgcttttcaactttcaagtaaaaattagatatgctggcagaagagcttctctcactagcattgttactttctctagcaaatgcttttttatttttttgttcaaacctatgcttttcactgtaatcactaaatttcaaatgtgtaatatctacaccttttctgtttggcatatatttttgtctttctgtggaaatgtactttcttcgctttgtataaagttcctactagcattttgttatgaatttgttgacatccttctctcg

SEQ ID NO: 17740 - DNA, 2985 bp, Oryza sativa
  ref <308>: DATABASE ACCESSION NUMBER: AK068165
  ref <309>: DATABASE ENTRY DATE: 2001-12-06
gaggctcggccgaccagttccgcgggcaggcgaggctgccgcggttcgcggcgccgcggcggtacgagctccgcctccggcccgacctcgacgcatgcgtcttcaccggcgacgcgtccgtggtcgtcgacgtctccgcgcccacccgcttcctcgtcctcaacgccgccgacctcgccgtcgaccgcgcctccatccgcttccaggggttggcgccgacggaggtgtcgctgttcgaggacgacgagatcctggtgctggagttcgacggggagctgccgctcggcgagggcgtgctcgccatggacttcaacggcacgctcaacgatcagatgaggggattttaccgaagtaaatatgagtataaaggggagacaaaaaacatggcggtgacacagtttgaggctgtggatgctcgacggtgcttcccctgctgggatgagcctgcattcaaggcaaagttcaagttaacacttgaagttccatctgagctagtagcattgtccaacatgccagtagcttgtgagacaattgctggtcctatcaagaccatccactacgaagaatcgccgcttatgtcaacttatttggtggccatagttgttggtttgtttgattatgtagaaggtgtaacatcggaaggcaacaaagtccgtgtgtacactcaagttggtaagagtagtcaagggaagtttgcactagatattggagtgaagtcattgaatttctacaaagactactttgatactccatatccactccctaagttggacatggttgctattcctgatttcgctgctggggccatggagaactatggattggtcacttaccgggaagtttctttgctttttgatgagcagtcttcatcagcatctttcaaacaggatgttgcaattaccgtggcacatgaactggctcatcaatggtttggtaatcttgtaaccatggaatggtggactcacttgtggctaaacgagggttttgctacatggatgagccatttgtcagtagattcttttttccctcaatggaatatctggacacagtttcttgatagtacaacctctgctctcaaattggattcacaagctgagtcccatcctattgaggttgaaatacaccatgccagtgaggtagatgagattttcgatgccattagctatgacaagggtgcttctgttattcgtatgctacaaagttacctaggtgcagagcgttttcagaaagcattaacttcatatataaaaaagtatgcctactcaaatgctaaaaccgaggacttgtgggctgttcttgaagaggtatctggtgaacctgtcaaggatttgatgactacgtggacgaagcaacaaggttatcctgttatcagcgtgaagcttaaagggcacgacttggaacttgaacaggaccaatttttgttaaatggaacctctggtgctggcatctggattgtccctataactttaggatgctgttcacatgataaacagaaaagattattgttgaaacataaacatgataacataaaggccattgtttcgcaatgtgatagccgacagaagggtggaaacttttggattaagttgaacattgatgaaacaggattttatagggttaaatatgatgatgagcttacagctgcacttcgaaatgcattgcaggccaagaagctctctctaatggacgaaattggcattgtggacgatgcacatgccctttctattgcctgcaagcaaacattgtcatcgttgctccacttgctgtatgcgttccgtgacgaggctgattacagtgttctttcacacataaattctgtaacttcaagtgttgcgaaaatatcaattgatgctactcctgacctggctggtgacatcaagcaactttttatcaagcttcttctcccgcctgctaaaaaattaggttgggaccctaaagatggtgaaagccacctgaatgcaatgctcagaccaatgcttttggttgcccttgttcagcttgggcatgataagactataaatgagggattcaggcgtttccaaatcttctttgatgatcgcaacacttcccttcttactccagatactagaaaggctgcatacctctctgtgatgcataatgttagtagcacaaacagatctggttatgatgctcttctaaaggtctacaggaaatcagctgaaggggaggaaaagttacgtgtcttaggcacactttcttcttgccaggataaggatattgttcttgaatcattgaatttaattttcacagatgaggttcgcaatcaagatgcatatcgtgtgcttggaggtgtcataatagaggcacgtgaaactgcatggtcctggttgaaggaaaactgggatcgtatctcggaggcattttcaggaagttccctcatatcggatttcataagatctattgttacactgttcacctcgaaagagaaggaagcagagatctcccagttcttcgcgacccgcactaagcccgggtacgagaggacactgaagcagagcctcgagagggtgctgatcaacgccaggtggatcgaaggcatcaggggtgaagctaagcttgctcagactgtccatgagcttcttcacaaaccctgatctgtatccggtgtgatccctcccccccgggagctgcattccctgctatgaagtgccaactttaggcgaagcatttgtcgtagcagcagcatcccagcacattgttgctctctgtttataagtcatgaagcataggctgcatacgaggcaaagggatatatagtgcttaccgtttctcttcataggttgtgtacagcttgtgcccaggagccatgcatatgattcaagagttgtcgcacaattctactgtagctttgaagtgtccgagtgaataagattttacctttcagcattctgtatcagaccgagctcaactatttgtcgggcgattgttctccttggccatgataacttaggctgtgttcttctc

SEQ ID NO: 17741 - DNA, 2219 bp, Oryza sativa
  ref <308>: DATABASE ACCESSION NUMBER: AK068166
  ref <309>: DATABASE ENTRY DATE: 2001-12-06
gacagccatctcctctctactgtcaatctcaagtgcgtgcccggtatcagctcgaccggtctcgcacctgcaaccaaaccacacacagctagctatcatggcctctaagccagggcctctcactcagtggccgtggcataaccttggaaactacaagtacgcgctggtggcgccgtcggcggcgtacagcacgtacaggttcgtgacggcgagcagcgcggcggagcgagacctcctcaacttcatggtgttccccatgctgctcctccgtctgctctacggccagctctggatcaccgtctcccgccaccagactgcccggagcaagcacaagatcgtcaacaagagcctcgacttcgaacaaatcgacagggaaagaaactgggatgaccagataatcctgacggcgctggtgttctacttggtgagcgcgacgatgccgcaggcgcaggtggcaccgtggtggagcacaaaggggatggtggtgacggcggtgctgcacgcggggccagtggagttcctctactactggctgcacagggcgctgcaccaccactggctgtacgcgcggtaccactcgcaccaccacgcctccatcgtcactgagcccatcacctccgtcatccaccccttcgccgaggaggtcgtctacttcgtcctcctcgccatccccatcctcagcaccgtcgccaccggcaccgtctctgtcgtcacggccaacggctacctcgtctacatcgacttcatgaactacctcggccactgcaacttcgagctcgtccccaagtgcctcttccacgtcttcccccctctcaaatatctcctctacaccccatcgtttcattcgttgcaccacacgcagttcaggacgaactactcgctgttcatgccggtgtacgactacatctacgggacgacggacaagtcaagcgacgagctgtacgagaggacgctgcaggggagggacgaggcggcgtggcggccggacgtggtgcacctcacgcacctcaccacgccggagtccgtcttccacaaccgcctcggcttcgccgccgtcgcgtccaacccgcttggcgccgcagcctccggccacctcctccgtgccgcctccgccgtcgcctcccctctcctctccctcttcgcctccaccttcaggtcggaggccaaccgcctcgacaagctcaacatcgagacctgggtcatcccaaggttcacctcccactatacgtcgaagagtgatgggtacaaggtcagccgtttgatagagaaagcggtgtcagacgcagaagcaagtggcgcgagagtcctcacgctcggcctcctcaaccaggggtacgatctgaacaggaacggggagttatatgtcgtcaggaagccaagcctgaagacgaagatcgtcgatggaacaagcctcgctgttgctgccgttctcaacatgatccctcagggcaccaaagatgtgctcctcctgggaaacgcgaacaagatctctctcgttcttaccctgtccctctgcaagcgggagatccaggtgaggatggtaaataaggagctgtatgaatgcctgaagcagcagctgcagcctgaaatgcaggagcatctggttttgtcatgcagttacagcagcaaggtgtggctcgtgggcgacggggtgacggatgaggagcagatgaaagcccagaaaggatcccatttcgtgccgtactcgcagttccctcccaacaaggcccgcaacgactgcgtctaccactgcaccccggctctactcgtccctgaatccttcgaaaaccttcacgtttgcgagaattggttgccgaggagggtgatgagcgcgtggcgggcggcggggatcgttcacgcgctggagaagtgggacgggcacgagtgcggcggcagggtcaccggcgtgcagaaggcgtggagcgcggcgctggcacggggattccggccatacgacgaccaccaccaccccggcatcacccatgatggccgtggcgggctgtgaccggccggtggccggatcgaagcaacctggcctgattgtgtgatcttgtgtgtgcttcttcgctcggttgatatataggagtatctccgtgtgtgttatgatggggccagattaatatccagctataaaatcccaagctgtattgttaattctctgccggtgtcataatctattgtttgagcataacttaaatttgagcatgattaatttggag

SEQ ID NO: 17742 - DNA, 1761 bp, Oryza sativa
  ref <308>: DATABASE ACCESSION NUMBER: AK068167
  ref <309>: DATABASE ENTRY DATE: 2001-12-06
gacacaacccttttccgagtctaacaacaaaaaaaatcccatctcgcttcacccatgctcctcctcgctccctcaccagcggcggcggcggccgccgctcgccggaggaaggtcggtggatcagccctccgcgtccgctgctcgagcgtgcgggaactggagagatccccgaaccctcgtccgggggagcggctgccgccgctgcgggaggcgaagcgggtggtgctggtgcggcacgggcagagcacctggaacgcggaggggcggatccaggggagctccgacatctccgtgctaacgcccaagggcgagtcgcaggcggagacctcccgcctcatgctcctctccgactccttcgacgcctgcttcaccagccgctcgcccgctcccgccgcaccgccgagatcatctgggccgaccgcgacgacgacctcatcccggactctgacctccgcgagatcgatctctactccttccagggattgttgaagaatgaagggaaggagaggtatggagttatctaccggcagtggcagaagaacgcggccaacttcagcattgatgggcactacccagtgcgggagctctgggaccgcgcacagaactgctgggagaggatcctggcacatgagggcaagtcggtgcttgttgttgcacataatgcagtgaaccaggctcttgttgcctcttcgttgggacttggcacagagtactttcggattctacttcagagcaattgtggtgctagtgtgctggatttcacccctcaggctggtggagggcctccagctgtatgccttaaccgcttaaatcagacgccaaattctcctgttgcctcaggaagttctgcagggagaaagacaagcaagaggattatcctagcatgtcaaggagctacacagaacagtgcagagattggtgtcagtggaatggggtatgcaccgcttaacatgcttgggattatacagtctcagaagactgcagaactacttttagatcaaaaggtaaatggtattctctgtagcccacaagttgcagcatttgatactgctactactatatgcgaggttcaagaggctgcagattgcttaggtgctgactgtgtgcctcgttatgtggaaatgaagaaactgctagaactagaaattgatgatgccttccaaacaaagcaaaagagctttggagaaatagctcagtctgggtggctgggcagcatggaatacaaaactctggaggggctatggaaccagtcgaaagctgcatggcaagccttgctaaatgagttgcaagatgatacttcagaaagaattctggtggtcgtaggacatccgggtataaatctagcattgatttgcaggtgtctggatttaacgatggactacatgtcatcttttcatctagacgatggcagcatcagtgtgatcgatttcccagatggaccaaaaggaagaggtgttgtcagatgcacaaattacacagcccatctaggaagatggtcaatacctattaccaggaccatggaaactgatgaagagttctaacttcctgcaaggtaatgttctggtgtaacatccttcaggaaagctaagtatgtcaatatcttatactgatgtacatactggcatcttgattaatatctgtagatctgatatgtaaatagcatccttctttcaaacaaaaggaatatgtaaataacctttttttctgaagctaaacagtaaaagtatcatactgtttatatgtaaacatcatttcatatcc

SEQ ID NO: 17743 - DNA, 4739 bp, Oryza sativa
  ref <308>: DATABASE ACCESSION NUMBER: AK068168
  ref <309>: DATABASE ENTRY DATE: 2001-12-06
ggtggacgcggcgcggcgtcggattcttccgtacttccgtctcgagcgacgccgccggcgacaaccgcttcctcgcgacctcccgccgccggcgaggaaacctcgtcttggtcctccaagttcaaggtatcgatagctatgggataatcccgaattcccgatcgatttcgattctatttgcatgtgttgggaagatggagaggggtggggagatggatcctcccatcactgcctcgctgggagccattcatattgtttttgggaaactggtccggttgctctccgagcctggactgcggctgcacaaggaagagatgaaagcgctaggtgtgctcaaagacggcctccaagttttgatagaagattatctgatggaaccatcagatctggagggccctcccttctaggctaactactggatgaaggaggtgcgggagctgtgctacgacatcgacgactttgttgatgagcttttccatgctgccgctaatgccaagatccaaagagctctccagtttaaggcttctccactccggaagaaattgcccctctttaagacttctcagctccaggagaagttatcccgcttcaacgcttctcagctccagaagaaattgtcatggaggcaaaaaattgttgatgaggtctcaagtttcagttcttgcttgaaggaattgattatgctttataagcgttatgatcttggtagtttagagagacgttccgggtgggaatcaaatggaacaatgtctttaactctcccgttagctgaagagaccagccaacgctgctacctcggtatggacaaagatatggataaacttgttgggttactaaatgatgggcagcaagaatgcaaggtcattgctatcattggactttgtggtgttggcaagaccacccttgctgaagaactttatcagaagtttggatttcagtttcaatgttgtgcctttctaaggttatctcggaaacctgacatgaagagggtgctcggtagtttattctcacaagttcggcagcatgatcctcctggtactggtactgttgaggtggataatttatcccatgagatcaagtcatatctgaatgacaaaaggtattttattgtaattgatggtgtttggtcatcatatatatggaacactatcaatcagactttgccaaagaatttttacagtagaatattgataactacagaaattgatcatgtagctcagaggtgctgtgttgataaccgcaaatacatctttaagaaggaaccatttaataaagttgaatctgatgaattcttcagcagagtccatgaatatctaaaggaaatttcttctgagattgcacaactctttagtggcttaccgctcatgatggctattgtagctagtattttaacacgattgccaccaagcacagagcaatggaatgttgtaaaaaaaatcattaagttctaaattggaagggattttggacctcatttacaatattattcctcatcctttgaaagcctgcatgctttatctcggaatatatgaagaagacgatataattttaaaagatgaactgttgagtcaatggtttgcagaaggatttattgatacagttgatggaaatgatgagaagagggtggcattgatctattttgattagcttatcagctatgggctaatacaacctgtagagaccaggtttgataatgaagtgttgtcctttagagtgcattacatgataattgattctattcggtctaaggcagtccagcacaattttgccattgcaattgataatcatcagacagatgtgcgaattgctgataagattcgtcggttgtcccttcgttttggcaatgcaaatgatgtgacaacaccaattgggttgagatggtcacaagttcgcacgcttgtcttttttggacctctccgctgtacaccttctattgctgagtttagagttcttcgagttttgatccttcgattatctgctgatgatgatgatgtaacttatgacctctcagaaattgctgagttgcttggattaaagtatctgtatattgatgcatgccatctgaatataaggctaccaatgcagatgcgacagttgcaatatttggcaaagttaaaaatagaagcaagattgagttatgttccatcagatattttttatttgccacgattgcaacagttgattcttccaagtgagactactttgccccatttcactgagccgatgaagtctcttcatactttagggtgttttgatctcagcgggagctcaacagaaagtattgtggatcttgggaagatggtaaatcttcaaaatcttcacatgacatgttctagtggacagcctgccaatctgaaacttctagggtctgttctcaataaactcaaaaacatgaagtctctaattctggtatttactggttcattggatgatgctgattcttcaattatggaaatttcttctgatgacttcagtgtttcatctcctccggttcttctgacaaggtttgaattttcatggcgctcatgcatattttcatgcctacctaggtgaatcaaagaactgaacaatctcagtatcttgaagattgccattagtgagatgttgggacatgatgttgatgttcttagtgtgttacctgcactcacttctctctctgtgtatatccaaagagcacctgaggaaaggatcagttttggtaaaggaggattcgtagctttgaagtactttaaactcaagtgcactgtaccttggctcaaagttgaggtagatgcaatgcctaatcttgaaaaactgaagctaaggttcaatgttggtctcagtctgcaaagagtgggtctgcatggcaataaccttatcaacattgagcacttgtcaaggcttaaggagatatatgcaaaagtggagagtgaaggttctgttgatgcagggtctgctttgatgactggtgtttggaatgatccaagaaatcctacaattaccattcaattgatttgtggtttctatggtgaaatgactagactgatgacaaaagatgatattatcttggaagaaaatccagacagcataactgaggatgaggtcagacagaaggatgagaagaaacaagtggatgatcacaggtttcaatttttcgcttctttactttggtttcactttttgaacctaattactcgtgtaattcctattataatgcagctaattggtgttgtaattaggacttaggctgcgttcgttcacaggagaaaggggagattgtgactcgttttccgcgcgcacgcttttcaaactactaaacagtgcattttttgcaaaaattttctatagaaaagttgctttaaaaaatcatattaatccatttttgaagattaaaatagttaatactcaattaatcatgcgctaatagctcacctcgttttgcgtatcttcccaatcttctcaatcccctctccctcaaacacagccttatatgacatcagaggctagtcctgcacttcctcgaagacatattgctcatgaaatcccacggcttcttccttcatgtggtgggaaatggcccacctctgatgctgcctttgaaggccacaaccttgtgaactgctatgctggcaacctctccatcgctgtcatccaagccaataattccttcaaggagcaataccgtgttgagtcatcccaacccttcggcaccgtcattggcatcttcgatggacatgaggctccgaagctgcctgatttgcttgtgacaacctcttcctccacctccaagagaattgtccagctcacaacgtgtgacaactgatgctatcagcaaagcattcaaggccactgaagaagggttcattgagcttgtgtctcgccaatggaaaactgatccacaaattgcaactgttggggcatgctgccttgttggtgctgtgcaacaaaaaacactattcatagccaaccttggaaactctcgggctgttcttggaaaggtcagttgcattgggcagattgttgctgaacagctctctagtgagcacattgccaatgatgcatggaaagcaaagggcctcgtgcaggtgttgagagcgataggtgatgcatacttgaaatacccacagtatagcagggaaccactcaacaaaccaatactaagtgccaatccatctattgtttcacgcgttcttcgaccaagtgaccgcttcatcatatttggctcagctgttctatgggaatatctgtccaatcaggaagctgttgagattgttaaaaaccatcaagcttctggaagtgccaaaatgctagtaaaagcagctcttcatgcagcagccaaaaagcacaacttgcattactcagatctcttgaagatggacagggataatcctaggcatgtccatgaggatgtaattgccgtagtcttatttataaactatgatcaattactgaaagggaaacaagggcggcctctttccatcagataccctagatccatacaacatggattagttccttcaagcagaattagttaatgagatgttttcattgaaacaaccttgaaaagaggacacaacaaaacctctaactatgctaaattatcaacactttttgtattatgatagataatattctgttgttttgcatcatacaagtaaatgggaaactttgattgtaatatctactcactctggtcagatttattcagaattgtatttcttatatcgatatattgattaaggagtacgtacttggaaagt

SEQ ID NO: 17744 - DNA, 1208 bp, Oryza sativa
  ref <308>: DATABASE ACCESSION NUMBER: AK068169
  ref <309>: DATABASE ENTRY DATE: 2001-12-06
gtggtgaaaaagggagaaatccaaacgcccgaaaaatctagccatggttctcctcgccgccgccgccgtcgggccacacaaaaccctaaaccctaccctgagcccgccgagctccggcggccgccgcccccgcctccgcttcccgctgccccttccgcggggcggccacctccgctgctccgcggggtaccgcgaggcggcggcggcagcggcgtcgacgtcgtcgacgacgacgacgccgcggccgacggagatcccgtggagcagggagctctgcaactccgttcggctcatcgggacggtgggcaccgaggtggagctgcggcagctgcccagcggcggctccgtcgcgcgggggcgcctcgccatctggaagtcggccaccgagaccacatgggtgactctagcattttgggatgacctagcggttgtggcttctgagcatgtgaagaagggtgaccgaatatttgtttctggacgccttgtgtcggacactgttgatgagggccctgagaaacgacaggtttattataaggttgtggttcaacagttcaatttcattgagtcctttcagcaagtgcagttatatgagccagaggcaggcctggataccttaggtggaaagcatggagattatgttggttctacctctggctcgagtgagggtaaaagtagggaccatgttgactcatcctcccgttcaactgaacagttgtggcaagccttctttgctaatccttttgactggtgggataacaggacaaataagaagaacccgaggtatccagacttcaagcacaaacacaccggtgaagcattgtgggttgatgggaggaacaatccaaattgggttatctcccagttggcaattctggactcgagaatgggttctcttcaaggcaatgataggaaaccagttgcctttatgtatgctgatgacttcatgacacctgacaccgacactgaagcccatatgtgaaaggaaacctcccattcaccgatttatcatagcactatgtattagatagaaaatgtactactgcgatagtgcacctgcgctccttcaattttgttgtacataggtagaatcgtgaagtttaccatagaggcgtgcggccatctgttgtagtcagtagtaatgacaaatgcagatgtagtaaagaatcggatggccttcccttaaatttgcctgagaaacggtgtacatc

SEQ ID NO: 17745 - DNA, 1792 bp, Oryza sativa
  ref <308>: DATABASE ACCESSION NUMBER: AK068170
  ref <309>: DATABASE ENTRY DATE: 2001-12-06
gactttgcccacgtacatacaccgacagccatggacaccccggcgttgctcccgttggcgcttgcccttgttgccatcccgatcaccatccttcttgatcttcaatcggatccgcctcggcaggctgtcccccgggccccgggcgtggccggtggtaacctgttcgacatcacgctggtgcggtgccggtgcttcatggagtgggcaggcaagtacggacccatcatgacggtctggctgggcacgtcgccgacgatcgtggtgtcgacgtcggagctagccagagaggtgttcaagaacgtacaatgatcagcagctcgccgaccgcccgcggaaccactcggcggagcggttaagccgcggcggcacggacctcatctgggcggactatggcccgcactacgtcaaggtgcggaagctgtgcaacctggagctctttgcgccgcgtcggatggaggctctcaggcccatcagcgaggacgaggtcaatgccatggtagagtccatctacagagccgtcactgctcctgtttccttatactgaaggtgaagaagggaagcccatcggggtgcggaagcatctgtcaatggtcgcctttaataacatcacgcggctgacctttgggaagcggttcatagttgccgctggcgagctggacgagcaagggtgcgaacagaaggcgattgtgaaagccgggatcaagatcggcgcgtcgctgcccatcgcggagcacatcctggtgctgcggtggctgaacctggtggatgaggagctctacaacgcccacagcgcaaggcgagaccgcttcaccaggcggatcatggacgagcacgcccgcgagctcgagcggcacggcgccaagcagcacttcgttcaccctcagggaccagtacgacctcagcgacgacaccgtacgtcatcggcctcctctgggacatgatcgctgccggctcggacacggcggtgataacggcggagtgggcgatggcagagctggtgaggaatccaagggtgcagatgaaggcacaagaggagctggaccgcgtcatcggccgtggtcgcgtcatgttggaggcagacatcccgaacttgccctacttgcaggccgtcgtgaaggagtcgttccggctgcacacaccgacgccgctgatgctcccacacaaggccagcgccgcgtcaagatcgccggctacgatgtccccaagggcgccaatgtcatcgtcaatgtgtgggccgtaggacgcgacctcagtgtctgggacagcccactgccccactcgagtaccggccggagcgtttcctcgaggagagcatcgacatcaagggcagcgactaccgcgtcctccccttcggcgctggccgtcgggtttgccccggcgcacagctcgggatcagcctcgtggcatccatgatcggccacctgctgcaccagttcacatgggcgctgccagacggcacatggccggaggacctcgacatgatggagtcctcagggctcgtcaccttcatggccacgccgttgcaggttgttgccatgccacgcctcgacaaggaggagctgttcaagcgagtgccagtcgacatgtcctgatcgacctgccgttcattccaaatacaaggggcagaccaaggtcctggataaacctaggtccgcctagcatatgaatcgacatccaaggacatttttaatgttttgttgggcatggtagcacgccagcacttaccttatgctcgccagcactcaccctctgttttaaaggtgtcacctgctaatccatctacttccttagc

SEQ ID NO: 17746 - DNA, 4374 bp, Oryza sativa
  ref <308>: DATABASE ACCESSION NUMBER: AK068171
  ref <309>: DATABASE ENTRY DATE: 2001-12-06
gattcctccaccccacgaaccccgtcgtctccaatccctcgccgccgcctcctcctccaccccccacctctccgctccctcctaccaaaaccctagccgcaccgcgccgcacaggccccggccctcccctcccctcccccgccgccacggccgcctagatcccccctcggatcccgcgggcgctagggtttcccgggctgcgcctcgtccccggcctcaccccggcctcgcgtacggaagtcgtccggggctagggttccggatttgggggggagccccgccatgcctcggagctcgcgccacaggtcgtcgtcccaccggtcgcacaggcgcggcgggtcggtggagcggtcggagtccgagggcgatgaggcgggcggcggcgccggggcgcgggaggaggccgcggcggctagggtttcgcgagatcccgagccggagaggcgccgctcgtcgtcggggaaggaggtggtgagctcggggaacgggtacgcggagcacgggaggaagaggaaggacagggtggaggagatggtcgtcgatgtggtcagtgaccgctggaacagcggcgtgtgcgaggatcacttggtcgagaagaggtccaagggcgaggtgtttgggcctgtcgatgtggacaagctacctgagaagtccaggggatcaggggatgaatcaaagaggtcgagtaggcgtatggtgtctatggatgatagggctgaggaggttgtgtccaaaagtgattctgggaagcgccgctccgacaaggatttggggaggagggagagtagtgggcagtatagggatgacagagatagggagagggagagagatagggagaaggagagagatagggaaaaggagaaagaatgggagagacagaaagagcgagaaagggaaagaggcagggacagagaaagggatagagatcgggagaaggatagagagagagaacgggagcgggacaaagaacgggatcgagaacgtgacagggagcgggagcgagagcgggatagggaacgggagcgtgagaggcaaaaggaccgagagagggagaagaaagattatgattccaagcatgagaggtatgatgatggtggtgctaagaagaatggctccaaggcaagtaggggagaggaggatggttactcatacaagagagatacagagatcaatgcatctgcaacaaaagagaagtacaataacaccgagaaggaccttgatagacatagccgaagaaaagatgtttctgaagataaagataagtggcctgctgaaaatagagatggtgatgatagaaaaacactttccagatatgatcatagtaaagttaggagctctaaggagcaaaggtttgatgatgataaatataaagaaaagtacaaggatgattatgaaagggataaaagacagcaagatgacaagtgtctggatgagcggttgacccgtgatcatgaaagtgatagagctgattataagagttctaaagacggacacagaacttccgagagccactacagaaaggatgtaattcaagaaccagatcattatgatgattatggtagtaggtacaaggaaagtagagggagaaaaaggcctcctgaggaaaatgatgaccaatatgatttgaagcctccaagtgcacgggagcaacgtggcagtgctgataagtcttctgggagtgggcgacttgatgccctggttgagagaatgaggtctgaccatagacatccagaaaatgtcgattctagtccgaataaagtccatccaagaagttcacctggcccaaatacttatcatgacaaagatcaaaattggcacggatctaaattgacagatcatgctaagagagaaataccatatgacgagagaaatattcgaccaaggacttcttctgggagagaacggacacctgcttctagactgcgtgatagggatgcagacaaccggccttcagaaaggctgaaacaaaaggatgatctccagtcacgtgacatgcaattggaaatttcgtcatcattacaatatgatcgcacacctaggaaggatgcacatccttctccaaagcacttatctgaaagatctccaactgaacaaaggttttcaggaaggctcagtggtggacgtagtactgataataaagcagaaagaagtggcctgaccaaatatagagatagagatggtgattctgtagaacggtcagttcatcaagaccgaacaccagctaaagctccatacagagaaccaacaccttctagttcgtccagaggtggccatttttcaggcacttcaccaaatcatccactgccaccacctccaaggcacagaagtgatgattcttcatttctgggtttgcatgatgatgatcgtaggcctcaaagtggagacaggaggttccatcagaagaggaatgatatgagttctggacgtgggcatggacatgcctggaacaatccaccgagctggccttctccagttgcaaatggttttgttcccatgcaacatggtgtgcctggatttcacccccctgttcatcagttttctgccccaccaatgtttaatctcagaccccaaatgaagttgaaccaacctggagtttcatatcctatgcatgagtcagttgacaggttctcgacccacatgcgcccatttgggtggcccaatcctctagatgaatcatgcccccctcacctgcaagtttggaatggaggcagtggcgtattcgccagcgaaccctatatgtatggcaggcaagagtgggatcagaacaggcaacatagtgtcagcagagggtgggagacaactggcgatgcattgaaaggacaaaatgaattgcatgagcgtgaaccttctgttactaaaaaggagcctgattgttcagcaacacctgttcccgagacttctactgggcaatacaatcttaattctcgtattgaacagaaggagatggatcagacattagagaaaaatggaacgaaggatgatctgaaaagctcttttagaaatactggaggttctggtggggcaccactcatgacttctatgccatcaaacagtggtactgcaattttttctaaaagttatctgtccaaaattagtgtgtcacgggatcttgttgagtcggagctgtacaaaaggtgcatatccttgctggcagactttggtattgcaaatactcctgaggttgttgggactggacttgtgcagaacaatggaagctttgggaagataaatagaaaacttggaacccccaatctgttgggttcacataaccttaaaaacaagagtgatatctttcagagagctttggcccttcacaagaatcagacagcaaagattgtttctcctacccactcgattctcgagactgacaggaagacatacttaccagaagataatcatgatgacacagaaatgactgaccatactgtgtcgaaggaattgcttgtcgataactctgaaccacatcatggtgctgataccatggagaaagagttaccattgagacaggagctagctggtggcattggcgtgacatctccagcaagtatagaacctggtaatgtgggggcacctccagtaattattgaacctgatgtaggcatggaggatgtggcacctccaaaaatcgtagaacctgatgaaggcatggaggatgcggcacctccaaaaattgtagaacctgatgaaggcatggaggatgcggcacctccaaaaattgtagaacccgatcaaggcatggaggaggtggcatctccaacaatcaaagaacctgatgaagacattgaggtgatgcctttaggaactgcagaacctggcaaaggcatggaggaggtggcacctggaggaatttcagaacctgagaaaggtatggagaatttggtgcctccaggaattgcagaacctgtcaaagatggcatggatgatgtggctgctccatctgcagggcctgctgccggccttggggatggtgtgccagaagttactgttgaactagctgatagcgcgcaggagaaacctccagccatgggagaattgggtgatggcatggaggttatgccaccaccagtcacagaaactagcctaggcaaggaggattctcctgctgttcctagttctcctgaagttcaagagatcgtctccggcatgcatgcaggcattgagaaaggtatggaaggagagactgataatttaattgatgataaccctggggatggtgaggtgaacgcatctagccttgagctggatgttgcaagtggcgctgatgattgtgaagccttggtggagagtagggtaaatttaagtcggatacctaattccccagaaagtacacattgaaactcctttcatttcatttttaattcctttctcattttc

SEQ ID NO: 17747 - DNA, 2276 bp, Oryza sativa
  ref <308>: DATABASE ACCESSION NUMBER: AK068172
  ref <309>: DATABASE ENTRY DATE: 2001-12-06
gttttcctccgccgccgccgcctcctcctccgctccgcgcggccgtctcccacctctcgcgcctcacctcctcctcctcctaaaccctcgctaaaccctagcctcccacccccccaccccaccggggagcatgcactccaggctcctcagcgccccctcccacgcctccgccgcctcctcctcccccctccccttcgccgccgcccacccttgccgcgcctcctggacgccgcggcccacctccccgctgccgcctctatcgctgctgcgcgccaccgcctccatgcatccttctcctcctcccgaggggcatagcgaccagcctgtgcatggcgtcaccaacacggtcgtcggcgtgctggggggaggccagctggggaagatgctgtgccaggcggccagccagatgggggtcaggatggccatacttgatcccctcgaggactgcccggcgagctcggtttgccacgagcatgtcgtcgggagcttcaatgatggcgccacggttagcgagttcgcaaagaggtgcggggttttgacggtggaaattgagcatgtcgacgctgtaacactcgagaagcttgagaaacagggcatcgattgtgagcccaaagcctccaccatcatgattattcaagacaagtacaggcagaaaactcatttctcaaaatttggaattccgttacctgactttgtggaagtagatactttaagtagcatagagaaagctggggaaatgtttggttatcctctaatggtcaaaagcaagagattagcatatgatggccgtggaaatgctgttgctcacgacaaaaaagagctatcttctgttgttgcttctcttggtgggtttgagcatggcttgtatgttgagaggtggacatcttttgtaaaggagctttctgtcattgtggcaaggagcagagacggttctacggtgtgctatcctgttgttgaaaccatccacaaggataacatctgccatgttgttgaggctcctgccgaggtgcctgataaaataaagaagttggctactaatgtagctgaaaaggctatcaaatcattggaaggtgctggtgttttcgctgtagaattatttttaacacaagataatcaggttttattgaatgaagtagctccaaggcctcacaacagtgggcatcacacaattgagtcatgttatacctcgcaatatgagcaacatttacgtgctattcttggccttcctcttggtgatccttcaatgaaagcgcctgcatcaataatgtacaacatcctgggtgaggatgagggtgaggcaggatttactcaagctcatcagttgattgagagagctttggacatttcaggtgcatctgtccattggtatgcaaaaccagaaatacggaagcagagaaagatgggccatattacaattgtggggccttcaaagtacagtgtaaaagcacgcttagataagttgctgcaaagagacgcatatgaccccaagaaagttgcagttaaacctcgtgctgcaataataatgggttctgattctgatcttcctgtcatgaaagatgctgcagtagtattgaagaaattcaacataccttttgagcttacaattgtttcggctcatcgtacaccagagaggatgtaccattatgcattatctactaaagaaagaggcttagaggtcataattgcaggtgcaggtggagcggctcacttaccagggatggtggcttcattgacttctgtcccagtaataggagtacccatcatgacttcatctttacatggaactgattccctcctatctattgtccagatgccgaaaggtattcctgttgctactgttgcaattggaaatgcggaaaatgcaggtttattggcagttaggatgctggcctcaagagatcctgagttgggggacaaggcaactgaataccagcatgatctgagggatatggtgttggagaaagcaaaaaggctcgaggaactaggttgggaggaatataccgagctatacttgaagaagcattgatctctgctgcccgtttaattgacattctttttgatccagtgttgacataagcagatatggtccatgtggaggcctggagagggcgtgccgacttacgaagtgaaagatgtcgacgaaacacggcgcatgagcatctcagtagcagaaagctttgcttgtataactgtaacaacatgcctgcctgaaatgttcatgtggatcttatgatgatatttcagggaaaaaaatcaaccaattttaacgagttctg

SEQ ID NO: 17748 - DNA, 3738 bp, Oryza sativa
  ref <308>: DATABASE ACCESSION NUMBER: AK068173
  ref <309>: DATABASE ENTRY DATE: 2001-12-06
gaccgtttgccgcgccccgatttgaaccctcgccgcctcgcctcgcctcgcggccgtggaggcggagcgaaaccctagggaggcgatggctgcctcggtggaggcggcggcggcggcggtggtggccccgcccgcctccgtgggcggtgacgaggtcgtcgtcggtggcggcggcggcggggcgtcggagcaggccaggacgctcatcggcgcgctcaacctgctctcccgcaacctcccgctgccgcccgccgtcctgcacgccgtctcgtccatctaccacggcggcgacgcgtgggagggggaaggggaggaggggggtgaagaggaggtggcggcggcggcggcggctgtcggggatggatgcggcgagagcggggagggggaggaggaccgcgcggatgcttctcccggtgcggatgagggagtcaccttgattcaagagcttgaagatgctgtattgaagaatcaaggaccgtatatgtcatactcagagttgactgctttaaaagaagaccgcttcaacacttccattcagcataggctgactgaacttgaaggattaccatctactaggggtgaagatttgcaaatgaagtgtttgcttgaattgtacgggcttaagttattagacttgcagaagaaagtaaggactgatatcagtgcagaatactggctacacaaaaaatgtgcacaccctgataggcaattgtttgactgggggatgatgcgtatacggtatccttttaccatgtatggaattggagatagtttttcaatggatgctgatgatatcaaccgcaaaaagagattctcagagaggatctcaagacttgaagaggaggaaaagaaccaggcagagatcaggaagaggaaatttttttcagaaattcttaatgctgctagggagtatcagctacaagtaccggcttcttacaaacgaaaaaaacagcgcaatgatggagttctggcatggcatgttcgtgcacgtcaacgtataaatcgcatggaaaagagtagattacaagttttgaaggctggtgaccaagaagcttatttgcgtatggttgaggagagcaagaacgagcgcctgaaactgctccttggaaaaacaaatgagcttcttgaaggaatagggaaagctgtgcagagacaaaaagatgctgagcatgttagtcgccctgatggatctgaactgccaaaagggtcagaatctgatgattgttctcaaatatcaggcctcaaggttgaatcccctgatgaagagtccccatcagatgttgatgcagaccatcatagttctgctgatcatagtaaatttaatgctggccataggcttgattctaccgtccactctattgaagagaaggtaacggaacaaccatcagctcttgaaggtggggagttaagaccatatcaattagagggcctgcaatggatgctttctttattcaacaataatttgaatggtattctggctgatgaaatgggtttggggaaaacaattcagaccatagctttgatcgcctatctattggagaagaaggaggttacaggaccacacttaataatagcaccaaaggccgtgttaccaaattggtctaatgaattcaaaacttgggctcctagcattgggacaattctgtatgatggtcgtccagatgataggaaggctctaagggaaaagaattttggacaacggcagtttaatgttttgctcacgcactatgacttgatactgaaagatctgaagttcctgaagaaggttcactggcattatctgatagttgatgaaggacatcgtttgaaaaaccatgaatgtgcgcttgctcgcacactagtttctagatatcaaatccgtcgccgattacttttgactggcactccaatccaaaatagcctacaagagctgtggtctttgctgaactttattcttcccaatatttttaattcatcacagaattttgaggaatggtttaatgcaccatttgcatgtgaagtcagccttaatgatgaggaacagctgctaattatacatcgtttgcatcaagtgctgcgtccatttttgctgaggaggaagaaagatgaagtggaaaaatatcttcctgtgaaaacacaagtaatactcaagtgtgacatgtctgcttggcaaaaagcacactatgaacaagtcactagcaatggaagggttagtctaggatctggactcaaatcaaaggctttgcaaaatctgtcgatgcaacttagaaaatgttgcaatcatccctatctattcgttgagcattataacatgtatcaacggcaggaaattgttagatcatcagggaagtttgaattgcttgaccggctacttccaaaattgcagagagctggtcacagggttctgcttttctctcagatgacaaaactgcttgatatcttagaagtatatttgcaaatgtaccagttcaagtacatgaggcttgatggatctacgaagactgaagagcgagggagattattggcagattttaacaagaaggactcagaatatttcttgtttcttctcagcacccgagctggaggccttgggttgaacttgcagactgcagacactgttattatttttgacagtgactggaatcctcaaatggatcagcaggctgaagaccgtgcccaccgtattggacaaaagaatgaagtgcgtgtattcgttcttgttagtgttggctcaattgaagaagagatcttggaccgtgcaaaacagaagatgggtattgatgcaaaagttatccaggctgggctgttcaacacaacctccacagctcaggataggcgagcattgctgcaggagatcctgaggagaggaacaagctcactgggaactgatatccctagtgagcgtgaaataaatcgtttggctgctcgtaatgatgaagaattctggttgtttgagaagatggatgaagaaaggcggcaaagagaaaactacaaaccgaggctcatggagggaattgaggttccagactgggtgtttgccaatgatactttaacagagaagatacctgcagatgaaccccagaatgttctgctaactacgaagagacgcaggaaagaggttgtctactcagactcttttggtgatcagtggatgaaagcagatgatgtagttgaagagactccaaggatggctccaagagcaaagcggagcgcttattcgtctgatgtacaagaagtcgatttcagtgagaggaggaaaaggcataaatctctagtgaacattgcagatgatgccagcattccaatgtggacaccagaaaaagtaagggctggggtttcttcatatagcaaggatgagaatgaagacgatgccgaagatgaatccaccacaagtgttttgcaggggggcagttttacatggaagacccttagaaggaaaaggtcaagccacttctccaattcctcagattcaaaagggcgctcggcattctaatcttgggattcaggaatgttgttgccctgatgcatttgtttgaatcctctcctttgagaaaggagtgctcctggatagaaattaacagggggtatttagggtacatttaagcttacaaattttaggattagtggtattgtatggatttcttggtattaaattgtgtccatcagaactaaaacatcgtagttggctttctggtataaagtagatgtactgttcgtctcgccgtgatatatccagtggcagagtggctttctggtgtg

SEQ ID NO: 17749 - DNA, 1963 bp, Oryza sativa
  ref <308>: DATABASE ACCESSION NUMBER: AK068174
  ref <309>: DATABASE ENTRY DATE: 2001-12-06
gggtggcagttggttgggcaacgaatgcgaacctacttctcctagtatactgcttttactttagccatcgccaccaccgccattcctggaacccccttccctcttcctccctcggatctctcctcgctcgcgcgttcgcgccgccgccttcccccttcccccgttgattgattgggaggaggatcaatggagtgcgtccgctccggctccggggttcttgatcccaggtgctctccgcggttcctggggaagaagggtggttcgctcacgtcatgtggtaaagccacttctacaaatcttgccatttgtaccaaacacgagcaaaacttgcatgggaatgttaaaccctcacagttagcagcaagtggatcctcttattctgttcacagaagtccagtgcttaagcagagacagaatctttctgctaggtctacctctgcagatgtatatactacttttgatgaaaatgtcagagctgtatcttcacatgctgctgaagaaaaggttggagtactcttattaaaccttggtggcccagagacactggatgatgttcagccatttctattcaacctgtttgctgacccagatatcatccgtttgccaaggctgttcaggtttcttcaaagaccattggccaagcttatctccacttttagagctccaaagagtaaggaggggtacgcttcaatcggtggaggatcacctttgcggaaaattactgatgagcaggcaaatgctttgaaggtggcactgaaaaagaagaatttgaatgctaatatatatgttggaatgcgatactggtacccttttacagaagaagccattgatcagattaagaaggataagattacaaagcttgtcgttcttccactgtaccctcaatactccatatcgacaagtggatcaagcatccgtgttctccaaaacattgtcaaggaggattcatattttgctggattgccaatttccattatcgaatcatggtaccaacgtgacggttatgtgaaatcaatggctgacttaattgaaaaggaactgtcaattttttccaatcctgaagaggttatgatattcttcagtgcacatggagtaccacttacctatgttacggatgctggagatccttacagagatcagatggaggactgcattgctttgatcatgggagagttaaaatccagaggaatcttaaacagccatactctggcttaccagagtcgagtggggccagttcagtggctgaaaccatatactgatgaagttctagttgaactaggtcaacagggtgtaaagagcctcctggctgttccagtaagctttgtgagcgagcacatcgagaccttggaagaaatcgacatggagtacaaggagctggctctagaatcgggcatcgagaactggggaagggttccagctcttggatgcacctcatccttcatctccgaccttgctgatgcagtggtcgaagccctgccctccgcttccgctctcgtgacgaagaaggtggacgagagcgattccgacatggacctgatgcactacctgagcaagatgttcttcggctccatcttggcgttcgtcctcctattgtcgccaaggctgatttccgctttccggaacaccctgttgtaggtgatggtggcttcttttgtttggttttttgcactaggggtttggcttgagtaagtagaaaggcaggctcgtgggatgatagtgaatagtgatggttaaagttccccttttttacagaagtaatatgcatgaagtcattgcaaggtagcttaagtggtggttttaagcaaggagcctctaggggtaaattgccagtctgtaccagttttcttgtgctggtacaaggcaagcctatccttttttttctttttttttctttttgttacatgagcacattgataaaacatcattgatatattactaatgcataaacaccataatttttcct

SEQ ID NO: 17750 - DNA, 1774 bp, Oryza sativa
  ref <308>: DATABASE ACCESSION NUMBER: AK068175
  ref <309>: DATABASE ENTRY DATE: 2001-12-06
ggccattgactccccctcttctctctcagttctctcgcttcgaatccgatcgaagcgcacacaaaagaggagaggagaagcaaacaaattcggcttcttcttcttcttcatttttttttcgatttttgaactcgcggaagcgagccgccgccgccgagtccactcgctttctccccccgctccgccgccgattcgatccgaagggaggcagcgagcgagagagagaggtttgtcctgtgaaggcggcgatgccgctggcggaatcgcctcagtggcgccagaaggccacgaatttcttctcttcatccagcttcaagctgaagcaggcagggcaatcagcaggggacaatatagctgatgttgctggcaaggttggttcagtggttaagagtcggtgggctgtcttccaggaggctaggcagaggcagccgccaccaggggagactgtgcaagagcgtttcatctctgctgctgccaccactggggtgcttctgaggaagggcatttcagagacaaaggagaaagttgcagtgggaaaggtcaaagttgaagaggctgctaaaaaaactgctgacaaaagcaagactattttgaacaacattgaacgctggcagaagggagtcgccagcactgatgtctttggtgttcccattgaagccaccgtacaacgagagcaatctggtaaagctgtgcctctggtacttgtgagatgtgcagattatctggttatatcaggtttgagtaatgagtacttgttcaaatcagagggtgaaaaaaaagttcttcagcaattagtctctctttacaatgaagattcaggtgcacctttccctgatggtgtaaaccccattgatgtggctgcactgataaagtgctatcttgctagcatccctgagccacttactacattctctctttatgatgaacttagagatgcaagggttagcattgcagatttaagaaatatactgaagaagcttcccaatgtgaactacatgacactagagtttgttacagcactgctacttagagtaagccgtaaatcatcgcttaacaagatggactctcgtagccttgcagtggaatttgcgcctttgatcatgtggcagcaaggtgactctggaacagatttgcggaatcatcttagatttaccctaaaagcacctccaaaaattgtggatacaacatcaaataccacagaatgggatctgttagatgaggatgatgtggatgcatcttcccaaatccccttggatgacgcgtcgcccccagattacagctcaattgaggtcatccaatctctcattgagcatcacaatgccattttcactgatgcgaacgagaccgtatggagatagccagcgtctctagatttcactggtgttattagctcgtgcaatgtacaagttccaggtaggaggatggagtatttgcacattgtcgtcagggagacgcattttggtcgaaatatttcttaaaatagatttgtatatatactagtattaattctccataggaggaatctatttgtaggaccctcggcacgtctcatcaataaagctttctggtgccttataatgttcggttgtaaacctggtagacatgttatgatgtgccttatactcgtgttcttcatggcaaattactattgtatgaactgcactgatgataaaggttaccagaaaccattggtcgttcgaaatcctctctaagaacaaaacagttgttgcagtggttaatatgaggattcagccgtatagatgtgcaacttccc

SEQ ID NO: 17751 - DNA, 1759 bp, Oryza sativa
  ref <308>: DATABASE ACCESSION NUMBER: AK068176
  ref <309>: DATABASE ENTRY DATE: 2001-12-06
ggccctcctcactgaaaacagtaaacaggacacggttcagtgaccacacgaggttcacgagtacagtgacgcatacagagacatgggctccatcgcggccgacggcgacaagccgcacgccgtgtgcatgccgttcccggcgcaggggcacgtcacgcccatgctgaagctcgccaagatcctccaccaccgtggcttccacatcaccttcgtcaacaccgagttcaaccaccgccgcctcctccgctcccgcggcgccgccgcgctggacggcctcccggggttccgcttcgccgccatcccggacggcctcccgccgtccgacgccgacgcgacgcaggacgtgcccccgctctgccgctccaccagggagacgtgcctccctcacttcagccgcctcctcgccgacctcaacgccaacgcctcccccgagtccccgcccgtcacgtgcgtcgtcgccgacgacgtcatgagcttcgccgtcgacgccgccagggagttccgcgtgccgtgcgcgctcttctggacggccagcgtctgcggctacatgggctaccgctactaccgttccttcctcgacaagggcatcttcccgctcaaaggtaaaccctgagcttttacgagaagaaaatcggtttccattcatgggtggacacacgcatgcatgcagaggagcagctgacgaacgggttcttggacgcgccggtggactggacgccggggatgagcaagcacctgcggctcaaggacttcccgtcgttcttccgcgcgacggaccccgacgagtacatgttccacttcgcgctccacgtgacggagcggctggcggaggcggacgccgccgtgctcaacaccttcgacgagctcgagccggaggcgctcgacgcgatgcgcgcgatgctgccgccgtcggtgtccatccgcaccatcggcccgctcgggttcctcgccgagcaggtcgttcccaaggggagccccctcgacgcgctgggctccaacctgtggaaggaggacgactcctgcttcggctggctcgacggcaagccgccccggtcggtggtgttcgttaactacggcagcgtcacggtgatgacgaacgaggagctggttgagttcgcgtgggggctcgccaacagcggccacgacttcctgtggatcgtccgccccgacctcatccacggcgatgccgccgtgctgccgccggagttcatggagtccgtcggggggcgcggcctgctggcgagctggtgcccgcaggaggcggtgctgcggcacgaggcggtgggcgtgttcctgacgcactccggctggaactcgacggtggagagcctctgcggcggggtgccgatgctgtgctggccattcttcgcggagcagcagaccaaccgccggtacagctgcaccgagtggggcgtcgccatggagatcgacgacgacgtgcggcgcgacgcggtggaggccaagatacgggaggcgatgggaggagacaagggccgggagatgcgccgccgggcgggcgagtggaaggagaccggcctccgcgcgacgcgccccggcggccgcgcgcacgccagcctcgacgcgctggtcgccgacgtcctcctctccggtggcaaggctcggtaggacaacgtgcactagtgccgcctgttgcatgctactccctccctcccataatacaagagattttgagtttttgcttgtaacgttttaccattcgtcttattcaaaattttttaaaattattatttattttagg

SEQ ID NO: 17752 - DNA, 1756 bp, Oryza sativa
  ref <308>: DATABASE ACCESSION NUMBER: AK068177
  ref <309>: DATABASE ENTRY DATE: 2001-12-06
gaaggggagagttgcagagcaaaaccggcggccactagaaaactaatggcggaaacccattaatcaaaatcaaatggcgcatgagtctcctcctcctcctatgctaggagtacatttctactagcgtaggacaacaagatagacagagtatacttctaataggagtaggagtaggagtattaaaacaaaaatcgatcttccgtcctcctagtttagttgtctctcctcttggctctgctttaatttgtctctcctcttgcccctctttgatccgcttggcactctctcctcctgctgctgtagaatcgagatcgagagagagagagagattgaaaaggcagccagggatcttgtgaattaatggagctggccccttttgcggcggcctcctcctcctcctcctcttccacagtcacaaacacgtgcaagctcaggctcaggctcagctacacccactgttccatcggcttcgccccccgagttcgcagatggatccgagcggcagctgagggccgaggcggcgaccaacggaggagcggccgcttggctgcagatggccccagagtcgtggaggtcgctgccccacctgccgcccccgtcgtcaccggcggaggcggaggaggcgggggcttcgcagcccgggacgcggagctggccatgtgggagaggctgggagcggttgtcaggctcagctatggcattgggatttatgccgccatggcacttactgggagattcatatgccagatggccggaatagactgcacagggggcttccatccatctctctctgcgcttgttgagggactcggatatgcagctccgccgattatggctttgctctttatcctcgacgatgaagttgtcaaatattcacctcatgctcgcgccatcagggatgtcgaggatgaggagcttcgcagcttcttctatggcatgtcaccatggcagttcattcttattgtaactgctagctcaattggagaggagctattctatcgtgtcgctgtccagggtgcgttggctgatatttttctgagaggcacagagctcatgaaagacgctcgagggattgcatccctgagtggcatggtgcctccatttgttccatttgctcaaacgtttgcagcagccatcactgcggctctcacaggatcactctattatgtggctactgccccgaaagatcctacttatgtggtgacaccagcaatgcgttcaaatactgggcgagagaatctcaagaaactatttgcagcatggtatgaaaggcggcaaatgaggaagatatattcccctcttcttgaaggaatcttggctttctaccttggctttgagtggatccagacagataatattcttgcacctatgatcacccacggcatatactctaccgttgtgctttgccatgggttgtggaaaatacacgaccacaggagaaggctacggcaaagaattcaggaaatcagacaggaaggaacaacaaattcagacacgttgtaacagatcatgagatggtagctagctagcaccgcttttcttgaatggcaaaatgggatgatcagatcagatcacagaaccatgtacaagacacagctgacaatttttgatgatccttaggtaggtatgtacttgtacgtagaagatagaaagattaagtcaacatgtacatagacagtatatttgttgtatatcctcagtataagtgtgtatacacagtagcaatatttctacacttatgcaactaaaatgggtg

SEQ ID NO: 17753 - DNA, 1312 bp, Oryza sativa
  ref <308>: DATABASE ACCESSION NUMBER: AK068178
  ref <309>: DATABASE ENTRY DATE: 2001-12-06
gactttcatgtacagctcactttcttggcctccttcctttccagctcggtttgctaactcatggtctcctcctcctactcatcatcatcgtcttcttcttcttgcccaactccatatctctgcatggctccatgcctctccatggcgcctatgtatagcctctcctagtcctatctctcgtctcatcatcgtacacaaacagtagtacatgatgcaggacctgttctcggtgccgtcctgcttctcctccggcgagaagctgccggacatcccgagctccggcacggcggcggcggccgcggcggccaggcagagcgcggtgacgctggtctaccgggcggagatctccggccaccgccggcttgtcaccgtgacgtggtgcaggaacctgctcacgcacggcctgtcggtgtcgatcgaagggtcggcgggcaacggcaaggacaagatcggcagggagtacggcgaggccgccgtcgccgccacggcggcggacggcggtggcggcggcggcggcggcaagagctgcagcgcgtgcaaggtggagatgcagccgtggcacttctggcggaagtacggggcgaagcagttccaggtggacggcaacgccatcgacgtggtgtgggacctgaggagcgcgaggttctccgatgggccggagccgctgtccgactactacgtcgcggtggtcgccggcgaggaggtcgtcctcctcctcggcaacctcaagaaggacgcgttccggcggacggggtcacggccgtcgctgcaggacgcggtgctggtgtgcaagaaggagcacgtcttcagcaagaagaggttcgtgaccaaggccaggttcagcgacagggggaagctgcacgacatcagcatcgagtgcagcagcagcaacctcaccggcggcacggacgtcgacatggcgatcaagatcgacggctgcgtcagcgtcctcgtcaggcacctccagtggaagttcagaggcaacgagtgcatctccatcaacaagctcaaggtgcaggtgtactgggacgcccatgactggctcttcggcacagggatgaggcatgccttgttcatcttcaagcccgagccgccgtcgccgtcgccgccgggagcgagctctgaattcagcaccgatgaatattcagatttctgcctgtttctgtacgcatggaaggttgaatgagcctacacactttgttactgcgatacgggcggacgtttttttttttttaaccatgctatgaactggtaattcagatcatgtaatggattggaagatagaagaagaagaagagggaagaaattatcg

SEQ ID NO: 17754 - DNA, 1471 bp, Oryza sativa
  ref <308>: DATABASE ACCESSION NUMBER: AK068179
  ref <309>: DATABASE ENTRY DATE: 2001-12-06
ttggggatgatggacaaaagagttatagccaatctcatggaggagaggcggcgggtagaagtcaccaacaatggtagacgcacgacggaaaatgtctatgcagtgttcacgggaagcgtcgtgcggcactacccgcggagattattttccctccttactttggctctcgcatgcgtggaggaaggaaggtttaggcagaggctaataagtgggcgggtaagctgtaagcagatcaagatctttatcagctgcgccgtacaacgcgtgcctctgctcgaccaggtaccgtgtagcatcacggttacgaatacagaggagctcgtgcaagcagattctgctggtgccaacaacaacaagatatgtgaatgcactttcttgaaccctggttcctgggatgctgcgcttctggcggctggaacaaccttatcagcgatgaagcacatactagacgggcatgccaagattgcctacgccttggtccgaccccctggccatcatgcgcaacccgaccgtgccgatggctactgctttctgaacaatgccgggcttgcagtgaagctggctctggattcagggcgcagaagggtcgccgttgttgatatcgatgtgcactatgggaatggcactgcagaggggttctaccacacagacagcgtgctgacgatctctcttcacatgaagcatggttcatggggtccatcgcatccccagagcggcttggttgatgagactggtgaaggcaggggtcttgggtacaatctcaatatccctctgcctaatggcagtggggatgcagggtatgaatatgcgatgaatgaattagtcgttccggccattgagaagtttcgccctgagcttatggttttcgttgttggccaagattctagtgcgtttgatcctaatggaagacagtgcttaaccatggatggttataggaaaattggacaaataatgaggggcatggctgatcaacacagcaatggtcaaatactgattgtccaggaaggaggttatcacatcacctattcggcatattgtctgcatgcaacgctggaaggtgttttgaatctgcaggccccattgcttgatgacccattgggtttttatccagatgatgaaaaatacaccatgcaagccgtggacatcatcaagaaatgctggaaagaatctattccgttcttgaaggatatatagaaatccaagcctcaatttcatatcaagagtctaggctcatggtctttcgccttaaagtacatatgtactggagaagcatccgaatgcttgcccctctcatgaacgacctccaaattttcaattctcactggtattgtatgtatcatgtagttgtaccattgtttacttgcagaaccagtaagaaataacaggggttaaacaaactagacaaaacttcaacccctttactatatagcagaagctcctatatataatcccatatccggtagtggaggcc

SEQ ID NO: 17755 - DNA, 1603 bp, Oryza sativa
  ref <308>: DATABASE ACCESSION NUMBER: AK068180
  ref <309>: DATABASE ENTRY DATE: 2001-12-06
ttttttaaaggttagggtgaaaattggattaaagtgaaagtttgagacccaaaataaacttgacccttgttcacataattgattggggtcaccccatgataaacaactaggtgataccccgttctttgctgcgggattcatggatgagtatatgttaaatattatcgaaatgataaaagttgaaatgttcaaaaaataatgtgaggaagatgatttgacacgtactggttgatctctataatataatattatagatgatgtgtcatgcttgcatgggttttaaatatgctataataataattgttagtgagtgaagatatgtcatgcttgcatgggattttaaatgggctagaatagtaattgctagtggtgatgatgtgacatgcttgcatgttgagctttagcttctaataattgttaatgcataccaactatatagtactccctccgtccaaaaaaagacaaacgttggacacggaaatccaagatttgtcttttttttgggacgaaggtagtacttgttgatctctataatataatattatagatgatgtgttatgcttgcatgggttttaaatatgctagaataataattgctagtaagtgaagatgtgtcatgtttgcatgggattttaaatgtgatagaatagtaattgctagtgggtgatgatgtggcatgcttgcatgttgagctttagcttctaataattattagtgggcaccaactatatagaaagtatagattatttcctttgccacaaaatacacaatgaaaataaaaatcttatctctatgaaatgcttttgacaaaagcaattatatatattttgaacaaaagtataatcccgtggaagtgtttccaaaatattatggattgttattgttttagcaagactagggtggtcatgttaattctgagaaagcaagtaactacaactaagatccatctacggttttcattaccaatcataaatttatcttctaatcattttaatcaatttaattttttatcactaaaacaatggggaggtactatacctctcgaagaacagaagtatatcttaataaataaacaaccaataaatctaaatgtaaaactattagaattgaaggggggaaagagcaaatctacttgaaactcttataataccatgaagtgtcctttcaaaagaaaataccatgaagtgcattttatgtggcatttacccacgtttattttttttttcatactaccagcggtgaggtagccaacaccaaattgtatggaataaatggggctataaaattttattagcaaaacaatcatacaaagcatcaggagatctggtgattctggtcatgtcttcgtacctaccccagtaaggaagaattcgggaactggtacgtcagagcagtggataaggaagaactagtgttgagcggcattgcagttagaggaaaaatgaaattgactggctaggaggcgacagagattggggagaaaacatgcatggtaggagaaattggaggtagaagaaacactattagccatttttttttactcaaagaccgtgggggaagcccccacggttaaattatattaaagaagaaaaataagaagtac

SEQ ID NO: 17756 - DNA, 2119 bp, Oryza sativa
  ref <308>: DATABASE ACCESSION NUMBER: AK068181
  ref <309>: DATABASE ENTRY DATE: 2001-12-06
ggcggtgatgcccgcaccgtgccatctctctctcttttttacttctcgggctttccttagtttccttcgttttcccacacgcccacgcgcggacgccgcgtacttagctagcaaggctagctagaagctcccatacttgcacgtacgctttcccattctcttttgcttaaaccgagctagagctttgctagctcagttcgtccatgagagcagcagcggcgggtcggcagcctcgcttgtagctagcgataatgaaggtctacatcacgtcggcggcgccgctggctggcgaggcaacgaaggcgatggcgtcgccgccgtcgccgccgccgcaccagcaccagcaagcggcaacaaggcgcgggtgccggtcggctgtcgtgacggggctcctcgccggcgtgctcctcttccgcgccgcgctcctcaccatcgaggccggcgcatccctctgcccttccaccaccggatgcttggactggagggccggtctcggggactggctgtacggcggcagcggcgacgcgatggaggaattcatgaaggagtggaggagaggtcgcagggaggccagcctgttggatcccgtggtggtggaggcggcaccggattcgctggacggcctcatggcggagatggacaccatgctggcgtcctacgatcggctggacatggaagccgtggtgctcaagattatggccatgctgctgaaaatggatcggaaggttaagtcgtccaggatcagagccctgttcaaccggcacctggcctcgctgggcatcccaaagagcatgcactgcctcacactgcggcttgccgaggagttcgcggtgaactccgcggcccgctcgccggtgccgctgccggagcacgcgcctcgcctggccgacgcctcgtacctccacgtcaccatcgtgacagacaacgtgctcgccgccgccgtcgccgtggcttccgccgtcaggagctcggccgagccagcgaggctggtgttccacgtcgtcaccgacaagaagagctacgtgccgatgcactcgtggttcgcgctgcacccggtttccccggcggtggtcgaggtcaagggcctccaccagttcgactggcgcgacggcggtgccatcgcctctgtcatgaggacgatcgaagaggttcagaggagctcaatggagtatcaccagtgtgacgcgtcagttgtcagggaatacaggaggctcgaagcctccaagccaagcacgttctctcttctcaactacctcaagatccacctcccagagttcttcccggagctcgggagggtgatacttcttgacgacgacgtcgtggtgcgaaaggacctgaccgggctgtgggagcagcacctcggcgagaacatcataggcgccgtcggcgggcacaaccccggcgaagacggggtcgtctgcatcgagaagacgctcggtgatcacctgaatttcactgaccccgaagtgtcaaacgtactcgaaagtgcgagatgcgcgtggtcgtggggtgtcaacgtcgtcaacctcgacgcatggcgaagaacaaatgtcaccgacacgtaccagctctggctagagaagaaccgggagtcgggattcaggctgtggaagatgggctcgctgccgccggcgctgatagcgttcgacggccgggtgcaggcggtggagccgcggtggcatctgcggggcctcggctggcacacgccggacggcgagcagctgcagcgctcagccgtgctgcatttcagcgggccgaggaagccctggctggaggtcgcgttcccggagctccgggaactatggctcggccacctcaacagatcagacagctttctacaaggatgcggcgtagtcgagtaacacagtaaacgacacagcagcaattgagctgggaaagagtatataagtatagacgatttggttcgagatctccatgtggcgcagagctgggttcatgtcttcatgaggagagggaagtaggtgctgccttcagtctctcctcgctctggctctacgtgcaacatgttcagtgacacagtgtagaattgtatagtgacgatgtatataagggctgttatctatttcttggttatagaactaaatgaaaaactagatgc

SEQ ID NO: 17757 - DNA, 4506 bp, Oryza sativa
  ref <308>: DATABASE ACCESSION NUMBER: AK068182
  ref <309>: DATABASE ENTRY DATE: 2001-12-06
acgggattaggatttgtagttgggtaccaatctgagccgttggttcttgtcgccgggaacggagaggagttcgccgccgccgccgccgcgggctccctgtcctacccaggaccctgccaccgctcccacctcttccgctgccaccatctccaccaactgctcatgcggcccccatccccctcttcgctccgcccagtttcaagtcgccgccaagatccaggacctcctcgacgcggcgcgctcgccggagtcagcatccccaagatgctgggctgctttcagtccctgatgaaggatttcaagaagcaaatatggatgcagaggatgattcgttctttcgtatacgcagtcaggcagggtcaatggaacactgctgtttggttctcatctcttcccatagttgctatcgacttgacgtactccttcctaatcttcttcaacgtcacaacaacatcactcatcaccattctttgctctggcgagtcagacgagcagagcaagcccagctcaaacactggcataagaaaggcatcaatgctactggtagaagaagagctgtcctgtagaagttggccatctacgacatggacaaggtttgcaggaaatgcctgaagaacccactgcctgatgtttagttctcccacaaacatagcatctgttggtctcttcgcagtgaacacttcaagcaacatgatcccatagctgaatacatcgctcttccgtgacgctttaccaagggccccgtactctgctcaagaaaaattggtcaccaaacattagttgcaccacttgataattactctataaaagatcaacaggttttatcaagcacaaatgcgactaattacctggtgccatgtacccaactgttcctggcatgctagcagaaatgatggagttatcatcacctaacagcagccttgcaatgccaaagtctgacacatgtgctgtcatatcatcatcaaatagtacgttgctaggcttcaagtcacagtgcaggaccacctcgcagtgctcatggtgcaggtattccattgccagcgacacgtctagcataatgtccaacctctcaaggaaacctaattgcattctttgatcagagtgtaggagtgcctctaagcttccgttgggcatgtactgaagaaccagtgctctgaagtccaggttggaacatgtgttcagtatctttatcaggttgcgatgtcgagccattcgaagaacacggcactcagtatcaaagcttctcagggcatgttccagatgctggtgtataacttttatggcaaccaccaaaccgctgctcagctgacccttaaaaacttttccaaagcttccagaccccaacatattatcatcactgaaatcattagtagcatgagcaagctcattatatgagagtaattgatgatttatagtgtcaaccatatcagcaggattctcttgatgcttaactttcttcctaatcattacatataggcaacaagctacaactccaactgatatgaatatagcgagaagtaaatattttagcatttggccatttcttttgtgagaggtttggcacagtgaaaatcctaaacgggcaacaccacatagccctgggtttcccaccaaggattgtagcgtgatgtttgtgaagacacctccttctggtatctgaccatgcagattgttgaaagacaggttcaagcttgtgaggatggtaaaattggccagatattctgggattgtacccgaaattctgttgtgagatagatccaaagtttgcaagcctgtcaagttgccaaaagaatttggaatcgaaccatcgattgaattggttgataggttcaagatggttatcatctgaagttccccaatcgaatcagggaggctcccaagaaagcggttcctggatagatccatgctgtttattcgcttcagttggcctatatcaattggcaatgcaccactcaagaagttttgagacagatttagctggataaggctttcaagacgaaataagctgggtggtaaagtggatgataattggttattagataaccttaggatctctaacttggtgaggttgccgatgccctttggtatggagccagagaatttgttgccttgaaggaataaatgttctgcattctttagcattccggcatttgatgggatggagccaaccaagctatttccactaagatcaagctcaaggagattctccatctccatgattgactctggaattgccccttgcagttggttgtctgaaagttctatcactctaaggccagttaaattcgaaaaggaaggtggaagttgaccagttaacttgttcctatgtgatctgaattcttgcagtgtacctgataggttcccaatgtaatctgggatgcttccagtgaagtaattcatgccaatatagatccaggaaagatttctacagttggaaaacgtagaaaggaagttgagatccccatgtaaacggttttccgagacaataaagtctgttaaatagttaatgttccctattgatgctggaaccgatccatccaactggttttcgttcaataccaggcgtgctaatgaagacaggttgccaagagaagctggaatcggtcctattagttggttccctaaaagttgtaactcccaaagttggtctagctgtccaatatccaccgggatggctcctgttaggttgcaaccgttgagatctagtgcagtcagcatggtgaggttgctaagtcctgcagggatcggaccagcatcaaagttattccaactcaaggtgaggccagtgagattcctcaacttggacagccatgatggcaaaacaccctcgaatagattgtcatgcatggaaatggtttgaaggtatgggcatgctgccagtcccattggaatttgaccagtaaaattgtttatactaatgtagatccgttgtagtgccgggaggctgaaacttgtgttgcccgggatagggccagttaagccattcgaggcaagagcaataacagttaacctagacatgttgaagatggatggtggcactgggcctgtgagattattgtgctgtaggacaagccactcaagcatgtgcaaggagccgatgcaacctggtattggtcctgacaggctattgttgcccatgatcaggcgacgcaatgaaggcgtatggttgaataggtcgtttggtaccaagccagtgaggtaattcgtctggatatttatgttgataaggctacgcaggccctgcaactctgttgggattcgaccagatagctggttaaactcgagattaagaagctgaagcctggagaggttccctatggtggctgggatgccacctaacatggcattgtggccaagatcaaggagctccaggcgatgcagccttcctatgtcatccggcaacaagcctgtgaggccagtgttggtgagattgaggacggagaggaaagataggttaccgaggtgggagctgagctctccttgcaggggaacgttcggcagctccagggcaacgacacgctgctgatggcggctgcacgagacgcccacccactggcagaacggcgtgccaggggtccagttgccagcaaggatgttgtcaggatcatggaactgcgctttgaaagccagaagtgcagtgaggtcagtgtcgttgttgctgctctcggtcagacctggagaagaagcagcagacacagtggacagggggatcaacaacaaagctgataagcatactagagatcctaaagccatgtttgggctctgatgcattgccaacaagatggcgctatttcaagggatgattggcttatatttatccaatacatcattccgctgtgcatgcagtcatcgccttcaattgtaaactcttttccctaccttgcttaatcaatcttgtcggcgtcaatctggttgctcggtgatgaagtcaaccaagaagatgccataatttcaggggatgattagcttgagatttattccactgctcaagtaaacatctgccaccttcaattataaattgttttccctccattgctcaataaatttgttggtatcaatctgctggtctggtgcggtgaagaaatcaaccaagaatatggcattattttagcggatgattggcttgatatgtattcagcgctcaacattaccctgcccttgcaaccacatggtatggtgccttcaattgtaaaatgttttcacttcccatatgctctataaatttgggtgtcaatccgcggccggcgaaaaagtcaatcaagaacatgacattatttcagaggatgattagcgctgagatttatggagttctccattctttgtggatgcaaccatctgggctccttcaattatgaactgttttccctccatcgttctatacattcgggcagtgccaatcggtggacccggcaaaaagtcaaccaatatgtcattatttatgattggcatgagaattattcagtttttctctatatctactgaacgtgtcattgttttgttgattgc

SEQ ID NO: 17758 - DNA, 1465 bp, Oryza sativa
  ref <308>: DATABASE ACCESSION NUMBER: AK068183
  ref <309>: DATABASE ENTRY DATE: 2001-12-06
tctcccctcccctcccacctctcctctctcgacgcgggttccggccggagctgccgccggagggcggcggcggctaccggcggtggcagaggtggctcaaggcggtggctgcgcggagggtggagccagcggcgggcttccctccctcctcccagatccgatggaggcggaggtagaaggcggaggcggcgcgaagggtggacgccgcggcggtgggtccgctgggaggggtgagggcggtggcgtcggcggccctcccctccggatctggcgaggcggctacgtccgcggctggattcggcacctccgccgtcgtcgctgtggtgcgacctcccccgttcccgaccccctatattggataaggaggggaggagggcgaaggggagggtgaaggcagttttggagggcggctacgccgggaggggggatggcggtggcggcggtggccagatgcggacctccgacgcgcgcggcggacggcgcgaagacggcgaacggtatgctcagcccaagtgttgtcgttgacgccggattgcacgtctccttcctctgcttgtcgactatcagcaggtcggtttggccactgcaggtggagccgtgaaggtaatggccgccgccagccagtggaccaccttcttggtccccctacgacctgcgcgcgtcgatctactaccggggaacgccggatgcaggccgtcgtggctggatctaccagcgctggtgtacgacggcacgaagttttgcaatggcgtcgtgcttgggacaataggagttggtgcgattttgcgccttttgccacaaccaacctcaacatggtgaatttcgatgctttgcttgcttgcgcaaatcagcagatgtctttgatgcttgcagggtacctgtgcgtgcactgtgtatttgtctctgagaagttactgtgaaggaggtgacatagaggataagaagagaaggggtgtccttttctctgaaaagataagaatagctctcttcaagtatgttcaagtaggctagcgtgaaggttctcaaggaggtgaccaagacgaggaaggtgcctgtgctggaggtgcccttggcgttgaccaagatcaagaaggcaaatcttgagacatcctcattctttgagactcttagagggacagagttcccggtcaggacatggatgcgcatctttgtgaaggttagaaatagatgcatgattgcttgcaagagcagttgatttggtttttctaaaaggacttttttttgcttgcttacttgcttagttcgttgggtaaaaatgtcaggatcagctgaagaaagggtagtgtacaatgtttttatgctgcatgagctccttaattaatcatgttcttcattatttgtcatggtagtgaaatagtgatgatgctttagcagcccagttgccatgggcattcctgacattgagaactaactgttacagtgtattactgcaccctgtttgccg

SEQ ID NO: 17759 - DNA, 887 bp, Oryza sativa
  ref <308>: DATABASE ACCESSION NUMBER: AK068184
  ref <309>: DATABASE ENTRY DATE: 2001-12-06
gacgtcaccccctccttctccgcgtgcgcccatccatcccaactccccaaccaagcagcggcgagccagcgatggcgacacccactgcccaaaccgcggcgctcctcgccgccgccgccgcgctcttcctcctcgcgtcggcggccctcccggtcgtccgctccgacgccggcggcgacggcggcgtcaccgcgtacgacgagctccggcaccgcgggttcccgctgggcttgctgccggcgaacgtgcgcgggtacacgctggactccgggtcgggggacttcgccgtggacctcgcctccagctgccggatcgtgctccccgcggggagctacctcgcctccttcagcgaccgcctcacgggccggctcgacgaccgccgcatctccggcctcagcggcatccgcgtcagggccttcttccggtggtggtccatcaccgggatccgcgccgacggcgacgagctcgtcttcgaggtcggctccgtctccgccaagttccccgcccgccacttcaacgccagcctcgagtgccccgccaaagccgactcttagtacaaaggtcctggtgtctattccttgatatggcatcatgaagcggcttaggcttcaggctttcagtgttctctgtttcttcgcacctgtctgtaattattcgtgtataaggctgaaatgctgaattgttcagccagtcgccccacgcaaacaaagtggaacagaacaatgcgtactgtagctcttgtatctataccttctatatagttggtataattggtacccactagttgtgttggtagttgttacccatgtccatgtatcgtcgtttcagtccgaaagactcggggcgccgaatatatatgttgcctcagacacgaccaggtacagatc

SEQ ID NO: 17760 - DNA, 1669 bp, Oryza sativa
  ref <308>: DATABASE ACCESSION NUMBER: AK068185
  ref <309>: DATABASE ENTRY DATE: 2001-12-06
gcggggaaccaacaaaccaacacacatccaacgaaagggtgagcaaccaaactttaactgtacaacgtaggcatagcgcgcggcatgagtatggctgcacgttttctcgacagcctcaaggctacgtaccagtactaccaccgtgccatgggcaacgtcctcgtcgccgtgccggccgctgctggcgccctcgtcacggtggctctcctcgcgccggaggccgagtcgacgacggtggcgatcgggcgtctacgcgagctgatcaggcccgcgcacctcttcctggccgtcttcctcccggccgccgcggccaccgtgtacctcgtgatgcgcccgcgggcggtgtacctcgtcgactacgcgtgcttccgcacggcgcccaactgccgcgtccctttcgccacgttcctcgagcacgcgaggcaggtgcccacgctcaccgagcgcagcgtgcggttcatgacgcggctgctcgagcggtcggggctcggggaggagacgtgcctgccgccggcgcaccactacatcccgacctacaagtactgcaccctcgaggccgcccgtgccgaggtcgacctcgtcgtcttctccgccgtcgacgagctcttcgccaagaccggcgtcagccccgacgacgtcgacatactcgtcgtcaactgcagcctgttctgccccacgccgtcgttcgtcgacatgatcgtgaacaggtacaagctgcggagcgacatccgcagcatgcacctgtccggcatgggctgcagcgcgagcctcatctccatcggcctcgcgaggaacctcctgcaggtggcgccgcgtggcgcgcgcgcgctcgtcgtctccacggagaccatcacgcccaactactacgtcgggaacgagcgcgcgatgctcctgcccaactgcctcttccgcatgggcggcgcggccgcgctgctgtcgacgtccccggcgaaggcgcggttccggctgaagcacgtcgtgcgcacgctcaccggcgcggaggacagcgcgcaccactgcgtgttccaggaggaggacgagcacgggagcatcggaatcaaccttagcaaggatctcatgaccatcgccggcaacgcgctcaaggccaacatcacggccatcgcgccgctcgtcctgccggcgtcggagcagctcaagttcgcgctcgccttcatcgcgcggaaggcgctcagcggcagggtcaagccgtacatcccggacttccgcgcggcgttcgagcacttctgcatccacgccggcgggcgggcggtgatcgacgagctgcagcgcagcctctgcctctcggacgagcaggtgcaggcgtcgcggatggcgctccaccgattcgggaacacgtcgagcagctcggtgtggtacgagctggcctacgtcgaggccaagggacgcatgcgccgcggcgaccgcgtgtggatgatcggcttcggctccggtttcaagtgcaacagcgcggcgtgggagtgcatctcgccggcgcgcgacgacgacgggccgtgggccacgtcgatccacaggtatccggtggacattcccgacgtgctcaagcactaggaagacacggcatcgctgtccttctgaataattcagtgttaattaaaacagaaaactgtaatattcctgtttagtgtgtgtgtgaggctgcgttctttcc

SEQ ID NO: 17761 - DNA, 1757 bp, Oryza sativa
  ref <308>: DATABASE ACCESSION NUMBER: AK068186
  ref <309>: DATABASE ENTRY DATE: 2001-12-06
gcttctcccccattaattgagctccagccgtccgggagacgagataattccgttcaatttcaagttaatcccgcggcagccatggctgcgcttctcatgaacaccggcgctgtctcgatgcccttccccaccacgcgcaccgccgcgcgacggcgaaccagcagaagcagatgccaggcttcatctagcggcggtagcagcaacgaaggaggcggcgagagctaccgcgggaggagcgggcgcggtgggtcgacgacgtgggtgacggagtacgacctgtacgggctgctgggcgtggagcggtcgtcgccgcagtcggagatcaaggccgcgtaccggtcgctgcagaagcggtgccaccccgacgtcgccggcgccaagggccacgacatggccatcgtcctcaacgaggtctactccctcctctccgaccccgccgcccgcctcgcctacgaccaggagcaagcgaagcagtcggagttcgtcgggtacacggggaagccgctctactcggcgtggttcggcggcgaggccgagcagcgcgcggtgttcgtggacgaggtgaggtgcgtcggctgcctcaagtgcgcgctctacgccaacaagacgttcgccgtcgagtccgtctacggccgcgcccgcgtcgtcgcgcagtgggccgacgccgaggacaagatcctcgacgccatccagacatgccccgtcgactgcatctcgatggtcgagaggtcagatctcgcggctctcgagttcttgatgtccaaacagccgcgcggcagagtccgggtctcggaaggcaacaccgtgggcgctcgcgcacccgacatcttcaacgaggtaagcaagtttcagaagaggttccaggagatgaagcagaagtctgccacgagagaatccgaggagtcggaggcagcaaggcaatcgaggagctcggcagttcagacgatcaggtcgatctcgaactggtggtactggcagccgttcagagctccggcgaccaccgtactcgcttctctccacctgccggcgccgccgccttctccttccatgcccgccgacccggtgacggacaggctccaagaagcggcagctcgacgcaaagcgggaggcgcgacggcggcgaggacggtggcttcgtacgcccgccgcgacgactactggactccgcagctgaacctgccgtccctagcatcgccgccggagcgacctcaccggaggcagagcgcttctcctccccgcagccagacgcggcgagcaacccccaccggcgatggcggggtgacattgggcagcatcgacctgacggcgccgctgctgatggcgatcatctcggccgggttcgtgggttacaacagggaggaggtggccggagtcggcggcggcggcatccaggagcacgtcggtggcgccgccgctctgggtctcgtgaacagcttcgagctcaagatcgtcctagcctccgtgacatggttcatcatcggcgcggcgattgccggattcattcagtttctcgcgaggagcgaagtgaacttcaggaaatgaagcgaatacatgatttattcacgatgacataaagatacataggatagatgaagtatacatagtagtatagatgcatgtatataaaggttactgcaattaaggaatttattagtggtgaaaaaatgagatataaagtagagcaaaatgaaatgtacgagacgtatagcattcagcttatgtggtttggacgagaaatcagttctcttgtagggtgc

SEQ ID NO: 17762 - DNA, 1572 bp, Oryza sativa
  ref <308>: DATABASE ACCESSION NUMBER: AK068187
  ref <309>: DATABASE ENTRY DATE: 2001-12-06
tcttgtcttgttgttgctagtactttctagagcactcggcgtggagggatggcagcggcagctcgcttgctgccggtggcggcgaagcgactaacgacgacggcgagggcgaggcgcctctccacctctacctcgacgtccccacccgccactgccgtactctacgaccagcacggtccgcctgacaaagtccttagggtggctgagctgccggcggcgaagatcggcgagcgcgatgtgtgcgtgcggatgctggccgcccccatcaacccctccgacctcaaccgcgtggagggcgtctaccctgttcgccctcccctccctgccgctgtcgcaggctacgagggggtcggccaggtccacgccctcggcggcgccgtcgattcccggctcctctcccccggcgactgggtcatcccttctccgccctccttgggcacctggcagacctacatcgtcaacccagccaccgcctggcacagggttcgctccgatgtgcctccccaatacgtcgccaccgtcaccgtcaacccactcaccgcgctcaggatgctctgcgacttcgttaacctcgcccctggtctcctgtcactgctttcttctcttttctttccctgtaattaagtctcacccctagccctggatacgtttgtttcaggtgacactcttgtccagaatggcgctaccagcattgtcggccagtgcgtcattcagctcgccaaactgcatggtcttcacaccatcaacatcataagggacaggcctggttcacaagaggccaaggacaaacttaaacagcttggagcagatcatgtgtttacggaaagccagctagacatcaagaatatcaaaagcttattgggtgctttgccagaacctgcattagggttgaattgtgttggaggaaatgctgcttctgtcatactgaaatttttaaggcaaggtggcacaatggtgacatatggtggaatgtccaagaaacctgttactgtttctacttcatctttcatttttaaggatctttccctaagaggattctggctacagaagtggatgagttcagataaggcagaggaatctagaacaatgatagactacctgttggacctggtgcacgaaggcaaacttaaatacgagatggagttgacgcccttcagtgacttccatttggctcttgataaggcactcggcaaacatggaagccaaccaaagcaggttctcaagttctaagataatgcaaggacaacggatgagagagagcttgtattacaaaaacaggagtagaaaaaaggatgtaaacagtgcatgtgtgcgtggctaggggatcggtggcctctttcagtagtagttaccaggctgacttgggaagcggcaatatgttttgcggtgattgcagcggatctctgtccaataatggcggatcacttcacttgagagtagaaagacgtagtatatcacttcacttcaatccccccgcgcaatatgaccttgtgtggttgtaagttctgaagtggtattgattaccgtccgatctggagaaagaaagttttcactagattatcgtcaccgatt

SEQ ID NO: 17763 - DNA, 1371 bp, Oryza sativa
  ref <308>: DATABASE ACCESSION NUMBER: AK068188
  ref <309>: DATABASE ENTRY DATE: 2001-12-06
ggcatggcgctatcattgccggctcgccgctccctcgctctccccgcgccgcgccatcatcgctgccgcccacgattcgccaccgtccccgcaccacgccgccgcccctcgcctctccaccgcgccgcccctccaccagcagccgtccctcacaaatcgtcaccgccgtcatcagcgccgcctcgccgatctcctctgcgccgccgcccacgattcgccgccgtccccacaccgcgccgccgccgtccacgattagccgcctctccaccgcgccgccgcccctccaccagcagccgtccctgacaaatcgtcgccgccgtccccacaccgcgccggcgcccctcgcctctccaccgcgccgccgccgtccccactgcgccgcatcggcctccaagtctccgccgactccaccgagcacgacgagctcaacacgaagagctccaagagaggcccctctccttcctgctcgggtcggccggatctaggaggagcagaggcttcaccgtgggcttggtagggataccgtccagcacgacctcggccaagaaggcagcaggtctacgccaccttcttcccgtgctgatgccgtgtctgagccctacctcaccacaagtactgctccatttctctttttgaatcaccaccggttcttgatttctttgtgatctaaatattaaagatgtttattccattgattaaagatgcttgccattaggaaatatatatatattagctgcacgttgtgtagaactcaagaatgcttagaggcactccatgcatgggttgttttagctgcacatgtactgtccggctgttcaaatttgagctattttccagttaattatttaattaactcttaattatctgattcctcaaatattttccaatatagttattccttcaacaaaataattgacatatcagttacttcttgcgggtaacaaacccaccgccggagagcaccttttgttttcttattttcttatttgtctgccctatcaagtagcacgccatttcaatactctttattcttccagcagtgcacattattgtgccatttcatatgttagctctaaattcacatgtgttagctctaaattgacattattatacaacttccagcagtatatgtcttgctctgaatttgcatgtgttagctctaaatttaagatgcttgatatagattgtccttatgatgctagctgcaatgaccccattatttcaatgtaaaggggggggggggggcactttactattattgttttttgatgtatttaagacgatcaaatcctgtgcactgaatgttagggtcattcagtattattctttatcttggtgataatctgaaattccgaactgtgatcttctccc

SEQ ID NO: 17764 - DNA, 1735 bp, Oryza sativa
  ref <308>: DATABASE ACCESSION NUMBER: AK068189
  ref <309>: DATABASE ENTRY DATE: 2001-12-06
ggtaggcagccaactccgccgcgccgcacccctctactccatcttcctccgcgccatccccttcccgtcgtctttccgccgccggcgactctccgattcgctcgcggccggagtagcggttcggcggctccctccctccctctctactaaggtgagatttgcaacgagaaagatcgtttggcttcgctaggctccttcctgcctccgatgggatatatttttttttattcgctccgatgggaagttttagtccaaaacgaacacaaataaatgcaaccggtggtctatctctaaccctaacccaaatatgcgggagacaccgatctagatagatctcccaacagttgttcgtggtgggggagaagaagagctagggcaatccaatcaatctttagtaagattccttaatttggggggcgatgagtattcgtcggtttgtttatctggtgttggaggagtttgctccccgccgcagcaactacacactgcgcaacatagacatggagcgcttcttcctgccacgtccatccccggtgccattcgtggcgtcaggcaccgacgcggcggagtatgcgagcctgccttgcccagccatgaccttctaccctccattctccaagttgcctgggaaacagcagatggaattcttgctccttggaggcaatcataacatggtggtcgccgccgaccagacttgccgcactgtcctctatgaccccggcgagcacgccgtccgcaccttgcccgcccttccctaccaactggaattgcctactgcttccgtcactgttggggacgacctctatatccttgaccatgttgaggtcggaaacgtcccctgcttccatgggctcatttacgaggatagattaaatgaggactggtgctgctgcgctctcccgccgccgccgccactgctgtcccacaagtctgacttccaagtcgactcctatgcggtggttggtgacacggacatctggatatccacgcacgatagtggcatctattgcttcaacacagtgagccatgtgtggagcacagtggccaccggctggaccctgccatttgttggtctcgccgagtattgccaggagcacggcctttggtttggcctctcacacactagagacaggaggagcttggtcctctccgctttggaccttgatagcagccatctgccagtgcttctcagccttcctctggagttcacgccacccgatgccctcaagcttgtcagctcataccttgtgaacctaggctctgccaagttctgcatcgccaggttattccagactgatgaggaccagcgtgatggcgaggagctgtttgcagtgttgaccgccgtcgaggtggaacgctgcgatgacgacgatgctggtgccaatggtggagggctccgcatgctgaagcacaggtctgagatgtacaagctcaccagtgaaatgatgtattgggtgctttagtcgtgtgggactttagttattgccaagggcctcaaattactgaaccaaagcaatgatttgaggccctactttactcttcctgagctagatcaggaaggataaaggttttgtcatgttcaatagcaggtctgctgtatcgacacaataatacgataaaatggttttaaagggaatcatatgaatatgtgtccgatcttttgagttgtgtcgttgttgttatttgtaatcattttgtgatcagatatggcaataaatttatttcgtttcagtcg

SEQ ID NO: 17765 - DNA, 1721 bp, Oryza sativa
  ref <308>: DATABASE ACCESSION NUMBER: AK068190
  ref <309>: DATABASE ENTRY DATE: 2001-12-06
ggtgatgctctcgcacatcgattggtggaacagagtatcccggtcaaagccattagccaccatcccgacgtcttcctccatctcgcatatctctgcaatggcagggaatgcgtcagtgatgcggaggctctacctctctttctacaactggattgtcttcatcggatgggttcaggtgtcgtggtccatgatattggcattgttggagaacggatatgaggccgtctatgctgccgtagagcagcatctgctgttcgcgcagactgctgccatcatggagattcttcactccattgtaggtgagatatcctctttctttataaagaaaataataagtaataagggttggtgaggtctccagtgtcttctactattccacaaatcactggaaggttgttcatgatctggggcatcttgtggagcttccctgaggtaatatcaggaccttactccaagttataagaaggtttatatcttaaaaaacaagttttggattagaaagcacttcttagaatgatgaaacatagatgttaggtaatgttgcagctattagaacatatcccatactttcatttatgatcaaaatgactctaagtaggcattggacaaaccgaagctacagaaattgcttaagtaatgaagcggatgcaattacatcatggagaaggacaaaatagtgttcttttcctagattcctatttcatgtatttaacttctaatcaagtaattgttttatttataaacaatatcggtgaatcactgtccacatgttttgcagacacacactcatatttttgttacctccttgctcataagctggtgcatcactgaggtatatgttacttcctaaaacttctcaccaaattactcacttggaagatcatggatttcggatgcaattttattatagttctgcttcttgaaatgacagtagttgttgaagttcctgaaagaaaatcccaagctttgaaagttcctgtgttgagcttagttgaacaaatattatgaaattttcttcacttcagagcatgactttgtagacaaaaaattactaattccttgcaggttaccagatattgtttctatggcatgaaggagtcatttggatttacaccttcctggctcttatggcttaggttggctctagtcgtaaacaaatcataatatgtagcataaacttcagcgaattctcttaaaaatatgctgctgttacttccatactaattactttgcaggtacagcaccttcatagtatgccttcctgttggtacggttagtgaggttggcctaatctacattgttcttcctttcatgaaggcatctgggaaatactgccttaggatgcccaacaaatggaatttctccttcaactacttctatgcctctatctttttcatggttttgtatgccccagtatatccacgcttgtttcgctacttgatcgcccagcggaagaaggccttggcaaaagcaaaaaccacataactatactcaagagctatctactctgatttctgctcgcggctacagctcaggttgctaccgtttcttgagcaaataagtaaaagtgtattagaatggaaatgccgaaatacagactatcttttcccttggtaaataaaaatgtacacgagtaccattttcatgatttgctaatggtgtgtcctaccaaagatcggcttttccttctgtaaataaaattgtactccatatctgtgccc

SEQ ID NO: 17766 - DNA, 926 bp, Oryza sativa
  ref <308>: DATABASE ACCESSION NUMBER: AK068191
  ref <309>: DATABASE ENTRY DATE: 2001-12-06
ggccatcgcggctcatccaaagctatagcttagctctgcacacctgcagctcgtcgtcggcgatgggagcgaccatgcagctcgtcgtcggcctcgccggcgtcgcctcctcatccccccgcctcgcgccacactgcgccgtggccacggccaccaccaccagcagctgcagcgtcaggaaacagagctgcagctgctgcggcgccgcccatctgccacggcggctgcagcacaaacagcagaggaggtgcgggattcgtgtccgcgccgtcgagacggacgccgccgccggcggcgaggcgaaggccgcaccggaggagccgccgagcgtcgacttcgcgttcgtcgccccgcggctgctgccggacgggacgccggacgtgcactaccggacggcgtgcggcgggcagaagctccgcgacatcatgctcgacaactacatcgacctctacgggccttacgataagcttctgctcaactgcgagggaggtggagagtgcgggacctgcatcgtcgaggtagttgaaggcggtgaactgctttcccccaaaactgatgttgagaaggaattgctgaaaaggaaaccaaagacatggagattggcgtgccaggctactgtcggcaatccagattcaactggacagatggtcattcagcaattgccggagtggaagatacatgagtgggacaagtagctgaattttaactagcgctgctgtgtggcggcaatacagtagattaatttcaccgaccatggagaaaaagagagagagcctagcacatgatcaggagaagaaacattggaagacgattaatgctgtacatccaaactccatgtaaaattgtatacgtctcctgtagctaccaaatggtcagcatgagtgtaatcagggattgaaattcgctaatctcagacccccacaagc

SEQ ID NO: 17767 - DNA, 2200 bp, Oryza sativa
  ref <308>: DATABASE ACCESSION NUMBER: AK068192
  ref <309>: DATABASE ENTRY DATE: 2001-12-06
gttctctccctcaccctcttcctcaccatctcccgctcgcgccaccgccgccgcgggcgcgtccacctgcgccgccgcggccccgtccacctccgccgccgccgccttccccttgctccgtcgccatcgtcgtccccgtcggctcgcgccgcgcttctgcctccgcctccgcctccccttcgcggcaccgccacctccgccaccaccaccgccgtcgccgtcgctgagcaacgccacttccgccttttcgcctcgctccgccgtcgccgagcaccgccgtcccccgctgccgtcgccatcacggagcaccgccgccgcgtgcggatccgacctccatgcagtcggtgtgagggcttgaccaggccgacaggccctcacatccgccgccgcctcctcttactcccccatctctgggcctctggccgccatcgcacaatccgtctgtgcacgtgaacacgtcttcactcttctcggtctagcttcccccgctgccgcgccgtcgggcatcctctggtcgccgccgtctcttccttcccatggagcagatccacggtgcaaggcgtccttcggccaatctgttgcctcccttccccgcaacagatgtggaaggggcccttactttcaaaggttgaatttatcgtatgaatactgaacatcatcatgcagctgcttggaatactcaagaacctcctccatcacagcaaaaagggctctatgctcctgtaagcatgtagtagtcctagaacaaaatggaagcaacactgccagtggcttatgtgagcatgtgttgattcctggatggccagcctcttgctcgagctgctgtagtcccaggctttccagggaggagatgttagcagccaagctcaaggaaatcattatcgcaccgctttctcgaggtatttcatagctgttcaaaagtgccttggtctatactcagagaatggtcaatattgcactaatgttgaccgattatgcacattgtatatctcacttaaaaaagaatatggttggtcatctgctgttaagcgcatgccccttgatttcctgggaggagagaaatttcaggaggcagcagataattatgtcagacccctattaaccaagaaacgtagcattctggctggttgtcacttcttattccgggaactagaagatgcagtccagttatgaattcaatcattttcagttatggcttcgattcttaacaaggtcacccacctgatggctgctattcaaaaccatttgcaaagcctgttgtcaaggtaaagccgtaaaggatgtaaaacaacttctattctcgggccttggaatcgctgcgcgcacgtctttctctaccagcttctctatgatggctcgaacatctgctatgctgagattcacccagttagatgaagaagattttgctctcccacctgagattgtagccagctgcaatggataccatggaaaatatttaaccttggtcacacgccataacaaaccagtgaatgttaggctcgaaaaaagaggccagtcattctatatctgcaaaggttggaaaaaatttgttgagcttactggcttacgcgttggacaatgtattagattcagtgtttcttctccatcaacacttgatctcctcatacttgacaagcatggagttcccaagcttcccatgcctgcttcatcagaagaacacctcaggttcaaagcaaaaaggtctatacaccaaaacagcaaaggccattcatccagtcatggtccagagtcatcgtctcctatcaatcacaggatcaacaaatcagcgaacaccaaacccaagtttgcagatgatatcgaagcgcagatactgggagcccttcaaccagcatgatccttcacagatcgacagaccatcgttgcaacctaaaaaacggatggacaaatttcgccctcaacaatggcataaagctccacacagtatgcattttccatttttaagactacccatcgaggagcaaccgtcgatatcttctgaatatgctatcaatgtagtctgatctcattcttttgttagcggcaaagctcggtgtctccatacagtctgctgtttatgtaatatactgcccatgttataatcgttacccctgtgcactatagacacgctgtgggcactgcacttatcactctattatggcacttccatatgtagctactgatgcagacaccgattaacctc

SEQ ID NO: 17768 - DNA, 1619 bp, Oryza sativa
  ref <308>: DATABASE ACCESSION NUMBER: AK068193
  ref <309>: DATABASE ENTRY DATE: 2001-12-06
taggttcctccgggattccctccactccagttatcctatggtcttctgcagagggcttctttcgctcttcttcactcttctgctgtctttggtgaagtttttcatggctacatggctttttgtagatgtcaatatggtgcatgtcccaaaatcagtacgagacaggccctcgggcccgttttagttattcgctgcactcatttggttacgattcaggtatcactgcagcagccatgtacatagtaatgattgatgagatttttaggatgctcgggtacttcctatcaaggtgggcaaaactaatagccatgtgcaactttgtgaatttcagaaacagatggctgaaatatgtcattgtgaatacacctgccagatatggggaaagaactatagttatacaccagcatgccttcctgcaaacgttcagctcaagcatctcggggtggaaaatattctcttgtattttagaaagaaatcaaaatgcaagaatggtttggtcagaaggaaaaatgaatgacagtatggccaagaatgtgaaggcagcagtaattcaagcactccgctccatggatctcgagggtcatcttttgtcaagagacctccctttgtctcgtgtcagtgacagagcagagcgttattggttggcatgccttgcagaggtaccaacatgctcccgtgttattctggtctggcacatcgcaacaagcctatgtgagatcaagcttgccaatgaccataaaatcaacttaacaacaatgtcaagattatcatcgtttctggtggatgaaaaagctcttacaggtgagcttcaaaaggcatacacagtgtcaaattgcttatcatggtactgtatgtacctgctggcttcaaagcccaaactgcttccagaaaccattttgatgtccaagaaggcctttcaagatgctgttcagtgtgctcatgaaatgctcagtgattgtcactcctggcagagcatatacaacaagcttatgaaagaggcgcagaaagctcttgttcaaggtacgcatggtctaaatctgagtggaaacatattgcaacaaggtgctatactggctaatgaactcatcaagaaggaggaccaaaaatgtcgttgggagatcctatctgatgtgtgggttcacttgcttgtgcacattgctcccagttctgacgcagcagctcttgccgaggacctcaaatccggtgtcgagttcgtaaccgtcatctgggctttgttttgccactgtggcatcgagaagagcaaattatggcaacagcagaagagtgcaaatttcaggaacagcactcctggaccatctaatcagagcagtgatgtgtctacccatgttcaggacacagtcagctctagtccacctgctgctcgatcttcagaaattcatgtagaggctagtcctacttctggtatgtcctgaaacctgaattgctgatggctgatgctctgctcccctcatggtttcagttttgtcggtaaaatttgcatctcatcatgacatttgaacactagtatttgtttcttgtgtgaatgttttctgtgttgtgattgtaacaggggaatgctcttgatgcaatattatgtgttatgcactttttagagcgcc

SEQ ID NO: 17769 - DNA, 2091 bp, Oryza sativa
  ref <308>: DATABASE ACCESSION NUMBER: AK068194
  ref <309>: DATABASE ENTRY DATE: 2001-12-06
gttgcttttgctataagcagttgtagtgatgctgaaaatgtgttgaacaagctgcaggtgtgtcaagctccttttgactcaacaattgctggtaacattcctgatctttcagaggacaaaactcctgtgattgatgcaccaaaagatgcttctacaaagagcgaaagtgattttgctggtgacggttcatctcaacctttgtgcagcctgtctccgcaaaatgtaccagtattagaatcgagaccgctagaatgcgatggtttatctgcaggaacaaaggagttgcctgataacaatgatatctccaaagtaaaatcacagctagggtctgatcctgattgcagctctttgcctcctatgactgaacgttttgctttgaccgtaattgagaagaaacttgatgtttcacatgcctcagcccttgattgtgtaggtttgtcccagatggtttctacagatggctgtgatgggatcaattcagttcaaatgagtgaactgggatccagagtgaagcctttcacaagtaggttagtttctgaggaaagcacaaaccttgcaacagtaactgttttcaataaaagttctactgatcttggctggagcaatgataaacttgggcaaacatctcaacaaagcatatctgaattgaagaaccaggatcttttggatgttgattctggaactagtaaaattggacagtcaggtcacgacaaagttgaacatgtcaccaatgaattgagcatctccaagaaagctgcagatgtagatgatgatttggacctctccgattctcatatgaatgacaacccaggttcttctgatcgtggtatgtcccatgcccatgaagaagagggtgctgatgcaactattagtaataatctcacctgtactgacagtagcaatgcattaatatgtcgtatagatggtgcctgtgtagctccccctatcaattcagaatgcataaaaccatcaactactgacatggacagcattgccgattcacaatctgcagaacaaagctacctcgggaaggttctatcgaataattttatggagcactgtaatgaaacggaggcacctcatattattaaagatcttgctgggactggaaatattgttgctgaagaggatgattctcaatatgaggatggggaactaagggaatctggcgagtattggggagatgattgttatgaagaagttaaacctgccaattaccaggtgttagattgcaagagtgatgccccaggcatttctcccttccctcttggctccatgtcaaagaatacaggtgatcgagttgctaatttcaatggaaaacattccaggaatggaggtggtgatgtttcaccagccgcattgaagtgttcatggtcaactacctgcatagatgatggatctggaacgatgtgtgctggaagcactggtgaaaaggctcttagtgttcacttgagagttaatggggagactcgaatgtatgagatgaatccaggccatgtaatagctggatcttccgcaacagtcaaccagtctgaaagggtcaatgatggtttaggggacgatctttcaagtctgagaacaaagcccacaggatgggatatgttacctgaagatcagcggcattctcaacatgattcaagggacacagttgattcatctaaccggtgtgttttgagcacatcagatacagctggaggtggtgaatcattgcgccatatggagttatcaagtggagatatgcaaccacgagctgatcggccaagatcatttgacagagcccacataaatgagttatgcagatctgatgatggttatggctcaggttcaaaggctgaaagaaccattgatattcgtaaatcacatgaaagaggtggagcatcacgacatattcaaggtagcagccgggtggaacagtgggtggaaaattcaaacaattctcgcactacctggcgcaaatcacctgattattataattacggactgcctggtccaaggaatgctgcagaagctgctgttgcaaagatgcagagcaatggctttgttgttgcacctgatggcaccttggtaaaggcggttgatactgcaaatgct

SEQ ID NO: 17770 - DNA, 2761 bp, Oryza sativa
  ref <308>: DATABASE ACCESSION NUMBER: AK068195
  ref <309>: DATABASE ENTRY DATE: 2001-12-06
gagcaggttggaggtgtaaagagagaacgaaccatcaggaagaagacttggggacttggttcgaagtccacgcccgcccatcctcgccgtcgctgccgccgccggcgagccgccggaatccagatccagagagagagagccgccgcatccggtcgacatggagatcgcggtgggcgccctgtccggcatggtggacgctctgccggccaagctcggcgacctgctgcagcaggagtacacgctgctgtccggcgcccgcggggacgtcggcttcctccagtccgagctcggcaccatgaacgccgccctcctccggtgcgagtccctcgagagctccgacgtccagacccgggcctgggtcgcccaggtccgcgacctcgcctacgacatcgaggactggatcgacctcttcgcccaccgcgtcgacggcggcgccgccgcctctccgggcgctgcggccgccacctcctcctcctcctcctccggcgggttcctctcctgggtgcgctgctgcgtcaacaaggtcacgacgctccccgcccgccacgtcatcgctaccgagctgcaggagctcaagaaccgggtcatcgagctgagcgagcagcggaagcgctacaggttcgatccgccggcgcgtcacgccggcggccggagcggcgtggcggccgttgaccccaggctggttgcgctctatgctgacactagttccctcgtcggcctggatgcgccggtgaagaaggtgtccgagatggtggtggacgacggcacgactgggctcaaggtggtttccatctccgggatgccgggcgccgggaagacgacgcttgccacggcggtgctccggcgactcaaggaggagaacaagttccattgcagcgctttcgtctccgtcggtcagaagccggacattgtaggtaagacactgaagggcatcctctcccagatcggcaatgggtatgcaggaggcgaagatattggccgattgatcggaatgctgagagatgaattgaaggataagaggtacctcattgtcattgatgatttatggggtagaacagaatggtcaacactcaagtgttgtttccgagatgataatcttggcagtaggataatggtcacaaccagaaatgatgagttggcaaaggaatgttcttccaattcggatgaatcagtttacaaaactggtctccttagtgacgcggactccaaagatttattttccaacaaagcttttgggaaagggaaggattgtcctaaccatttgaaggatctctatgatataatcgtggaaagatgtgggggcttgccgcttgctatatctagcgtagctggcgcactagcacatcgtttttcaaaagatgaatgggagaggtatgaatctaacttgctacctagttcacattccgatgagctgaacttgaagcaaatacttaatctgagttacaacgatctaccttcacatctcaagtcatgtatgttgtatctaagcatattcccaaataaatatgaaattgatgtggagcgcttggtgaggcgatggattgctgaaggattcatcgctgatgcacgccatgcaagcaaagaggagacagcaagaagttaccttactgatctcattagcagaaacctgatccaggcattgcatctgagacataatggcaccccaagctgctacacacttcacccagtaatacatgatttcattgtggtcaagtccatggaagagaactttgtcactgttctagatgctaagaaagaagctctctccaccaacaatggcacagtccggcgactctctcttcaaaacagtgtcaaacaggatcttgctggtgcacgaaatgatatgatcaagcatgctcgctcagtgactgtctttggtcatgccaatggggtgcctcgcctgaatgatatgagcgtattacgtgttctggatctggaaggctgcaatggtccattatgcctcgatggcctctgcaaattgattcttttgaggtacctgaacctcaggggaactgatgtcagcgagctcccagcacaaattggggagcttaggtgcctggagacacttgatgtgagatctacgaaggtgaaagagctacctgccagcattgtcagcttggaaaagctaatgcatttgcttgctggaaatgctaagttgcctggcgagatcagtaagatgaacggcctactaacgttgtcatgcgccaacgtctggaagaacacagggagtgtcttgccagaacttgctgatcttgcaaacttgagggaattggaactgttttgtgatgcttctgaaatctctggtgataataagacacgagtctctttttctagcgacggattcaaaaggcttaagcagctgagcatccagggcagcttgccatcagtggcctttgttaacagttccttgcgaaaggttgaagttcttgagctgaagtacgaaaaaggcatttcagatgggtcaaatggtgtgtctggtatagagcatttgcctagcctgaagcatgtattgattgagttctcgcagaaggatgctggcgccactgcgacaatcgcttctgtgaggaacgccgctgagatggttcaccctaatcatccagatgtctctgtcaaagttgatggaaaggccatctgatacggtctggagtttgtttcagagcaagagggatatagtacacacttgcacggtactttctgccggatttctttgttgtgttgaattgagttttgagttaatgccattctttgtcactctgcttat

SEQ ID NO: 17771 - DNA, 1922 bp, Oryza sativa
  ref <308>: DATABASE ACCESSION NUMBER: AK068196
  ref <309>: DATABASE ENTRY DATE: 2001-12-06
gggcgcttcgatttgattttaggtcaatgctcgaagcaatttctcctcctcgatccttctagaagcccgaatcgaaaggctaaaaccctagaagcagatacgcttcagcgcgaaaccctaatccccaaatggccccaatggcgggcggcggcggggtaccgtggggggaccgggccagggtggtcggggcgcagatccgcagcaggttccgcgtcggcgtggcgcccgtggaccggcggtggctgtggcggcgcggggacgggcgcgtcgcctccgaggcggtccggcagtggacggaacgcgtgcggagcctgtggcagagggagaagagtacggatcagatctcctcgtctccggggacgtcccaggtggcggccgcggcgaagccatcatcgagtgctttgaggttctacagaaagaaagtgggcaaggaggttgatggaattgaagattctgttatttttcggtcgcttcaagcattggctgttcctcttattggcaatgcttgtcatatttttatgcatggcctcaactctgttcagatttatggtgcagagaaacttcagcaggcattacaggagagacctaaaggcaagcctctcctaacggtcagcaatcatgtggcagctatggatgatccctttgtaattgcgtcaattctcccaccatcagtcatgttggaagctcaaaagctgagatggacattatgtgcgagtgatcgttgctttacaaatccaattttgtctacattcttcaggtctgttaaagtgctacctgtttctcgtggcgatggcatctaccaaaagggaatggacatggcactttcaaagttgaacaatggtggatgggttcatattttcccagaaggaagtcgttcaaaggatggagggaaaaccgtcgctcctgccaagagaggtgttggaagattggtaatggacgctgacagccttccagttgtaataccctttgtccatacaggaatgcaggatataatgcctgtcggaaaacgtattccaagagcaggcaaaagggtgattgtggttgttggtgatccaatcagcttcaacgaccttatcattgacaacagcgatgaaacccaacacatctctagaggcattttgtatgacaaagcaacagaaaggattgggcagagactgcaggaactgaaagccgaagtcgatagattagcagcagagcagaaatctgaactccaacatcatcatgcccgtgatactgtcaactatggtacccgactgtggcagcaggttgattgggaagcatttggcatggagagttcaatgctgtcaccagaaccttcagacgtgcaagagccgttgaagaaagccaagcctgtactacacctggaatctgaacatgccaagcctgaactacacctggaacctgagcaagccaagcatgagctacacacggaacaatgcgttcctgcagctccaagtgccgagatctgctccaatttcggtgttccgctcttcttcagacagcacacggacccttctgagctcatggggtttgccgcccgtggcctgctcaagaatggcaggttcatggaggaggaaggctaccgggaattgcaacggcagggcgcaatgaacatgttttggggatctcaggccaacaatactgtactatagtgagcggccttactcatgaatgtggccgcgccctcctttgtacataagtttactgaagatgacacgccgacacgaattaggacagcttcttgtttctttgctgcatacagttttggaacaaacgaagtggacacaccttctttctcctaggggcaacttgaatggcatatgcatttcgcttctcaagaatcatataatacgcatggtttatattatcatgtaaacatggttacattctaaatcaagagcctcatcttttcgcttattctt

SEQ ID NO: 17772 - DNA, 4012 bp, Oryza sativa
  ref <308>: DATABASE ACCESSION NUMBER: AK068197
  ref <309>: DATABASE ENTRY DATE: 2001-12-06
gtggtcacactaacctgcgaagagtaacatacctcgtcctggatgaggctgaccgcatgcttgacatgggttttgagccccagattcgtaaaatagtggcacagatccggccagacaggcaaaccttgtattggagtgccacttggccaagagaagtagaatccttggctagacaatttctgcagaacccatacaaggtaatcataggatcacctgatctgaaagctaatcattccatacagcaaattattgaggtcatatctgaacacgaaaagtatcccagactcagtaaacttttatctgatctaatggatggaagcagaatcttgatatttttccaaactaaaaaggactgtgacaaggtcactcgtcaacttagaatggatggatggccagcattatctattcatggtgacaaagctcaagcagaaagggactatgttctggcagagttcaagagtgggaaaagtcctataatggctgccacagatgtagcggcacgtggtcttggtatggtgacttgtttgaaaattagaattaggttgtagttccaagtgctcaaggatgataagtcggagggctgtcagctgtttttggttgagtgaactgaacttgtggattgatggtgtatgcaaggtgccatcatgtcagaggtagatcgtcttttctcctgtttatttccctcgagagtaagcgatggcagtgttaccagggcacttcaacctaatgttgacatttagtcttggttaggaattatttgaaaattacttggcttttggtctttcactcttaggggaacttatcttcaggtagaaatatagaatcgatgagagtctatggccattatcattagcactatttttttttttcatctgttgacctctaaatttgttttgtatttttatgtttgaaaatttagagctctaggtgctttcgctttcaggcctgttaattttcctgcgctaaaattcatatggttatatgaatctattctctcctcaaggaattactttcttttgcatctttagttatttattattcatgtgttacttagttccctttttgctgtggacttgtgatctcgtagatctatgtgtggcttaacaacaatttcagctcgcatgcatgcatacatgaaaatgtctactaattattatttgtctaagtcactagtgtaaattcaactaaatttacaaatgaagtaatttagaagtgtggatctcgctgttatgctttcccttgttttccatgaatttttagaagtttatatgctgctattttaaacgtgtgccctggtcttatcactgccaactggtcccaagatgtttgtagagctattgcctactactgtattgttcttgacagtgtgaagtgtgatcctcatattgacctctgatgcagcaccttaagcattgcagcctgtgttggaattggttacagattttcattgggttcatttggatagttatggatactggtatgttattggataactttcagtattgtgagttaaggctgacagatcaatcaccatcatatccacatccaacagttattgatgcccagttcagtttttcagccccttcgacttgtattagttgtagaacttgaaagtgcatccatgggcagtttttgttcttcggctctggttcaagccatgcgctgacttctatggagatcgacaatgttgatatcccagtttggtctgctgtggtcttcagggcaaaagtattatcttgattacatactcatcattttcttgttatttttgcagatgtcaaggatattaagtgtgtgataaattttgattttccaacaactcttgaagattatattcacagaataggtcgaactggccgcgctggtgctagtggaactgcattcacctttttcacactctccaatgcaaaattctccaggaatcttgttaagatcttgagggaagctggccaggttgtgaatccagcgctagaatctatggctaaatctgccagttctatgggaggaggcaatttccggtcaagggggcgtggtgggtttggtaacagatctggctcaaatagcattcccataagaggaagaaggccatactgagggcggcaaaaagattaaaacttttactgtataccgataggtggaacatgtcacacgaatggccaaatatacttatccaacagcgtaggatatgtgttccaagtttagcttcgacttggagaatggtttgtccagtgttattttgactattgaggcaacgtcctcgtgcggtactggttattgtttactattgttgaggtcctccttgtggcatctccccaccaaaaagcgtcgtcctcaacctcaaacctcgcaattttctatctgttctccctaccaggcgctatttattcagattgagctaatcagccaccaaactcgcagaattgtggctgttttcttcctctccagcttccaatctgatcgttgtcagtgtggttattggagcagttgccatcgatcatggtcgccaagatcaagcgacagatcggcggcctctcactcctcgctaagcttggtttgcttctgctcgcgctgctgctgcttcttgctgctatcttgctgttggtgttcttgctcccgcgtcaccatcggaggccgttgccgccggggtcgccgccggtgaacgcctccgaccccgacaacatcgtggcgtttgatttctcgccgttccttatactgtacaagagtgggcgcgtccaccggatggatgggacggaccgcgtccccgccggcgtcgacgaggccaccggggtgacgtccaaggacgtcgtcatcgaccggagcaccggcgtcggcgcccggatgtacctaccgccggcgaaaggtgcggggaagaaggaccttgccggcgcgctgcccgttcttgtgttcttccacggcggcgcgttcgtcatcgagtcggcgttcacggccaagtaccacgactacctgaacaaggtcacggcgaaggcgcgcgtcgtggcggtgtccgtggactaccgcctcgcgccggagcacccggtgccgacggcgtacgacgactcgtggcaggcgctgaactgggtggccaagaacggcaggtccgggccggagccgtggctgcgggaccgcgggaacatgtcccgcctgttcctcgccggcgacagcgccggcgccaacatcgcgcacaacatggcgatgcgcgccgggaaggacggggggcagcttgagggcggcgtggccatcaccggcatcctcctcctcgacccctacttctggggcaagaaccccgtgggcgcggagaccacggacccggcgaggcggcgccagtacgaggcgacgtggtcgttcatctgcgacggcaagtacggcatcgacgacccgctggtggacccgctgtccatgccggcgccggagtggcggaagctggcgtgctcgcgcgtggccgtgacggtgtccgacctcgacgacttcaaggagcgcgggaaggcgtacgcggcggcgctccgcgacagcgggtggggcggcgaggtggaggagtacgagaccgccggcgaggtgcacgtctacttcctcgacaagccctcgagccccaagtccgccaaggagctgaccttcgtcgccggctacctgagccacgagtagcagcagcagcacaacggcatgggtgtcagattggtcgcagacttgcagtacatgattgattgataattactcattagtggagtaccagctagtacagttgtctacatgtcttcttgtcttgtgcatctatagatttctccattgtttgatcgatcggtcatccggatccagttcatgatgagtacagtgaaattgctggggattttgggggaaagttggatgctttccgtgcctgcagtgttcagaagaatcggcaggggagtgtaagtttctccaaagtgagtgcagagtgcagtcagaggattggtcaatctcgttatcttgtggtgaccgggtgacgcatgccgagcacccagtgcaaatattttactgt

SEQ ID NO: 17773 - DNA, 1277 bp, Oryza sativa
  ref <308>: DATABASE ACCESSION NUMBER: AK068198
  ref <309>: DATABASE ENTRY DATE: 2001-12-06
gagaggcgagcaacgagcgggcggcgacgggggacgacggggcggagagaggaggaggaggcgacggcgcagaggattctccggcgccgcccgccctcccgcacgctcgcagctcgcagctcgtggcgccgtcctccccccgtcgctgcccgccgcccgccgctataccatcccattcttgccgcccgggaagacactcagcccaatcccatgcgcctgtacagttgtgcgggaggagcaagggccaagagcacggcacctgcccctcggcatcggacacgctggcctcctcactgctctctccttcttgtgcttgtgcaggcaggaggcggaggctatgtccaattactcccttttgtgtgaatactattgggctaggcccccagaagctgggtgtatttttaagaggattgtatgctgcaggtgcagcagccatggaggatggaggcagcagagactctgatcatggcgtggagacgtcgtcgccgccgaagctgtagggagcggagctggagcaggtggtgctggtgctgctgaccttggaggcgtcgtactcctggctgaggcagcgcagccggttgagctccggcaagatctccttcccgaggtccggccggtccttcttcctcagctcggcgcaccgcagcgccagcttggcgaacaccaaggcctcctccaccggccagtcggtcaccatcgggtcgagcacctcctggaaggtccccctctcgatggcgctctcgacgtggtgggtgagccccatgggcgacctcgccgtgatgatctgcagcagcaggatccccagcgagtagatgtcggacatggtggtcagcatcccggtctgctggtactccgggtcgatgtagcagaaggtgcccgccgtcgaggtcatccggtactgcgtggcctcggcggcggcagcggactgcgggacgaggcgggcgaggccgacgtcgctgatcttgctgacgaagttgtggtcgaggaggatgttggccggcttcaggtcgcggtggaccagcggctcgggcttcgcctggtggaggaagaggaggccggtggcgatgtcggcggcgatgcggaaccggatgttccaggggatcggcagcgtcttcccccgccggcacagccggtcctccaggctgccgtagtccatgtactcgtacaccaggcacccgtactccgggcatgctcccagcagcagcaccatgtttggatgcctcatgcagctaagcacttctatctgaacaacaaaataaataaattacaacttattc

SEQ ID NO: 17774 - DNA, 1538 bp, Oryza sativa
  ref <308>: DATABASE ACCESSION NUMBER: AK068199
  ref <309>: DATABASE ENTRY DATE: 2001-12-06
ggtgctactatatgcttattagtatcatcagttcatcaccaacctctctctcgtcttcttctccctcttcttcttcttcttcttcatcttctacctttgatagtttgattgaggtgttgttcctttgagtgcagcaagaagctgatgattttgatgatagcttaaggatcttgccaaactcttgtgttgggagtagttgcttgcagatcgagctgcaaaggtcccattttgcttctccatctgagcttggttaggttgcgtctgagtacacttctgaggcttctttggtcgttttggcctcgagctccgttcttaaactctgcctcgatcgatcgatctcatctcatctgcgctgttcttgttgctgttgctgttcaattttgagaagaaggtgccgatcgagttgagccgatcgggttcagtgaaattcacttgcgtttttgagagaattgtttgagttggtttcggttcttgagatgttcctgagatcgaaggtccaggagatgatcctgaggaggaggtccagatcgatgaacagcggcggcggcggcgtgcagcagagccacctctccggccagcacgcgagctcgacgacggtttcgtgcgacggcggcggcggcggcgccggcggcaagagcgccaccgcggcgtgtgcgttgttggggtctccgaggctgctgcactgtgcctcgctgccttccggcagccacgccaagaacggcggcggcggcggcggcggcggcggttcggagcccgagacgccgtactcgatgagcccgacgtccgtgatcgacgcggcggcggccttcgcgcccagcccggacgccggcggaagcaagcgccggccgtggtgcgactggggcgccggcacgcacggcctcgccgacgcgctcgactgcaccggcgacgacgacgacggccacagacagagcgtcctcgccgccgcgtcgcgggcggtcaagctgcaggcgcaaccgcagcagcagcatcccctgctcaggtcgtgctccctcgatcgccgcgtcgagttcggcgtcaagaacaagagctcgtggctgccgcttcgcgtcgccggcggcgaggcggcggcggcggcggcggagtcaccggcggagatgcagatggagccgtcatcggaggactacacctgcgtcatctcccgcgggccgaacccgaggacggtgcacatctacggcgaccgcgtcgtggagggcggcggcggcgccaccaccgccgtagcgctcgccggcgagagctcgccgcggccgatcaatttgccggcgccggcgcgtgaagcgagaggcttcttgagcttgtgatgcagtgatagatggtagcttgattaatgatgcttaggtaaagtttggtgtgaggacaattaaattaaatctgagtcttaatgctgtcattattattattagtatttttattgtattggttgtttgttcgatcttgatgatcagatggtcaagtagtagtagatgctttcttgatcggatcctcaaattttaaatagatgctttcttggtcagatgatc

SEQ ID NO: 17775 - DNA, 1031 bp, Oryza sativa
  ref <308>: DATABASE ACCESSION NUMBER: AK068200
  ref <309>: DATABASE ENTRY DATE: 2001-12-06
gtctcgaacgcgtcacgcccaccgctcaccacgtgttcgacgcattgcccaaccctctcgtcacgccaagctcccgtgatcatttctttttccgcgtgcatgtggcgctcgccaagcgcctcgtggaggcctccttcgcggaccgcgtcttcttcgccaacaccggcacggaggccaacgaggccgccatcaagttcgccaggaagtaccagatggtggcgcgccccgacggggacgcgcccaccgagttcatgtcgttcaccaactgcttccatggcaggacaatggggtcgctcgcgctcaccagcaaggtgcagtaccgggagccgttcgcgccggtgatgcccggcgcgacgttcgccgagtacgggaacctagaggaggccaagaaggtgattcagtccggcaaaattgctgccgtgttcgtcgagcccatgcagggcgagggtgggatccatagtgccaccaaggagttcttgcaggggctgcgggatgcttgcgatgaggctggagctctcttggtttttgatgaggtgcaatgtggtctgggacgcactggttacctctgggcgtatgaagcctatggagtagtacctgacattatgaccttggcaaagccattggcgggtggtctccccatcggtgtagtcttggtcaccgagaaggttgcttcagcgataaactacggcgaccatggtaccacattcgggggaggccctcttgtttgccaggctgcattgaccacattggacaagatccagaaacctggcttcctagcagaggtggccaagaaaggagagaacttcaagcagcttctcagtaccaagctgagtggaaacgcccatgtgaaagagatccgggggatcggtctcatcgtcggcatcgagctcgatgttccagcgggtcctttggtcgatgcatgcttggaccgcggtgtcatagtgctgacagccgggaaaggcaatgttgtgaggcaatgttgctgattttttacagagtgaaatatatctcatcttcctgcttgctccttc

SEQ ID NO: 17776 - DNA, 1095 bp, Oryza sativa
  ref <308>: DATABASE ACCESSION NUMBER: AK068201
  ref <309>: DATABASE ENTRY DATE: 2001-12-06
gctgaacgagtcgatgggggagggggacgccgcctacgccaagcgcgtgctgctcaccgccgccggcgacgacgtctcccgggggatcgcctccaccctcgccacccatggctgccgattggttttggtcggcgacgagggcgccctggctgggacggcggaggaggcgcggcgcggtgggggcggaggagatgcggtcgctgtggtggggctggatctccacggctgcgacgaggcggccgtcgacgcggcggtgggcacggcgtggcgctgcttcgacggcctagacgccatggtgaactgctactcctacgagggtgaagtacaagactgcctcaatataagcgaagatgagttcaagaagacaatgaaagcgaatgtaatgacaccttggtttctagtaaaggcaattgcaaagcgactccgggactcagaatccagttgtggagggtctgttgtattcttaactcagattattggtgctgagagaggattgtatcctggtgctgctgcatatggtacaagtttaggtgccattcaccaatttgtccgggctgtcagcaatggagctgggcaagcacaagatgagggtgaacgcggtgtgccgtgggctgcacctgggcgacaggttcccggtgtgggtggggaaggagaaggcggagaaggcgacgggggaggtgatgccgctgcggagatggctggacccggagaaggacgtggcgtccacggtgctgtacctggttggggacgagtcccggtacatgactggcagcaccatattcgtggatggcgcccagtccatcgtgcgcccgcgcatgcgctccttcatgtagatcatcacatcaccgtacgtgataataagcaactactagtaatagtagggagatccataacaataacaaggagagctccatcatgggtttctgctctgtagctgtgtgttcagatgaacaatttgctgtctgtaatgatcgagaagacagtacaaagttgtgttctgagattagtatgtacgccgcaggcaacgtgccatgatctgagccttctggtatatgtacgatctcggatacgtcagctcttatttgaaaaacaagc

SEQ ID NO: 17777 - DNA, 2092 bp, Oryza sativa
  ref <308>: DATABASE ACCESSION NUMBER: AK068202
  ref <309>: DATABASE ENTRY DATE: 2001-12-06
gacacgctgctctcgctgccagtccgccacccaccgccgcccaccgccgagcggcctccccgcgcggcgaggccaaaccctcccatgtccaccccggccggcgtggcgccccgccgctcctccaggctcgcctccagcgctcctccgctcggagccggccagccttcctcctccccacttcctcggcgccgccgccgccgcgcttcgccgtctggctgcgccagagaggttgacaactcgcctcctccggtggtcatcttagatgacaacgaaatggagcagcatgttgaggcagaagaaatgaagaagcaaggggaagagagtgtggaggcaaatgaagcagaggagaaggacaaggatgcggaggtcttagaggaactacctgattggcttcctgatggttggatcatggaggtacgttgtggcgacaacggcaacatctaccggtattacacttccccggtgtcaggatacacattctctacaaagatggagacactacattatcttttttcggagatggatgagcgtgtgatggagtctcaggcgtgcgccgatgacaatgagcttcatagaatgcacacatggcttccagatgggtgggcaattgaagtcagagctgggggtaagaagatggaaaaaatgtacaagttctatgttcatctgcctactggaatgcggttcttgtcgaaagaaaatgtactgctctattctaatgaggggaagatttccagatgtgatgtaaagggtttgtgtgatacaagctctgaagataatattcttgcaatggtagaatttaatccagatgggcttccagaaggatgggtgaaggaaataatatttagaaagtgcaatgatggaattaggaaagacccgtattatactgatcctgttagtcgtcatgtattccgcacactcaagtctgtaatcaactaccttgaaactggacaaatcactaaacatgcctatattccgaggagaagcgttactgatatgtactcttttgacagcctcaaagtatgctgaaaagactgaaaatacaaggaaaagcaaagaaaaagtctgtaggagcatcggtcaaaggcaagaaactatctaatggcctggcatcaaataactgtatgtcttctgggttggatcctgaaatcgggccagaagaaaggaaacttggaactgttaaatccataaccaaagaagcagttaactcagatactatcaagcgatcaagaggaaggccaccgaaaaccttgatgccaactattgaaagcaccaaacctgagattgcattagtcacgtcagaggctatcaagagatcaagaggtaggccatgggaaaccatgatacaacttatgaaagcattaaaagtatgaaggttattggtaaaacaacaatgaactcaggtcatagcatggctaaacagggctgtaaaatttgtatagcaaagataaggactaaaagcagtgaacagcgaagtcaagcaaagaaatgccctatactagaggtagttaacaggaaaaaagtggagcgaattaaattaagaaatattagatgcaaataataaaatgtcacttggtgcctgtcccaatgcactttttatgaccaatagaaagtttaaaagcactaagaaaatcagaaatgttgtggttttgaagcacatgtacatcgaggatgctttattacaacaactattctgtttgaaagctgacaagtgaaatgaacatctctaaccaatccctcattaactagttattttttgtcatgctagtgtttctctgttgttataatcgccataacatctttgtcttgtgctattaaatataagctgattgctgctctggtcaccatgtgtgctgcatgtgacttggagattcatatgtagtcctgattattccatcatacattcctgaactttagttagtttcttgcagtacgtatcatgttgttgtggagatcacacagaatggtgggatgtcgccatttgttgtgtgatctgccaatgaatgttttcctgcttttctggttttatttccctgtagctgaactgaaatgtttctagtaatggataggggatgagctttgctcttctgtttcc

SEQ ID NO: 17778 - DNA, 3041 bp, Oryza sativa
  ref <308>: DATABASE ACCESSION NUMBER: AK068203
  ref <309>: DATABASE ENTRY DATE: 2001-12-06
gggttttaaatatttttttaatcgtatccaacttctctcctccagtcctctccctcccgtagaccgtggatatcgtagaacaaacggaagaacacgagaagcctctcgaagcttccagaatcccgattccaccagattcctccccccccccccggagccctaattctctcgcgcggttcgtcccgcgacctcccggttcctgccaatggccgacagggagaaggcggaggagacggaggaggagtacgagagcgacctcgacgacgcgcccctcccggcggtgcggcgccgggacgcggcgagcgacgacgacgaggaggaggaggaggaggaggaggaaggggcgaggccctctccgcctacgaaggccggatccgacgcggaatccgacgggcaaggcgccgccgaggtgtacgacgacgacgacgcgtacgaagatgacgaagggtacgaggaatacggggaggtgtacgaggagttcgagcaagggcgaggcgttgcgggcggagtggccaccggggcggtggccgcagcgggggaggaggcggggatgggtatgaagggggaagcggaaggtgaggcgtcggcggcagcggcggagggagaggaggggaagaaggggagcgagccctatgccgtcccgacggctggcgccttctacatgcacgacgaccgcttccaggaggcccgtggccatgggcgccaaaggagaatggtgggtgatagacggctgtggaatgctaaagaggatcaagcgtgggtccatgacagatttgatgaaatgaatttacatgatttccataatgactacacaagaagaaggcccagaggtcgatttagaggacgtggtggtgcacctgttggtaaagttcgtggtggtagccgtgataatttcagaggcaacaggtcgcagacatactatcgtgatggtgctaagaactacatatacgttccgaaagaacctcatagttaccatgataacaccaagaaggttcaacaggttctgaatgataatggcaagaatagaaccatcaaaccacctaatcctcgtgatggcgatgccaacaatttcgattttgttcgaaaagagtctcgccctctttatggcaatgccaaaagtaataagagtgcaccgagagtagttcgaggaagaggctctaaacgttaccaaccacattggaggagtaccgctgagatatcttcagagcataataataaatcacaaaatcttgaaaacacttcttcaaatgcaaacttgggaaaacaccaacatcaagcttcaaattctcaaccagaacgaggatttccgatgaagcagagctttgcatcaaatttgaattcagcttcacctcccttttacccttctaggccatctcatcaggaactcccagtgagtcagaggggggatggacaacccagtaccactactagacacttctcatcccccattggtatggagcatgtctctccaaccccacagtatggccctctcttaagagggaaagcctttgtaccgtctgctgggcatggcaagttgcatgctgaagttcctataaagggcatggatcatccttcatttcattcatctacatcatcatcaactagtcaatttcctatagctaatcaggtcactggaaattcggctaagtccccacacccaattgtccaacaaaggttggttcaatcatttaatcaatccacaccaaagatgcctggtcagatgtttgctgcgcaatttgctagcagtgataaattgccatcttccatgcaatctacatcaacaattttgactgaaggcactgaaatttcttcacctcatggttccaacaaatctaatactagattgatggcaaagggacaacatagtgaccagggagaagaacatgcttcttttatgtatggtggagctcaagttcttgggactacaggatcacttggtgaccaaaatttccatggaacccctgcactatttccagttatgcagtttggaggccagcatccaggtgggactggcgttccctcaattggcatggctctaccaggatttgtgtctcaacaacatcttggtctgagcaattctgaaatgacttggctaccgatattggctggtgcttctggagctttgggagcaacgtatggttcaccttatattactgtagatggcagctattatccccgaacttctgaacatgcatcttcatcagtttctttgagagaacccagtgcctcttctcagttgaagtcacaagaaataactgaggctttaaatgatgaacttagtcaacgccaacataaacctcggagatattcggaaatgaactttggcaaatgaacatagtgacgatggtgttaatgaggacttcatctgttagatttgggtctgtgcaagacttctatctgcaaggcctttctgggtccttgcaacacttcagtgtctgatctgtagcactttgggctgtatccagaatgaatgccagggtgttgacagttgaaggtgtttatatccttactatagtcatttgcagtgattattctgatgggcagttgctattgtgtaattaggtgagatttacatggtacaccgtccatgttgctattgatcatcttcacattggcatgcatatatgaataatgcgcgatggagaatacgtgaggtctctgttattgtaagctccttttcttggtgaaagagggggaatacaaggtggtgttgggtttgcttgtgttgctcagctgacttgatcactgtcggttaatccgttatgacattttgaagatctgctatgtgatgtgttccctttgctgaagatattgtcgcgatatactagttcggtacgtgttagtgttacacagagttctttctgttcagttcatactacttgtaactgtgtaagcaccaggtcttctgaattactacaattttaccattggtttccctttatagtggagtatgatattaacaactactacgtagaaagatgtaaaagtgagaaacttatgtgaatgttgtacatgcacgtcttataaaaaaatatttattt

SEQ ID NO: 17779 - DNA, 1389 bp, Oryza sativa
  ref <308>: DATABASE ACCESSION NUMBER: AK068204
  ref <309>: DATABASE ENTRY DATE: 2001-12-06
ccccaattccagacgccaacgcgaggtcgacgaaggccacgtctccgactccggctcgatttccaccccccccaaatcctcctccggcgagcggccggccgcgagacaccccggactctcccgcgcggcgattcttcggtaccccgatcggaggaggaggcggcggggagggaggaggaggatgagcttccaggacctggaggcggggaacgcccgcgggctgccgcggaggggcggtggcggcagggcgggcgccgcggccgccggggcgggggcgtcgcaggccgtggcgtcgggggtgttccagatcaacacggcggtgtcgacgttccagcggctggtcaacacgctcggcacgcccaaggacacccccgacctccgcgagaggatacacaagacacgtcaacacataacacaactggtgaaggacacatcggagaagcttaaacaagctagcgaggctgatcatcgtgtcgaagtcagcgccagcaaaaagattgctgatgcgaagctagcaaaggatttccaagcagttctgaaagaatttcagaaagctcaacggttagcggtagaaagagaagctgcttatgcacccttcatttctcaagcgggcttgccacaaagctataactcgagcgaggtgaacaatggtgctgataagttggctgagcaacgcacggcgcttctagaatcaagaaggcaagaattagtcttcttggataatgagatcgtgttcaatgaggccgtcattgaggagagggatcagggaatacaagaaattcagcaccaaattactgaagtaaatgaaatcttcaaagatcttgctgttctagtccacgatcaaggacaaatgattgatgacattgacacccatatcgagaatgctgttatagcgactacacaagcaaaaggccaactctctaaggctgctaaaactcagaagtcgaactcttcgctgatatgcttgttgctggttatattcggggtggtcctgctcatagtgataatcgtcctcgcagcctaggcagcagcctggaagaacatgggactcctagatctggttgagcttagagcgaagtattccttcctgatttaattttgctgtgaagtcgggaatgtatcctgatctcctgcctggaggagggggttgcgttctggtcttgtgccatggtggtgtatgtgatgatgaatggtgtgtctggaatgcatggtttatatataagtaattaagtataatcgcttggtgtcactctagtgcctcctgccttgctcgctcgcccctgtttatatcttgtgatgtatcgttgagtgagtgttgtaagaacgaggagtttggtctttgcattataatagttgcttaagttggtcagtaaccgtcgcaatttgttg

SEQ ID NO: 17780 - DNA, 535 bp, Oryza sativa
  ref <308>: DATABASE ACCESSION NUMBER: AK068205
  ref <309>: DATABASE ENTRY DATE: 2001-12-06
gctttttcgttggagaggcggcggcgcgaaaaatccgaagctttcgcgggaggagctagggtttgtgtgtgtggttgggcgcgcggcgagcggcgggagatgtcggcgtacgacgaggtggagatcgaggacatggagtggaacgcggagctcggggcgtacacgtacccgtgcccctgcggcgacctgttccagatcacgctcgccgacctccgcctcggggaggagatcgcgcggtgcccctcctgctccctcttcctcaccgtcgtctacaacgaggaggacttcgccgacgccaaggagcccccgcacaagccggccccgcgccccgtcgccgtcgcctgaggcgcaggatggaatcaggcttaactaaaatgagaaaacaaacgggagcatttgtacttctaagatgagaaagtagttatatcgacctttggcttttgaattcactatgtacggagttaccaaaaaaaaaaaaccacaacgtgttgacggggcattatgaataactattgcttggagattttgctgttgc

SEQ ID NO: 17781 - DNA, 1362 bp, Oryza sativa
  ref <308>: DATABASE ACCESSION NUMBER: AK068206
  ref <309>: DATABASE ENTRY DATE: 2001-12-06
ggcttgctctgaattttgcttatgccgggatattttgatgctctcacgcaaaaagctgaatagagtattttcaccaaaaaaaaaaaagaggagccttaggctgaaatctgctataactttggaggtactaaaacgagtctgagatgggtgtgattagtacggtgcttggtttctctgggtttggctttggattctccgctggtattgtcatcggatactacttcttcatctacttccagccaactgatgtcaaggacgtcaaagttcgcccacttgtcgaatatgactcaatatcgttggacggtatccttcctgaaattcctttgtgggtcaagaatcctgactatgatagaattgattggctgaatagatttttggagatgatgtggccttacctcaacaaggcgatctgcagaactgcactggatattgcaaagccaatcattgaagagaacaggaagacgtataaactagaatctattgagtttgaatcacttacattgggtagcttaccacccacctttcaaggaatgaaagtgtatgtcacagaagaacaagaattgataatggaaccatctcttaagtgggctgcaaatcccaatgtcactgttgttgtaaaggcttatgggttgaaagcaactgtccagattgtggatctgcaagtctttgcttcacctcgtattactctgaagccattggtccctacatttcctttcgcaaaaatccttgtttctctcatggagaagccacacgttgacttcgggctgaaacttttcggagcagatttaatggctatccctggtctttacagatttgttcaggagaccataaaaaagcaagttgtgagcatgtatttgtggccaaagacattggaagttcccataatggatccctcaaaagcttctaagaagcctgttggaattctacttgtgaaagttttaagagctcaaaacctgcgaaagaaggatctgttgggtaaatcggacccatatgtgaaacttaagatgtcggatgacaagcttccgtccaagaaaacaacagtgaagcgtagcaatctcaatccagagtggaatgaggatttcaaatttgttgtgacagaccctgaaactcaggcactggaaattaatgtctttgattgggaacaggttggcaagcatgagaaaatgggcatgaacaacattctgttgaaagaacttcccgcagatgagactaaagtcatgactgttaacttgcttaagacgatggatcctaatgatgtacaaaatgagaagtcccgtggtcagcttactctggaggtgacatataagcctttcaaggaagaggatatggagaaagaaggcatcgataatgctgatgtggtgg

SEQ ID NO: 17782 - DNA, 1901 bp, Oryza sativa
  ref <308>: DATABASE ACCESSION NUMBER: AK068207
  ref <309>: DATABASE ENTRY DATE: 2001-12-06
ggcaggcgcgctggcggcgctcgccgccggcgagccatcgtctcatcctcccgtcattagttggctgtcttcgagttgtagcagttttgctttttgtctcttctcttcgcatcaaagcagcagcaacaatcgcctcctcctgctgccgccggcctagccaccggctacctcgtccatccgtcgtcctccgcgaccgatcccgttgcagatctcgcggccggtggcggtcgtcgtcgtcgtcgtcgtccgttgtcatatgtcgcatcaagtcatcatgttgtggctgccgctcgttgcgtccccttcctcgtcgtcccgtcctcaagcctgtcaagcagcagtcaggagcatcgtccttcctcatccccacgcatcagtgcgcgctgccagcggcaaccccgtccaagccgtcagccctgtcgtccccgccgcggctcgtcgtcaatcgcgaagccgtcctcaccagctgtcgtggtcgtcgtcctcgctccaagtcgcagcgctcgtcaacggcatctgtcgctgccgctcgtcgtggcgtgcatctcctcaccagctccacatctggccccccgcatctgcctgttgtgaccccttgcccggcgccggtcctctccgccaatcaggcctcgtcacccgtttgtagcagagcaagcagctgccgctgccggcagatccttcattcttggctgttgcctgtaaactgcacaagtccatatgctgcacacaaggtgctcgacaaaatgcttcaaagagttgctcccacagtcatgcttttgcctttccaaatttgtgctttactgaaagtattcgtggtctctcattaccatctcctgaagaagctgtccatcttcatcagctactgctctctgctaccaaattggatagaattaatcagttaatctgcaattccttggcagccacaattatgtcttttgctagcatatcaatgtcctctacaaattgatttcctttgtttcctatgatcctatctagtttatccatgaaagtcttgctgcatatctattagtatcggtgtcatttactagttgccattcagtccatccaagtccattgcatattcttcaatccgtcgaagccatgccaatttatctccagcttcatatcagctctccgtcggagttggtctatcacttcaccagctccacattggagctggtctgtcatatcaccagcttcccatcggagttgacatcatcatcaatcaatgaaggaccgaagaacaatttgtgaaggtccttcatcatcaccatcatcgtcgtcatcagatctatgaaggtccgaagaacagtttgtgaagggctttccatcattgtcaacatctctgaatcaatgaagagccgaagaacgagttgtgaaggcttcaaggtaccgagggccgaagaacagtttgtgaaggctccgaggtccacttcattgaagaggagatggatctttttcttcttcatcgtcatcatccaagaattggcacactttgacgacatcatcaagactttggagataggctaatatttagtttgtgtcctagtgtttagtttacccttcaaatgcaatgttattgcatacacattgcatttgagtgggggtgttaagtgtagtagtatgtcaagggtattagagtactttcccctctcttgtgttcccctctctgaaattaacagttacctcactccgacgacggtggtggtaatggtggttcgttgccggatttgcttgggggtttgggtgcggaggagcgacgacggcggcggaggtttgggtatggtgtgttcgtcgtggggtgcggggatctcgtcggtttcttctcgctgctttttccgacagcgagccgaggagaaatcctcgctcttctgctctatgcaattttacgcagttgtcgc

SEQ ID NO: 17783 - DNA, 1183 bp, Oryza sativa
  ref <308>: DATABASE ACCESSION NUMBER: AK068208
  ref <309>: DATABASE ENTRY DATE: 2001-12-06
gatagcaggggagtggctcagcttatagcttaaaccatcagagctgcaaaggaaattaagtaccaaagtactgtactgtactgtactacagtttcaagccaagaaaggcaagacttgtgagagatttttgtgcaaagcaagatggctaagcaaagattgttgtgaagatgcccatggataccgagaggaagaagaggaaggccttcaaggccgcagttggcatgacaggcgtgacatccgcctcgttggatggagacaagctcatcgtgatcggcgacggcgtggaccccattgcgctgacgacgatactccggcgcagcctcggccacgccgagctgctcagcgtctcctccggcgacgacaagaagatgggcggcggcggcggccacggcggcatgggcatggggttcggcggtggccacggcggcatggggttcggcggcggccacggcggcaaagaaggcaaggaaggcggcggcaaggtcgtcgtcgacggtgtccaccaccaccaccaacagcagctgcagcagcagcatgcgatggcgccgccgatgcagccgtacccggcggcgccggcgtactacaacgccgccgcgccgtcttaccccgtctacccctcctacgctggctacccgcagcaagaacaggatcctggctgcagcatcatgtaaaagattgtgagtatcaatcagaggagctagaatctggcaaaaactatggagaattattaaggtatttgagttcagaatcaggccaaggtttgtgcatggcttgaggtggatcatgcaaggtcaggccaagatgatccaagaagtttgcgagtttgatctttgatgagctgcatcatcgatctgatctgcaaaggtggtgaaaaaaaaggcaaaattctgtcgaatgctgcagctgaagaagtagctttctgttcatgcttttttttttaaatgtgaagcactagtagactagtagtagtgttttcaattatcctttttctttctgcgagtatttagtgttattatccgaaatagaggttgaaataaagagcatctgtacattatgcactcagttttttctctgaattttatcagctttcagagaagtgctgaagatttgggacttgtcgtgtcacctcgtgtatattgggtttggatgtttttagttaggaaccagaggtctttctgcttat

SEQ ID NO: 17784 - DNA, 2574 bp, Oryza sativa
  ref <308>: DATABASE ACCESSION NUMBER: AK068209
  ref <309>: DATABASE ENTRY DATE: 2001-12-06
gggaccgcatcactctccttctccccccccacgcccagatccagatccacccggcgcggcggcggatccgtcgaggaataatggcttccccggcggcggcgccgccgcctaccccgccggagtccgacccgcggctcgtggaggccttcgtgcccttcctcgagaagctcatcaaaaacgcctcgtggcgcaacaaggcgcactccaagctctcccacactgccaagtccatcctcgaccgcctccagaacccgccgccgccggcggctgcggcgcaggcaccgtccacgcccacctcccccacgacgcccacctcgtcgtcctcgcagccgggcccgctccgcagcctctcgctcgcggactcggagctgctgctcggcccgatcaactccgcgctcggctccggcagcgccaagctcgccgaggccgggctcgagctgctccacaggctgatcgcgcactcctacatccatggcgaggccgacccgtccgccgacccctcggcccagctcgtcgcgtccctcctcgatgccgcctgcaacgcgcttcacctcgacgacgagcacatcgagctcctcctactcaagacgctcctctcggcggtcacctccacgtcggtgcgcctccatggagattgcctgcttcgcgccgtgcgcgcttgctatgatatgtacctgggaagccgcagcgtggtgaaccaggccactgccaaggcgtcactcgtgcaaatgttggtgatcgttttccgccgcatggaggcagactcctccacagtgcccgtgcaacccatcgttgtggctgatgtgatcgagctgcctgaagctgcttctggtgcttcgcctgccgctgatgccaactttgtacagggattcatctcgaagatcattggagacattgatggtgcaatcacacctctggcacggacaacttcttcagcagctgcaggcgcaggtggagcagcggctcatgatggtgcatttgagacaagagcagcagaggaaggggcacatccagcagatttgcttgattcaacagacaaggacatgctagacgccaagtactgggagatcaacatgtacaaatctgctcttgagggtcgtaaggatgagattggtgtggagggggcagtggtgggcgctttggatgatgatgctgatgtgaggattgggaataaactgcgaagagacgctttcttggttttccgggcattgtgcaagctctccatgaagacaccacccaaggatgctccagctgatcccattgtgatgcgtgggaagatccttgctcttgaacttctcaagatattgcttgaaaatgctggggctgttttccggaccagcgagagatttctaggggctatcaagcagtatctatgcctctcgcttttgaagaactgtgcctcggcacatatgatagtctttcagctatcttgttcaatttttattagcttggtttcaagattcagaccaggattgaaggcagaaattggagtattctttcccatgattattctgagagttttggaaaatattgctcaaccaaattatcaagcaaagttgattgttcttcgtttcctggaaaaactctgtgctgattctcaaatcttggtagacatttttctcaattatgattgtgatgtacactcatcaaacatatttgagaggatggttaatggtctactaaaaacagcacaagggcctccagcaggcgtgtctaccacattggttccgcctcaggacaccacaatgaaaagtgaagccatgaaatgcttggttgctattctgagatccatgggagattggatgaatgagcagctacgcattccagatcctgactctcctaaagtagagtcggagcaaaatgataatgatggaggacacgagatttcccacacagaggataatggagacgaatgtagtgaagcatctgattctcattcagaaatgtcaaatggggtttcagaggctgcatctttggagcagcgccgagcttacaagatggaacttcaggagggtatctctctatttaatcgaaagcccaggaagggaattgagttcctaataaatgccaacaaggtgggggaatcacctgaggaaattgcggcttatgtaaggaggtccttgaggtgtacctgagcactgcaaacccatctcagctttctggtgctccgcagccacttggtcattggcttattccggtcggttcttcaaagcggggagagcttgcagcccgggcacctcttgttgtctcaaccttgcaagctatcagtggccttggtgactcatctttcgagaagaaccttggccagttcttcccccttcttgctggtctgataagttgcgaacatggttcaagcgaagtgcaggtggcattgagtgatatgtttagcacttgggttggcccggttgttcttcaaacctgctgatgctgagccccatatctgttatatagtatatctccacatgacgagaactttgcggagcagccgaatttctaatcagtacgttgcgtcgttgcattgtacagttttcagtttcgtatatgagagacttataaagcatttccctgtacagg

SEQ ID NO: 17785 - DNA, 2074 bp, Oryza sativa
  ref <308>: DATABASE ACCESSION NUMBER: AK068210
  ref <309>: DATABASE ENTRY DATE: 2001-12-06
gagcttcgccttcgcggattaccaaatcctatttcccgtccactcggcgtcggctcctcgtgagttctttcgccggccgccgccgccgcccgcgccgatccccatccatcccgcaagcgcgcgcgcgagcaggggccgcacatcgcgttcgttccgctgcttccgccgcatcctggagacattcaggaagatgtactcggttgccaagaactactgcggaggagggttagctgcgtcggatgcgctatcagtatctgctcttgggcgttctctgaaaccctcgcggaaagcatcgaggcatgttgttccgtgcagggcgcgctcgtttacgcagtgttccctagggggtggttctgcggaccaggagattgtgattgcactgggcagcaatgtgggggatagaatcagtacgtttgacagggcattgcgtatgatgaagaactcgggtgtaaatatcaccaggcatgcctgcttgtatgagacttccccggcttatgtgactgatcagccgcggttcctgaactctgctgttaggggcacaaccaagctggaacctcatgaattgctcaagaagctaaaggaaattgagaaggatatagggcgcactgacgggataaggtatggtcccagaccgatcgatctggacattcttctatatggcaaatcacatattagtactgagaatctaactgtgccacatgaacgcatccatgagaggccgttcgttttagcacctcttgttgaccttctaggctcatccactgatgataacgtggaaaaaagttggcattctcttgcaaagtgcactggtgggttctttgaattatgggataaacttggaggtgaatctataattggaacagaaggaattaaaagggtattgccagtcggaaatcgtctgttggattggtctgagaggactcttgtcatgggggtgcttaatttgacaccagacagcttcagtgatggtggtaagtttcaggaaatggaagctgccattgctcagaccaagttattaatatcagaaggtgcagacatcattgatattggtgctcaatccactaggccccttgcaagaagattatctgcagacgaagagcttgagaggttggttcctgttctagatgcgatcacaggaattcctgagatggaaggcaagctgctctcagtggatacattctatgcagaagtcgctgctgaagctgtgaaaagaggagtacacattgttaatgatgtatctggtggacagattgacccaagaattcttgaagttgtagctgaacttggagttccatatgtgactatgcatatgagaggagatccatctactatgcaaagtgaacagaatctactatacggtgatgtttgtaaagaagttgcttctgagctatataaaagggtgagacaagcagagttgtctgggattcctttgtggaggatagttcttgatcctggtattggattctccaagaattccaaacataaccttgaagttatcatgggtttggaatctattagaacagagataggtaaaatgagtttaggtgcttcacatgtgccaattttacttggaccctcaaggaaaagatttttaggtgaaatatgcaatcgtgtcaatcccactgagagagatgctgctaccatggtcgttgctactgctgggatattgaatggtgctaatatagtaagggtgcataatgttaaatatggcgtggatactgcaaaggtctctgatgcattgagcaaaggcagaagatgattataccaccttcggaaaatagatcatactccagttttgtactagaaaataatgatcaataatagtaactcggccataatgttggcttctcagataataccatagggcgagtatcatcatagaaagcatgtgcacacaactgttatgtgagcttgagatggaatttttctttttgtcacatcatttcaataatcttctgaggtaacggttatacagatctctagagttttgacctttcaggattcacaaattttctacaggtctgatttgtttggaactttgggccataacttgaagttattctccatgtatttt

SEQ ID NO: 17786 - DNA, 3698 bp, Oryza sativa
  ref <308>: DATABASE ACCESSION NUMBER: AK068211
  ref <309>: DATABASE ENTRY DATE: 2001-12-06
gtctttctctctctctctctccggctcgacctcctcctcctccgcgtcctccattaccggtagctcggaatccgccgccggcctccgacgatcgccgccccctcgccgggcccggagatccggatccccgccgcgctcggtatttgtttgatttgagattttccactgtgccttggacatttgagttctatggttgcaagatgaggctgttgacatcctctggagacatgttgaacttgttaacggtctaaaagtttgtcaccagcagggtgatggcatctagtacaaaatctgacttgatgtctggtagtcctgatgggcatggatacttcagtgggcaacgtggactgtattcagctgcttcgttggaaaggtcagcaagttttcgtgagagtggcgatagttatgcagcattcccagtatcaggttcatcaaggtcaccagcagttgactctgctactctgcttcaatcacttgccatggacttgcggacaacaactttggagccaaagacatctcggttggatgtaaaaaaatcaataagtttgattcttggaatttcccctgaagagtctacatcaactccatgcacaggacggaactcatctcttccttttgaagagattagacgcatgaagaataatcttagtgacatctcaaacaaagctagggaaagatctagagcttatggtgctgctgtaacaaagattgagagatgttgcccgaatattttgcggaagcgttccagaggagatggttcatcaaatgaacgatctactgcattgttgtctggaggacttatatccaagatgcccccccaaggccatctaaatgcagatgacacagaactggtatctccgagaggagaagagaggataaagaatgcaggacagaataggagattacgcacatccatgtccgagatggatgcaaggaccactgttctgtcaaggggactgggctctactgatagaagtgcagatcctggcaaagtcaccggtggtggtccagcagttccagaagaaaaaattagggggctagcaactggtattgatggttgggaaaagccaaagatgaagaaaaaacgttctgctattaaggcagatgtttcaatgactggtccttcaagaaatgttgatgtagaccgggagcagaaaccagggatgcaacacaaatttaataatgaagctagggcaagaatgacaaactcccctagttttaggtctggaactgtctcatcagtctcgagcattagtaaatcagatttactttctggacaaaatggggttgggcgatccttaagtaggagtgatcaagacagtggattccatcctactaacaaaagggatcgtcaagctgttttagataaggaaatatcagctccaaaatctcataacaagcccagcgaagatgatggtggtgccaatgtcactgcagtaccaaaggcaaatgggtctactaggggaccccgttcgaattctggttcattactgaagtcatcgccaaacattcataggttgcaagctaattctgatgattgggaacatccttctggcatgactaagcttaattctactagtggatctggcaatcccaaacgtacaaagtctacacattcattatcccctcccacccagtggggtgggcagaggcctcagaagatatcacgttcagcaagaaagtcaaatttagtcgctattatcacaaacactgatggtcaatcggtatcaggttcgcttgaaagtccctctatcaatgaagagtctgccggattacctaggcgtgcttctataaattgttcgcaacaaactagacggggagatcatggtctttcaactggatctgagggtgatgaatctggtgttgctgagaaaaagttaagggacaaaagcaaaagggctggggaactagatgacgggcactctggttttcaaaagatcgcaatgcttggccatccttccaaaaggaataagttatctgctgatgatgatgttggagatgctgcacgaagacaaggaaggatcggacgaggttttactccaaccaggcccagcacccctgcatcaattgacaagcttgaaaatgctccaactacaaaacaaagaagtgttaggacagtcactgagagaaatgaaagtaaatctggaagaccactgataaagaagatgtcggagcgcaaaggcaatgcacgtcctagacatataagtagcaatgcgcagttagactctcctgtgcaatcggaagatgatcatgaggagctccttgctgcagcaaattctgctctaagatctgctaattcaagtccattctggcggcaggttgaaccattctttagttatctgacaacagaagatatagcctatttaagtcagcagatccatttatcggatgactccaccgcgagcaggtcaattgaaggtgatgaaagtcggaagtacaagggtagtcttgaatacatctcgcaaccatcaactccggctggtagcaacaaagatgaccatagcgctcttcaaaatgggtataccctgaatgagatagataatgatgtagggattgcatgggagacaagctgcattgaacctatcctggatcaacttgtccaaggaattggggcgcgaggaggtgcatcagttggccaaagacttatgcaagctctgattgatgaagacaaggttgataatattaccaacaacatttacagaagtgaaacatatccatttgatacacatgaaattcatttcgaggaaggaggatggaaatcgcattcacagggttataagttggagtctttaatgaactttgaagctgcagggaaaggttctaatggtttgatgttagattctgattggaaatatcatgatgaactatcacataaaggcaataatgccatggagaaggccaaggtgtggcctgagtttcagtacagtgagatgtgcttcagtgataggatcatcattgagctaagtgaagttggtgtatccattgaacccgtgcctgatcttgcccagagtgaagatgaagatatcaattccgaaatctgcaaattagaaggccaacttcataaagaggttgtagataagaaaaacttgctacggaagctggatggcattcttagaactaaaaaggagtcacagcacagggaattttcacggcgtgccatggaaaggcttttgctgatagcgtatgagaaatacatggccttctgtggttcttcaagtagcaaaaatgtaaatagagctggcaaacatgctgctctaagttttgttaaacgaacaatagcacgttgccagaactatgaggagtcaggagcttgctgctttgatgagacccctttcaaggatatgtttgtatcagcaacttctcacagaagcgacccagattctgcttcacaagacaatattacggtaccaaaatcagtccaaagggctagtacatcagatgcctctcgagcaagcagtcaccttacggatctgtcattttcgaaggaggatccctggacaaataatgtaaaacaacgggaattgttgcttgatgaagttgtaggtagcataacaggaggaaccctgaaaacgtctggccttggtacttcccttgtgagcaacacaaaaggaaagagaagcgagagggaagggaaggggcacaaccgagatggtagcagatctgggcgcccgtcatcatccaatgcaaaaggagaaagg

SEQ ID NO: 17787 - DNA, 1366 bp, Oryza sativa
  ref <308>: DATABASE ACCESSION NUMBER: AK068212
  ref <309>: DATABASE ENTRY DATE: 2001-12-06
gacggcttctcagacttctctcctctatcgctagccacagatccgctcctggctcctgcaaggctgcaacctgcaaccccaacaccccttcgagaatcgtcgtgcgcgcaggtatgatcccctctcgcctgcgcataccaggtccctcgctcgatccaatcttcggttgattgaagcgaatctggaggctttgcctctctagtaggttttttttcctgattatttccactcacatttgcttgcgcatctcaaacactattgtggagaagtggggaggtggtgaaaactggcaatgggatcgttgtgggccggatcagggatgaatcttgggggattattgccttctgctcgccgctatagacgtatgcttgtttagttttagtattctgactcttttcggctgatcgtatcatcataaaagctcttggtccactctgtggtttgattttgtgcaagaagaaatataatatcgcatgattatattctgtgatcgtagattgggatagagagcagatgttattttgtgcacgcacacttttaaaatcctctgatatggttaactaattccgtgacctcttcattcagcaaacctgtacatgggtaaacaagcataactgaattacaggcaagccggtagcttggaaagaaccctcttactcccagtaaaaacaataggaggcccactactgctattttctttattgtgcttctgaatgcaaagtagcacaagtagggatattaggtatgggagagaaagtccttttgttttgttgttatcctcgttattgtaactgttatccggtgccaaattagcacctgttattgtaactaaaagtcagtggcttttattagaagataacatcttccattttttatttatacctcttaaaatgtatcttgtgaatgctcgaattctggcatatgttatgcaatcacattcatttgtgttctgttcatttaggacttgttatattccactcggctttcactatgtgttattttgtctaataataaaatagttcctcacaccatgtagcagaaggaagatggatgctaacagacgccaaggtggaattcagcaattattggctgcagagcaagaagctcaacagattgttaatgctgctaggagcggtaattgttccacaaatattcattaagaataacgcggaaattgatgggggggaattgcttatgttgtacgaaatatgtgcaatgattgcttcgatatacctacaacaagattttgctcgtatatttctttgttgatgtctttatagggtaattttgaatcatcctgtttgttgaataagttccattgtaccaacattaagcaaatcaacagtgggaaaattccatgttcagc

SEQ ID NO: 17788 - DNA, 1545 bp, Oryza sativa
  ref <308>: DATABASE ACCESSION NUMBER: AK068213
  ref <309>: DATABASE ENTRY DATE: 2001-12-06
ggctcctttacatcacatttctagccaccctctcatcatcaccatcaagctcaaaccaacaagaagagagctagcttttggtactattagccactagtagatagccaagaagaaaccaagaaattctttgagctatctaattagctaggtccattgattcatcatcatctccattgatccacttagctttgaagaagaagaagaagaagacatttagttagctagctatattgaggtgaggtggcggcggcaatggcggcggacctggccttcgaggcgaccgagctccggctcggcctgcccggcggcggcggtgatggagacgccgcggcggcggcggcgaggagctcctccgggaagaggggcttcgccgagaccatcgacctcaagctgaagctggagccggcggccgcggcggtggacgacgacgacgacaaggaggaggcggcggctgacgaccgggagaagaaggtcgacatcgtcggagctgacaacgacgacgcctcgccgccggccgccgccgccgccggcgggatgaagcggtcgccgagccagagcagcgtcgtcaccgccgccgccgaccccgagaagccaagggctcccaaggcacaggtggttgggtggccgccggtccggtcataccggaagaacatcctggccgtgcaggccgacaagggcaaggacgccgccgacggcggcggcgacaagtccggcgccggcgccgccgccgccgccttcgtgaaggtgagcatggacggcgcgccatacctgcgcaaggtggacctcaagatgtacaagagctaccttgagctctccaaggcactcgagaagatgttcagctccttcaccattggaaactgtgggtctcatggggtgaacggcatgaacgagagcaagattgctgatctgctcaacggctctgaatatgtgccaacctacgaggacaaggacggcgactggatgctcgtcggcgacgtcccatgggagatgtttgttgaatcatgcaagcgccttaggataatgaaaggatcagaagctattggccttgcaccgagggcaatggagaaatgcaagaacagaagctgagaaagaagaacatgtcgccatcaaaaacggatggatcatcatcagatgcaacaatctatctatagcttttcttaattgcagctttgcctcatccctgtatcatactcgcttgctgtcctcatctccaagtctgtacctttcctgatcagtgaaagtcattttggtgttgtggtcagtttctgttctgttgcagtcattaagttcctaagtgtgtcatcttgtcttatacataagaaagaagccaagaacatgtaccagtagtacctgtcccataattatgtcttttttgctctccctgttcttccctttctatctgtttttttttaccttaatggcacaaaatgtaaaggcaccctgctcaaagggacctcaatgtattttgtccatgaaaaggttgtttaattatcttcatggtgtatccatcaaacaaataattattactgcaaggtgttatgtgtt

SEQ ID NO: 17789 - DNA, 2759 bp, Oryza sativa
  ref <308>: DATABASE ACCESSION NUMBER: AK068214
  ref <309>: DATABASE ENTRY DATE: 2001-12-06
cccgatccgtctcggctctgcgatcttaatttccccgcgccgccgccgccgacgccgccgccgatctcgcgcgccgccgctcccgccgttcccggcgaacgtcgcgcctgatacttctcgagagcctcgatcgccccaggctccttccccctcttgggagattcatcgttttgtactaagcagcggccatatggagatactggaggtgcccgtccagccgccgccgcgaataggtaatggagctacttcttcagcttctgaaatagacaactccccttgtcaatgtggcgatgattctcaatctgccagtacagtggaatccaagatgcagcttccagaggacatcctttatcacatacacactctcatgcctatgcaggatgcagctcgtgccgcctgtgcatctcgttgttttctgcgttcttggagattctaccccaggctcaatcttaatgttaatacactacgcatagataagagagcacctagcaatgataaactaacaattgatttcatcagtagagtcgaccccattatgctgaatcatgctggcacaggagtgaagatgtttaaacttacaacccacccttgtttcagtctgcatcctagttatgttgaccgctggcttcaaattgcgtttgcaccaggaatcaaagaatttgaactagaaatgacccgagttagcaagatggattatgatttcccatgctcacttctatcaagggtagcaagctcaattcagtcttttttacttggtggctgttctttccaccctggcatacaaattggtcagatgagtaccttgacaagtttgcgtttaagatcagtaaaaattactgaggaggaattatgcggctttctatccaaatcctgtgctttgcagcgattgttactttcagactgccataatattgttgtcctgaagatcccccatctgctggagcttaattacctggaagtgttgcattttagaaaattggaggtgattgacagtagtgctccaaagctctctactttcatctatgctggccccccaatacaaatctcacttggagaagcattattacaagtgaagaaaatgcaaatgttttgtgacggaagccctgacgcgctacattatggtagcaagaagcttccatccattgcgccaaacatacagaagctttatctatcaacacgtaatgagacagtcaatacaccaaaggtacttggcaaattcctgcagctcaagtgcttggagatactgctgcttacaccagatttgtccccgggctatgatttttgttctctggtttccttcattgatgcttctcctgccttggagacttttatcctgcgtgtaagttattatttatatgtcaaagctatctatcatttatcaggtaccacttatgttcaagattttattgttttctcttaaagaattatttgttatgatgtttcatgcaaatgttttttgttatttcttgaattggacaaatgtaacatttctttgttctgcaaatgatgcaactgatctcatatgtactatcttaaaagacgcttactggtggtggttgccacccaattaccatgtggtccacgaacaatcagacaagactttgtctagggatgcaagtgggtagtctcactacccgcataaaaacccgcttactacttcatttttcatatggtagcacaaaatttagaagaaaaaatgaactacaagtgagataagcgggctaaaaacacccgcttgcccgccccgcttgcatccctatctttatctgacccctatggctaactcaactgacacctacaaagtggcagcaaaattggcatgatgataatataatttttatgggctttaaaatatatgtgatgagctttctttaaaaaaataaaaacgttgcaactctagtaataaatattgacactattgatggccttgataaactttgcaactaaattacttgccttgatcactatcctattcctataaagtagtagctaaataaaagagggagagaattaatatggctaacttttattcagtaccttttgctcattaaaaaaaaagcagacattgacgtaatcctttgcagattgaacggccagctaaaagacatgattcgatccttgaagcattgagtggtgactccatgcatccaatgcgtgcttcagaataccgccatgacaatctcaagaacatgatgataaccggtttttcctctgcaaagagcatgatcgatcttgccaaccacattctcgagaaggcttcgtctctagagtaccttacattggacaccacccgtggctatgacaggagaaatgacaagattgacccatgtcaatgtttacaaatgagcaaggaagctctcttggaagctgagaaggctctcctcgctattaggatctatgttgaggggagagtaccctcgagtgttagcttaaaggttattgagccctgcagtaactgccacactgaaactagaagctaatgattttgtgtgtagaaagtgttgtttctgccagttgcaaataccattgctctcatgtatgcctgcgtttcaacaatgttgtaacttcatctgttcaagtgatggaaacctatttgaagttctgacatgcttcatgccacatcttattgctacttagcatacagttcaattttcctacatagtgataaggaatttatatgttctgcatgatgggcgaacaatcaataaaagggagaaatgacattagcgtgtggcctgtttgagaatggtatttggatg

SEQ ID NO: 17790 - DNA, 909 bp, Oryza sativa
  ref <308>: DATABASE ACCESSION NUMBER: AK068215
  ref <309>: DATABASE ENTRY DATE: 2001-12-06
gttgttcttatcggtacagcctcaagcctaagtgcgaagatccgagtatgaaggtaacaagactcgcaatagcccttgcgcttgtgctagcgctagccgtagcggagcatgcctccctcgccgccgggcccgggtcggcgccggcgccgccagcaccaaccccaaggtcatcatcgtcggcgccggcatatccgggatctcggcgggaaagcggctatcggaggccgggataaccgacgtgctgatcctggaggcgccggaccacgtcggcgggcggatgcacaagcagaacttcgacggcatcaacgtggagatcggcgccaactgggtggagggcgtcaatggcgaaaagatgaaccctatctggcccttcgtcaactccacgctcaagcttaggaacttccgctccgactacgattacctctcccaaaacgtctacaaggaggacggtggcgtctatgacgaagctcaggcacagaaaatcatcgaccgagcgcatgaagtgaacgagaatggggagaagctatccgccactttgcctccgagtggccgggacgacatgtcaatccttaccatgcaaaggctcaacgatcagtacgtttgtgctgcatatataaaactctcacttcgtctcttcttgcgtgcagactagaagagctaccgaccggttcgcttaatttcctttaaaaaggaaaaaaaataccagttcactctcctcaaggttgggataaaaaaatataatttcaactaaggatatatagaacagaaggaggcaggacggtgtcctacagcattctccctaatatcaaaatcactggttataatggacgatctagatcatatcgtcgtgtggtagataggtttgttgggcttcaactacaatggtatataaggcattagaaaagggtc

SEQ ID NO: 17791 - DNA, 3204 bp, Oryza sativa
  ref <308>: DATABASE ACCESSION NUMBER: AK068216
  ref <309>: DATABASE ENTRY DATE: 2001-12-06
gactcgtcagaagcatccgccgcctacctgccaacccctagaattccgaaaatgcccctggaccccgactcctcgccggcgccgccgcaccgggactggttcttcccgccggcgccgcccttcctcccgtcctccagagcccgaacgccgagggcccccttcccctccacctcccgctcctccaatccatactccttcccggaccgccggccgcctcctaccccgcgctcccgctcccgctcccccctcccgccgccggagcagcagaagcagcagcagccgcccccgacgacgcctcctcccgccccgcgccgtcgcgacccccggtatgctggcgtccgccgtggcgatgtccgaacgctcaccgccgagaaagcggcggcggcggcggcggttcctacggccgcgcaggtgcacgggagcaagtcagcggcgtcggcgaccaccctccgatggtcagggatggtatccgtggcggctattgtgctctgcttctcttcccttgtccgcagtaactcctcgctacatgatcaggtccaccatttgaaggctcagcttgcggaagctactacaaaattgcagtcttgtattacagagtcctcgatggatatgagtagcatattatcatatcagagcaataacagtacttcgcagaacagaggtcttaagaatttctcattgctgctctcgctttctacgctgtacgccccattactcattcttaagtacatggaccttttcttaaagctgaggagttcgcaagactccgaagaagaagttcccataaacaagcggttggcataccgagttgatatatttttatcacttcaaccatatgctaaacccttggttctacttgttgctacattgttacttattggtcttggtggcctggctctttatggtgtaaatgatgatagccttttagattgcctctggctgtcctggacctttgttgctgattcgggcaaccatgcaaacgcagaaggctttggaccaaagttagtttcagtttcaattagtatcggtgggatgctggtttttgccatgatgcttgggcttgtaacagattcgatctctgagaagtttgattcactgaggaaaggaagaagtgaggtcatagagcaaagccacacgctggtccttgggtggagtgacaaactgggatcacttgctgaaccaaattgctattgctaatgaaagtttgggaggaggaaccattgtagtgatggctgagaaagacgaagaggaaatggaagcagacattgctaaaatggagtttgacttgaaaggaacagctataatttgtagaagtggaagccctctgattctagctgacttgaaaaaggtctcagtttctaaagcgcgtgcaattgtggtttcagctgaagaaggaaatgctgaccagagtgacgcacgccccattgcgaacagtcttgagtttaactggggtcaaagaagggctaagaggtcacatacttgttgagcttagcgaccttgacaatgaggttctagtcaaacttgttggtggagaccttgtggaaactgttgttgcacatgatgtgataggtcgtttgatgatacaatgtgcacgtcagccaggccttgctcagatatgggaagatatccttggcttcgaaaactgtgagttctatattaaaagatggcctcagttggatggtatgcaatttgaagatgtgctcattagctttcctgatgccattccatgtggcataaaggtggcatcttatggtggcaagattattttaaatccggatgacttttatgtcttgcaagagggtgatgaggtgctagtaattgcagaagatgatgacacatatgccccagcgccattacccaaggttatgagaggttacctacctaaagattttgttgttcccaagtctcctgaaagaatattgttttgtggttggcggcgtgatatggaagatatgataatggtactcgatgcttttgtagcgccagggtcagagttgtggatgttcaatgacgttcctgagatggacagagaaagaaagctgatagacggaggcctggacttcagtcgtctagaaaatattactttggttcaccgtgaaggaaatgctgttattcgccgtcacttggagagcctccctttagaatcatttgattctatactgattctggcagatgaatctgttgaggattcagcaatccaagctgattcaaggtcgcttgcaacactactgctgatcagggatatccaggcaaagcgacttccattcagggaggcgatggtttcacatgttactcgaggaagcttctgtgaaggttcttggattggggagatgcaacaagcatctgataaatctgtcataatcagtgagattctggatcctaggacaaaaaatttattgtcagtgtcaaaaatcagtgactatgttctatcaaatgaactagtgagcatggcattggcaatggttgctgaagatagacaaataaatgatgtcttggaggagctatttgcggagcaggggaacgagatgcaaatacgaccagctgatctctaccttcgagaagatgaggagttaaatttctttgaggtcatgctacgtggtaggcagagaaaagagattgtcattggctaccgtcttgtggatgctgaacgcgccataatcaatccaccagacaaagtttcaaggcggagatggtcggccaaagatgtttttgttgtaattaccgagaaagaatgagttacatcatttagcaaaccatgagaaatcaccactagtaaggcaaaattgacagcagtgcacgtaagagatcaacacgagcagacgactgttgcattgcagaattgacatccggaagaaggccaagcactaactgcgtcagcgcgagagagcaatgcataaccagattttgggatcaatctcgggctatgacttgccaattgcaatgtacataagtgcggaatgatccatgccattgcgcagaaaggatgagaagagaaacaccaagcacgatttgcttagatcagttttgtttttttagagaggggcttcgatcctgtttattgtatagtattacatcttttttgtgtactctgttagaaacttccaaatactccgttggctcagattgctgtacacgcgaacaacaaattcgtatcttacactaatgtatgacaaaagatggcaaagtaacctggtacaattggtc

SEQ ID NO: 17792 - DNA, 1541 bp, Oryza sativa
  ref <308>: DATABASE ACCESSION NUMBER: AK068217
  ref <309>: DATABASE ENTRY DATE: 2001-12-06
gggggatcccccaccaccaccaaccacaggatctcttccccccacctcccacaaccccggatccctcctcctcccccttccctcgatgcggccagcgtcgccgcctcaggatccggcgatctagctgcccccgtcgctgcaactgcttgctgctgctgtctggttctttcttgggggggcgcctccggcgaggaggaggaggaggaggaggaggaggtagatgaggttctggagggacagcggcgggggcggcagcggcggaggccgggacctcaacggcggcggcaccccctgcggccaggtgcgcgtgctcgtcgtcggcgactcaggtgtggggaaatcatcattggttcatctcattctgaaaggctctgcaattgctcgaccaccccaaacgattggatgcgcagttgatgttaaacatattacttatggaagtcctggaagttcttctaatagcattaatagcattaagggtgatgctgaaagaaacttttttgttgagctctgggacgtttcaggacacgagcgctacaaagagtgccgatcacttttttattctcaaattaatggtgtcatatttgtttatgacctctctcagaggaaaacaaagacaaatttgaacaagtgggcagtggaggttgctgaatcagggaccttttcagctcctcttgggtctggtggtccaggaggccttccggttccttacttagtgattgcgaacaaggtggatattgctccaagagatggtaaaagagttagcagtggaaatcttgttgatgttgctcgtcaatgggttgagaagcaaggcctacttccatccagtgaagaacttccacttgcagaaagcttccctggcaattctggtttgctcacggctgctaaagtggcaagatatgacaaagaagctttggttaagttcttccgcatgttgataaggagaagatatttttcaaacgagcttcctgctcctagcccatggtccctcactcccagagaggataccattcttcctgtagaaacaacgaatgatgatgacctgtttcaaaggaaaagctacgctggccagagttacaaatacagtggcgttacgccattgcctgctcagcggaatctaactccaccacccactctctacccgcagcaaccaatgtcatcgtcttcagagaactacagatatcacaggttctcctcatcggcaattcctgacgcaagcagtagtagaacgaaccgagcagatatcaatatatgatccaagagctcgcatgcattaccacttccaatgtgaaaaatctcatgctgctatggtattttacttgatcccactttgtgtaatcctgatatgctcacctgtcttgccttgaaatgtgcatgtagtcgaggtgctctttttgattgtcctcatcttggcataccactaatgatcaattcttttatatcttctatattgttgaattgtgttttgtaatgaagatcacacatgtttataaattaattaatagaagcatttagggtggccggagtgtgtgctgttgtcagtg

SEQ ID NO: 17793 - DNA, 2438 bp, Oryza sativa
  ref <308>: DATABASE ACCESSION NUMBER: AK068218
  ref <309>: DATABASE ENTRY DATE: 2001-12-06
ggcttggaccagatctcacattttttgttcagtttctctccacgccaccactccctcctccctcttcctcttccccttcctcctcacctcccattccctcagatcttcccccatatctctctgtctcgccgcagtccgcctcccaatctgaggagcttttcttcagctcaagcttcttgctcgcttgctctctactatctctccttttgactcgtggccaagctgcagaggaaacccaaaattccaagaaaagcaacaggtcaagaaagagggaaagctaaggtgagaggagatgggaggaaggaaggaaagaaagatggtgatgatggcgataagtcgccccatgattcgcgccatcattccgtctcgcccgaggccagtgcgctggtaaaagggcctcgccgtccgtccgtccggccggccgtgcggcgcgcgtggaggaggtggtggtgggtgcggaggtgcgtgcgtgagaggggcgtcttgccacaatgccccagtaccaggagcttccctgcggcgggcaggtgctcgacatcgacaccgcgctcaaggacggcatccttgggggtggcccggagctcggggacgcggcggccggggacggagggaagcagccggtggagctgaggaagatgatggacgagctggacgcggcgggggacggcggcggggacgaggcggtgccggcggtgttcatctgcccgatctcgctcgagcccatggtggatccggtgacgctgtgcaccgggcagacgtacgagagcgccaacatctcgcggtggctcgccctcggccaccggacgtgccccaccacgatgcaggagctctgggacgtcacgcccatccccaacaccacgctccggcagctcatcgccgcctggttctcccgccgctacacccgcttcaagaagcgctccgccgacttccacggccgggccgccgagctcgtccacgcgctccgcggcacggccgtcccgaagaggcagcccctcaagggtcaggccagggtagccgcgctccgggagctgcggtccctcgccgccgcccaccagtccgtgaccaaggccatcgccgaggccggcggcgtcgggctgttgacctccctcctcggccccttcacgtcacacgccgtggggtccgaggcggtcgccattcttgtgagcggcgtgccgctcgacgccgacgccaaggccgcattgatgcagccggcgaaggtgtcgctcttggtggacatgctcaatgagggtgcggtggacaccaagatcaactgcgtccgcctcatccgcatactcatggaggagaaaggcttccggccggacacagtagccagcctgagcctgctagttggagtcatgcgcctcgttcgagacaagcggcatccggacggcgtcgctgcggggcttgagctgctcaattcgatatgcgcagtgcacaagcctgcaagaagtttgattgttagcatcggtgcggttccgcaactagtagaattgctgccagagctgccaacggagtgtgtagagccagccttggatatcttggatgcgcttgccgcagtcccggagggtcggatagcgctgaaggattgccccaggacgataaccaatgctgtgagattgttgatgagggtttcagaagcatgcacacggcgagctttgtcaatgctgtgggtggtgtgtaggatggcgcctgaagaatgcgcgccggctgctctagatgccgggcttggggccaagcttctcttggtcatacagagtgggtgcggaccagagctgaaacagcaagcgtccgaactgctcaagctgtgcaccatgaattgcacatcgacggtattcatctccaagtgcaagcttacgaagacaatccagtgagtggagtttggaattgtgctgttccgcttgtgatttggtcgatggtgaatggttcacctgttgggtctcacataatctgaagaaatggcagcaattagcaattggcagtcgacagcgtctatgtatagataaactttgcagttatgcagaatttgccatgtcatctgatggcataagggtggatgatatgagtagattgtgagacctgtggccatgttatcactgtccagcgagatgatgcgtatcgcagcattcaaaatgcagcatacacacagctaattcagtggcaagcaggtgggatgtacatgcaaattgatgaggattttggtcagctcaataagcactcgaggctgggaggtggtaagtacagccagttttgccattggtagtagaaaaattaagcaagaaacctgctgttttagattttcggcaatgtgggtctttcagggctgtagatgttcttcctttttctcatcttcggtgtaattgatggtataaactgggtagaattgtatacagtactgttgcttcataattgaaatacacattgccataggccatatcttg

SEQ ID NO: 17794 - DNA, 1111 bp, Oryza sativa
  ref <308>: DATABASE ACCESSION NUMBER: AK068219
  ref <309>: DATABASE ENTRY DATE: 2001-12-06
gccggacccaacaagataggggggagccaaaatggcgctgctctcaccaccctccccgcctcctccgctcccgccacttcgccgccgccccgcctctcccacactcctcgccgtcgcgacgagacctagctctctcctctccctgccccactgccactgcggcctccccctcccttctacagccaacgcacgggcgtattcccgtagcagccgccgccgccgccgcgtagctgcctcgctcggccaggacgaacctggagtgtcagacacagctgtcgctcctgagggagaaggggattccgaaccgccggcttcctccgatggagccgcaggcgacatcgcgcttccgccgagcagccggaggcgagccccgaggacttggaggatatccgccaggtcaaaagggtgcttgagcttcttcagaagaacagggatatgacctttggcgaggttaagctaactatcatgattgaggatcctagagatatagaaaggaagagattactcggcatagaggatcctgatgaaatcaccagggatgatttggctgatgctttggttgaggttaatgaaggccggattccagaaaaccgtgttgcccttcagttgcttgcgaaggagatgactgaatggccagatcttgagatggaagctccaaaaaagaagagtaaacctgggaaatctgtctatgcaaaggctacagatacaggcattgatcctgagacagctgctaaaagacttaacattgattgggattctgctgctgatttggatgatgaagaggaggaagatgatgaaactgaagtgccctccgcagtgggatattctgctctatatctgttaactgcctttcctgtcattattggaatatcagtcgtgttgattcttttctacaattctctacagtagttcagccctgctcatctttgcttcccgaggcagatatcctcctccttttattttcttttgtaaatctgagtcagcttaatcttcattattgtgaagaaatgaagatgtgaaatagtttctgtggtgatatgacaactgacaagatagtaaatccgtgaaatgcatattaccaaaatagaaggcttgaaaatagttttttccc

SEQ ID NO: 17795 - DNA, 1889 bp, Oryza sativa
  ref <308>: DATABASE ACCESSION NUMBER: AK068220
  ref <309>: DATABASE ENTRY DATE: 2001-12-06
gaaaccccctccctcccctcccttctcccgccgccgccgccgccgccgccgccgagcatgccgagcgccttccactccctcctcctccccgccattcgcaaccccaaacctagccgtcgccgcggccgcggccgcggcggcagcaaacgccccaagaagaccaccaaatccaagaaccgcctcgccgacgccgccgccggagacgccaccgccttccacctgaagacctccgcgcgcgccggtccggggggtgccgggagcggccggcgaggcgatgggggatgcctcgtgcagccgctcggcaacctcctcctcctcggcggcggcggcaacctccgcgacgcggggctcggcgcgctccgcccgctccccgacgacgtcctcctcgacgtgctcggcctgctcgcggcgcgcgacctcgctaggctctccgcggcgtcgagggcgctctacgtcgtcgcctcccacgacccgctctggcgggcgctcgtcctcgacgagctcggcggggacttcgccttctcgggctcgtggcgcgccacctacatcgccgccgcgtcgggcggccgcgcccacctccccccgcggggcctagagatcagggggttctactccgactacctcttccagagctggctctgcgccaacatggagatgcggccggagtggctccaccgggacaccatcgatcgccgccgcggcatgtccgtcgagcaattcgtctccgaattcgaggagcccaataggccggtgcttctggaaggctgcctcgagagctggccagcattgcagaagtggaccagggagcacttgctgaaggtctcggccgggaaggagttcgccgtcgggccggtgagcatgacgctggataggtacctccagtatgccggcaatgtgcaggaggagaggccattgtacctgttcgatgccaagttcaccgagaaggtgccggagatggggagggactatgaggtgccggcgtacttccgagaggacctattcggggtgcttggggaggaaaggccggaccaccgatgggttatcattgggccggcaggttcagggtcgtcgtttcatgttgatccaaactcgacatcggcgtggaatgctgtgatcaagggagccaagaagtgggtgatgttcccaccggaggtggtgccgccaggagttcatccaagtgcggatggagcagaagtcactagccctgtatctatcatggaatggttcatgaatttttatggggcatgtaagacctgggaaaagaggcctgttgagtgtatatgccgggctggagaggtggtttttgtgcctaatggatggtggcatttggttatcaatctggaggaatctattgcgattactcagaattatgtgagcaggaggaatctgttgaatgttcttgactttctcaagaggcccaatgcaagtgaacttgtatcagggactacagacagggtaaacctgcatgacaagttccgcaatgccatcgatatgacttatcctgggatgattaaacagcttgaacttgaagctcagcagaaggctgctgctcgcaagaagaaagtctcgttctgggaatctgcggtagatgccaatactggaggattcaagttctcattctgatttcgtttctagcagctaggtctgccagtgtgatacttgattgctgttcttggtgaaagttcgacgattttgccattccatttaaatgctcaatcacatctgatttcctacctgaattcaggtttatgagcctatgcattgtctgaatctgtcttaactgtatcatcttaaattttggaggaatgtagtcccagacatgtatttcattgttgttgttgttgtaacatgtagcttacacaataataaattgatcattgaccttgtgc

SEQ ID NO: 17796 - DNA, 1443 bp, Oryza sativa
  ref <308>: DATABASE ACCESSION NUMBER: AK068221
  ref <309>: DATABASE ENTRY DATE: 2001-12-06
ggagggccgtaaaggaaaatcttccgtgtcgtcgtctcctccgctccttgcgccaagacgagtcgcggctcaacagcggagaggcggcgatctcccatctggcgagcagagcaggggaggggaagggatcttgttagagtggcatggctgctgaatgtggaagtggcaactgtgatgcttgggcagcgagagatccttcagggatcctctccccgtacaagttcaaccgcagggctgtacaaagtgacgatgtttccttgaggatcacacactgtggtgtttgttatgctgatgttgcatggacaaggaatatactcaacaattcgatgtaccctttagtcgctgggcatgagatagcaggagttgtaactgaggttggtgcagacgtcaagagcttcaaagtgggtgaccatgtaggtgttggcacatacgtgaattcatgccgggactgtgagaactgcaatagctctctagagaactactgctcacaacatgtcttcactttcaatggtgttgacactgatgggactgtcacaaagggaggatattctactcacatagtagtacatgagaggtattgctttaaaatacctgatggctaccctttggaaaaggcagcacctttactttgtgctggcatcactgtatatagtccgatgatgcggcataatatgaaccagccagggaagtcactcggcgtcattggacttggtggcttgggtcacatggcagtaaaatttgggaaagcctttggactgaaagtcacagttattagtactagtgaatcaaagagaaaagaagctattgaccttcttggtgcagataatttcgtggtgtcatcggatgaaaatcagatggagaccttgaaaagctctctgaacttcattattgacacagcctccggcgatcacccattcgatccttatctcacgcttctgaaagttggtggtgtaatggcactacttagcttcccaagtgaaatcaaagtgcatcctgcaaaccttaatctcggtgggcggagtttatctggtagtgtaactggaggtacgaaggacatccaggagatgataaacttctgtgcggcaaacaaaatctacccagatatcgagatgatcaagatagattacatcaacgaggctcttcagaggcttgttgaccgggatgtcagatttcgctttgtaatcgacattgagaactcgttcaagtagtatcttgatatcttcagtacaccattaatgatagaagtgtatgcaataataataagtttaaatgtcctacaagatgatgagaccatgagacagttccagaacaaaatgttccattttaagaagcaatttggttctgttttcagttattttcaggagtaaattgtattggtggtacacaaacttatttggtgggtgtaatttaatacataaacttgtttgttgggtgtaatttagt

SEQ ID NO: 17797 - DNA, 741 bp, Oryza sativa
  ref <308>: DATABASE ACCESSION NUMBER: AK099043
  ref <309>: DATABASE ENTRY DATE: 2002-08-28
gattgggctcgtcggagagacaagtagagagcagcgtagtcgccgcacttagccatgctcgcctcgccggcgctcgccggcgcgcgcgccttcgcggcgaccgtgtccgggagcctcggcatccccattccggccatctccgcgccctcgccctcgcaggcgcggcggcgggcctctctcgtcgtcgttgcaaaggtcaaggtgtccactccccaggccgaccgcatcgcccgccatgtccgcctccgcaagaaggttagtggcaccacggagaggccaagactcagtgttttccgctcaaacaaacatttatatgctcaagtgattgacgatacaaagtcatgcactctggtttcagcttccacaatgcacaagtctctttcaaaggacttggaatactcggcagggccaacagttgaagtggcacaaaagattggtgaagtgattgccaagtcttgcttggagaaaggaattaccaaagttgtttttgaccggggtggtttcctctaccatggtcgcattaaagctctggctgatgctgctagagagaatgggcttgatttctgaaacctccaaatgtttgttcatatctccagaatcacttgttactttctttttcgcccacctgtcgaacagagtttttctttgtagtaatttgatttgctctgcaggcttggctactctttaattgtatatcaccccactatcagctcaccagttattgagtttgtctgcttcacg

SEQ ID NO: 17798 - DNA, 3875 bp, Oryza sativa
  ref <308>: DATABASE ACCESSION NUMBER: AK068222
  ref <309>: DATABASE ENTRY DATE: 2001-12-06
gcctctatgacaaagattttagaccagagtcaattgaatcaattttatgtggttcattgttcccaccagagtatccaacaaaggaaagagtgaaacattgggtaactgctgtcacacatttcgacaaagttgagatgaaagctctcgagcaaatttttctgcaaaaacagaggctacaacaagaaatgctgaagtacatgtcccttcgacagacaagccaggaagatacccctgatatggaaaaaaaagatcctggggtgtttccggagcatgtctcgtttgttcaatgatcatacaaagtctgaggagtacttgaacatgcttcatcagataaaagatgccaacatctggaatatattcacaagcttgcttgattgttcaacaacattcaacgaagcttggtctcttcgggttgatttgctaacgaaacttggtgaaaaacatgcattacatgattttgtgagcacgttgtcgatgagatgctcatatttacttgtgaacaaggaatatgtcaaagagatcctttctgaagcttctgaccaaaaatctactgggaatacaaaacttatgtcatcatgcatggatcttttaacggcagtatctagtttcttcccttaacttttgtctggacttgaagaagatatcattgagctcctgaaggaggataatgaactacttaaagagggtattgctcatgttctgtcgaaggctggtggcaacattcgtgaacaactagcttcatcaagttccattactcttctactagagcggctatgtttggaaggaacacggaagcaggcaaaatactctgttcatgctttggctgctataacaaaagatgatggcctgatgtctctatctgttctttacaagaggcttgtggacttgttggaggaaaagaaagtgcatttgccatccatcttacaatccttggggtgtatagctcagatagcaatgccaatttttgaaacaaggggagaagagataataaattttataactaaaaaaattcttgactgcaatgatgattcgggcgacgtttctgctcataaatctgaatggagtgatagtactcaaagttgtttattgaagatttatggcattaaaactttggtgaagagctgtcaaccttgcaaagatgctcaagcacatccgggaattgaaaaattaatgggcatccttaagaatatccttacatatggtgatatttctgcaaatatgatttcaagcactattgataaggcccatttgaggctggcggcagcaaaagctgttctccgcttatcaagacaatgggaccacaaagtgcctgttgatgtattctatttgactctcaggatttcacaggatgatgttcctcaggtgaggaaattatttcttagtaaagtacatcaatatattaaggaaagggccttggatgcaaaatatgcttgtgctttcttgttagctatggatgattatcatgccccacagtatgaagagtttaagcacaacataattgaggttgcgcagatatgccagcaagttaagatgcgccaactttctgtccaagcggaaacaaatgtgctcactgcttatccagaatatatgatttcctatttggttcatgccctctctcatgatccatcatgtcctaacattgaagagcatgaggatgttgaagcatttggtccaatttactggcgattgcatctgcttcttttgatcctcctgggggaagagggtttgcagcacagtgtaccaggcatgaaaaaggagagcttcacaacaatagtatctatatttaaaagtatcaaatattcccaagatgtggttgatgttaacaagacaaagacactgcatgctatttgtgatcttggtatccttattggaaagaaattatgtcaagagcagataaatatatcagaagctcaaacagtttcactgcccagtcaactttatgcgccagttcagaaggatcagaatgaaaattctgtggagagtgatgagcagatatggccgggttgcgagaatgtgttggcccattttgaggctcttatgacagcaaagtctgctgaggttgaatctcccaaggataagatgcttatagatgagactgatgaatttggtaatgaagttcctctaggaaaaattgtgaaaattttaaaatctcaaggagcaaaaaaggctgggagaaagcagaagacaaaatctggttcaataaacatggaaaaagatgatgatgtcttgggactggttagagaaataaacttggacaatcaagaaaatttgggggaatcagaaaagagcaaaccaaagaaaaagcggatggatgcaaaagagagtaatgacaagcctgtagatttttcaacaccaaaacgcaagagatcagtttctaagagtagaccacattcaacgaaaggcaacaaatacagtgatgagcttctactgcagtctgttgacccagatgaaactatcaactcatttgaaaataaggttgagggggccaaaaaaagagatgactcggttgatactgagttggtaacatcgcctgctagtgttaaaacccctgtatccaaagggaaaaagggtgctaagaagccccacgctgaaatcttgagtagtagtccaaagaagtctgatgaggcaggcagtagtaagcgaactgttgattcgggaagtttaaatgggtcgatcaaaaggcagaagccaaaattggtttctggtctagcaaagtgcacaacacatgacacaggcagtgaggacctgattggaaagagaataaaagtttggtggccgttggataagaaattttatgaaggtgttgtggaatcttttgattcatcaaagaagacacacggtgctatatgatgatggagatgttgaagtgcttaacctagctaaagaaaagtgggaaattgttgcaagtgatgacccgcctgtaaaggcccgaaaaaaggatcattcagggagaaaccaaggacgagctcaggataaaagcattaccagcagcaagcaaactccgccgcctgaacaagagaagtcaaaaaagaggccctcacccccaaagaggaaaggcaaaccaaaaggactgccgaaaaacaaacgcagaaagatagggggtaaaagttctgttgatgctgccggtgatgcgaatattgattcggattcatcaagttctctcgcacactcagattctgataatgataaaaaatctgatggacgcaatgagaaagaagtagtagtagccaagaaagcaaaagctgagaaagtgtctggcaaaggtgatgagccaaaagaggaggaacctgatgaccataatttaaacagcaaggaggaatctgacaacgagactcttagtgtctggaaaaaacgcacagctaaagcaacataggctttgctttctcggttgattattcttcgtaggatgcagatttcacgggcagcggatggggatgtggatatctcatttaattgaccttggaattgacagttgtgatgtagaaaatgttctttgcaatagcaacaggtttagtatagaagagcagtggaataggatttgcttctaatgttactagatgctagaacttgtttccaacttaattagctatggcattgtgccctggaatttcattgtatacgtatccttgagagggccacaggtcatgtaacatatccgtttagcattattttgcaggaatagtgattatgtgttaaaactcatgtagaaatgttgtaaacaataaacaatggttcttggattgtactgtacaactagaatgggcatcccaattttggggtgccttattctgaagcagcagattttgcatgtagaatgtgacatgtgagttgatacttcagatgctgtatcacagcatatgcttgtgttgaacatt

SEQ ID NO: 17799 - DNA, 865 bp, Oryza sativa
  ref <308>: DATABASE ACCESSION NUMBER: AK068223
  ref <309>: DATABASE ENTRY DATE: 2001-12-06
gtccttgcacctctgctccgacttccgagcaaagccaagttgctcaccgactcacccgtagagctagctagccatggctgttgccgcaagatgcgccgccgtggcgtgcctcctggtcgtaggcctcgcggccgtggcgggggtcgacggcgccacggcgagctccccggccccggcgccggccgtggactgcacggcggaggcgctgaagttggcggactgcctggactacgtgaccccggggaagacggcgccgagccggccgtcgaagctgtgctgcggggaggtgaagggcgcgctcaaggacagcgccgccgtgggctgcctgtgcgccgccttcacctccaagacgctgcccctcccgatcaacatcacccgcgccttgcacctccccgccgcctgcggcgccgacgcctccgccttcagcaagtgcctcgcaccggcgccgtcgccgtccgtggccccggggacatcgtccggcagcggcggtgcggcagcggcaccggcgaagggcgccgccgcagcgaggtctccgatggcatcgaccaccgccgtgctcgtcgtcgccgccgccgtggcagctcctctgctcgccttctttcacttctgatcgaggagtcctttcgtagcctcattacattctacagtttgtcgttgtgatcgtgattagactcggtgactttttgttgtgacaatttgagtttactgcatgcatgcaccctgccgtgattaatttagctctccagagtgagcattcatatttaaaatagtttccgtgagttatttttaatttgtatcgttatatgtgcatcatattattaagagcggttaaatttgacaaattggctacaaagtattttatatc

SEQ ID NO: 17800 - DNA, 977 bp, Oryza sativa
  ref <308>: DATABASE ACCESSION NUMBER: AK099044
  ref <309>: DATABASE ENTRY DATE: 2002-08-28
ggtcggctcgcctcggcttccttcgttggtccgcaccttctcccctcacccgccgccggggatccgctccgccgtctcgcctcccgccccgtggatccaccttgccgctccagatggaatcctgcccttcggtgaagaacatccttctgctggattccgaggggaagcgcgtcgccgtcaagtactacacggatgattggcctactctctcggcgaagctggccttcgagaagtcggtgttcgtcaagacccagaaagccactgccggagcagaagctgagattgtaatgtttgatggccacattgtggtgtataagttcatccaagacctccatttttttgttactggaggagaggaggagaatgagcttattttagcatcggtccttcaaggattcactgatgcagttgacattattctcagaaataacgtcgacaaaagaacagcactcgaaaatctggatctcatcctattgtgcctcgatgaaattgttgatggagggattgtcctggaaacagaaggaagtgtgatagctgaaaagttgtcagcacatggaatagaaggtgctacttcactcgctgagcagactatagttcaagccctaacaacagcaagagagcacttgaccaaatctcttcttatgtgatgtgctctgcttttggagctgaagatggagtagcatcccgttgttacatctctaggactgatacgttcattgcaatagaaacgacggaacagaatatctgaatccatttgcgtgtagagtggcacgttcccttcattgacactatctggttcagttttgcgagtatttaaaaaactgcacaaacaagattgtgaacggtgattgtttcaattttgattgttctttgttttgtagatttatatatatgttgttgtgcagtggatcaatatattgcttatggagatgaatgtctttctttaactcgcttttggtatattgaattaacaaaac

SEQ ID NO: 17801 - DNA, 2516 bp, Oryza sativa
  ref <308>: DATABASE ACCESSION NUMBER: AK068224
  ref <309>: DATABASE ENTRY DATE: 2001-12-06
gagcagcttccatctcctccccaaagccatcgtcttcgtctccaccctccccgggccatccccctccctcccgccatcgccgcgcgctcgaagctcgcctcgcctcgctacaggcgcggtacaggcgcgcccagcttccggcgaggcgccggggcggctcggataatcccctcagttgaaccagcaagtgacagacctaatggacatggaaggtgtgaagttcctgtttttgttggcctgcaactgctggggctttgagcaattggagtgataatgttgggtcctcaaattatttggaaagggctatagtacttgatgaaatgatgaagtcaacggtattttctgcggttgctgtttctattggttatacattacttggatgggattttacaaccgttttggaggctaatatccacatgaagaaggaatttggtttgaacaacggaccttctattgatggaataattttagcagtttcagttttcgggtctatagcaatcacagtattctctggatcgctattagattggcttggcagacgtgctgcactgatttactcttctctgctattgatttccggtggccttctaatggtgtggtctcctaacatatacattttacttctagctaggcttattgttggatcaggaagtggtctggttttcacctgtgttccgatttatatatctgaaacatctcctccaaatatgaggggatcactgggaactatgccacagttcatgttctttgtaggaatagtattctcctattgcctgatattctggatgacactgataccttcacctaactggagaattatgatcggcgcaatctttgctccttctttggtctactttgctttattggtgttctacttgccagagtcacctagatggcttgtaagtgatggaaaaattagtgaggcccgaatttccttacagtggcttagagggaaagatgatgtatcagatagatctgcaggagaaatagctcttattgcggatggtatgaacatgataacggaaacagctgttggaggacatgctgttggtgctgttcgaagtcaaagttttcttggaactagcacaaaccagatgtcgcgccacagtactttctattggcacctgtcagatccattagttggtcttcttggaagcatccatgagagtatgtcggaattaggagctgggcgaaacagctacttccctgtcttcaacagttttaatattgtggaacaagaacagacgagtgagcagagggggaatgatagtcttcgacaatctagggaggcatattctgctgaagaaggcaataatggaggtaatttgcaagcttctctactttcccaagtagcaagtgctgaaacaaacgatataaatacatcattcacctctgaagggagctcgtcatatttgagaagacatggtacatcaacatcagggcttgcgcaagatttaatatcttctttgcatgatcatgacattgaagaagatgacgaagaaattcatatagcagcattatctagccagcctgcacttggtgcagggctgcatccatttcgacaacaaatggttcggttgtctgaaacagctgacataaagcctaaatggagggtacttcttcagccaggagtcaggcatgccttgtgttatggaatgctgattcaagctcttcaacagtccgcaggaatcagtggccttctccgatacactcctcaaattcttgaactggtcggagtaattagtttgttttcagacattggacttgattcccattcagcatcgatcctcataagtgcccttaatgcttcgctgatgctcccctgtataactgctgcaatgatactgatggatgtctgtggaagaagggttcttctcctggtcagtatccccttcctaacattatcagttggtgccatatctttgtccaacatcgtgaagatgggatctttgccacatgaaatcctcttccagctctcattaaccatttgcttctgctcatatgtcatcggtctggggccaatacccaatattctctgctccgagatgttcccaacaagggcccgtgcaacatgtgcaagtttttgctcacttgccttctggtttggcagactactttcaatttactgcttcccggtgatgctaagtaccattgggctcagtggggcatgtgcgatttatgcattcgtgtgctgcttggttctcgtgttcgtctacttaagagttccagagacgaagggtcttcccttggagctcatagctgagattttcaagttttcaagacaagaatgtctatagcagatatgtgcactatgttcagtattcaaggtgacccaggctgagtgttgaatgattgcttgctagtccgtgtacatagacaaatgtaggtttgaatgttgcaaattttgtcctagttaggagattggccatagtgtttgtactttgtagttgttcattgtctttctgtgctttggagatacataaaaaaggaaaatcatacatggcttcttttgcagc

SEQ ID NO: 17802 - DNA, 1130 bp, Oryza sativa
  ref <308>: DATABASE ACCESSION NUMBER: AK068225
  ref <309>: DATABASE ENTRY DATE: 2001-12-06
gacttttaaatcgcctcaaaactaactgaatcactgaacacccgcacgcaccgcagtttagccatatcgccgccgccgccgccgccatgctcgcctacctcctccacgcccccgccgccgccgccgccgtggtgcccagcccgctctccctccgctcgccgccgaagacgcccttcctcccgacgtcccccatccgcgtgcccacgccgaggcggcgccccgccgcgttctcctccgccgccgccgcggtggtgcccatcgcggcgtcgctgctcgagggccccgtgctggtctgggccgggaggctctgcctctactacgcgctcctccacatcggcctcgccggctccccgcgcaaccccttcctcgcccacgagattggcgatgatggcgccggggacagcgacctagggttctcgaagtgggcggacaagctgcgcggcggcgcgccaggagaaaacgaagcccaggataagaggaagctagttagcaaatggaaaccaacaactaaaggcacgctgaagaggacttaccgagttcgttcagtagaagaaggtcggcggattcttaaagaaattgctttggttctctccgaagatgaccactttgtggacgcctccagtcacaagggttgtcaaataaggagggaaagtgcgcacggcgagagtgtgtgctgctataatgtgagagctctgttcgatgagcttcctacccctcacctagttctggagattacagctttccctgctggacctctcactgataatgactaccgcaaggccgagaggctcgaaatggtgctgaggatgagtgcttccatttaatttcagaacacccattttccatttcagcttacttttgcccaagctgtaaattttctaccgatggggctcgaaatggtgctgaggatgagtgcttccatttaatttcagaacacccattttccatttcagcttacttttgcccaagctgtaaattttctaccgatgggcctgtaaattgattcagtcttgctaagaagttaagaactacttgtaaaacctgagttctgctcaatctttctagaattctaatatttgtgctcagtctttctagaactctaatatcaagaagtctttgtcatagacctt

SEQ ID NO: 17803 - DNA, 713 bp, Oryza sativa
  ref <308>: DATABASE ACCESSION NUMBER: AK099045
  ref <309>: DATABASE ENTRY DATE: 2002-08-28
gctcttcctctccctcaactgcgcaagcgcttctccctccttgcgcggtagccggcgccaatccctaccctcgtggcggctggctctgctccctctccctgcgcagcagccgacgcctctccagccctctcccctatgcagcgagtcctctcctctctcatgaggtggaggaggaggcgtggggtggcgggggcaagatccaacgacccccaagcttgggaccagcacagcgttaagggagatggcgaggacggtgcgacgacggcaaggacagtggctccacgaaggaggaggtgcagggcggcggcggccagatccaagtgaattttttgctgcctcccgctttcactcacccttgcttctgttactccatctgtaagcgatgtctttgccttagcagccagatttgatgtcgtcctttggaaatttgtggccttctttatggggatctttggtgcttgcccgatttgctctccatgggtgttttggagatgcttgggctgattctgtcaccactggatttgccgcatcgtgactcgtgagctgctgcatcttaaggcgaaagattggtttctttagggagttgagatttgtttgtgtgtatctgcttccacctttataatttttgtagcgtcaatcttcatcgtatttaattatgtgtccttgtgaagcaaaacattgaatgaaaaactgattttctggggttggttttg

SEQ ID NO: 17804 - DNA, 1593 bp, Oryza sativa
  ref <308>: DATABASE ACCESSION NUMBER: AK068226
  ref <309>: DATABASE ENTRY DATE: 2001-12-06
gatcctcctcctcctcgcgccgccataaatcctcgtctcccgtaccaactaaacccccttctctctccgctggggttctcgccgccgccgccgccgccgacgatctcgtctcgcaccgcctctctctcggtatctgagatttggatcgggcgcgaggccggcggctccagtcggcatggcgcttgtgttgcattgcggaagtggcaacaaaaatgcctttaaggcacttattgctgcagagtacactggagtcaaggtcgagctgaccaagaattttgagatgggtgtctcaaacaagacccctgagtttctcaagatgaacccccttgggaagattcctgttctggagactcctgaaggtgctgtttttgagagcaatgctatcgcgcgctatgttgctcgcttgaaggacaacagctctctttgtggttcttctcttatcgactattctcacattgaacaatggatggacttctcagcaacagaggttgatgccaatattggaaggtggttgtacccaaggcttggttttggcccttatgttcctgtgcttgaggaatttgctattacttcattgaagaggtcattgggtgctctgaacacacaccttgcttcaaacacataccttgttgggcattcagttactctagctgatattgtgatgacatgcaacctatattatgggtttgttcggatcttgatcaagagtttcacctccgagttccctcatgttgagcggtacttctggacaatggttaaccagcccaacttcaagaaggtcattggtgatttcaagcaagcagagtctgtgcctcccgttcagaaaaaggctgctccccctaaggaatcaaaagcaaaggaggccaagaaggaggctccgaaggaggcccctaaaccaaaggttgaggcttcagaggaagaggaggcaccaaagccaaagccaaagaatcctcttgatctactgccaccaagcaagatgattcttgatgagtggaagaggctatactcaaacacaaaaaccaacttccgtgaaattgccattaaaggtttctgggacatgtatgacccagagggttactctctgtggttctgtgactacaagtacaacgatgagaacaccgtatcgtttgtgacgatgaacaaggtcggtgggttcctgcagcggatggatctgtgccgcaagtatgcttttggcaagatgctggtcattggctccacaccgcccttcaaggtcaagggactctggctcttccgtggtcaggacatccccaagttcgtcatggatgaggtctacgacatggagctctatgagtggaccaaggttgacctctctgatgaggcccagaaagagcgtgtcaatgccatgattgaggaccaggagccgttcgagggcgaggacttgctggatgcaaaatgcttcaagtgagcagcacaatgtttagaagcaaaatcatcagttgcaaaagtactatttaggacttgaattcggagttaaaacagttgcctttttggtggagttttgttacttgctgtttatttgacctggtataccttttgaactggttgatttttgtgcaatgtctcagattttgg

SEQ ID NO: 17805 - DNA, 1038 bp, Oryza sativa
  ref <308>: DATABASE ACCESSION NUMBER: AK068227
  ref <309>: DATABASE ENTRY DATE: 2001-12-06
ggcaaggcaggcagcagcgaccagacgaagcagagagagcgcccgcgccgcgccggccatggctgccgccgtgaccaccaccaccaccgccacaaccacccatctctgccgtggcctctcctcctcctccgccgccgccgccaagccgcggcgagcgacgacgctcagatgcggcgccgctgctcgggtggaagggctggggcggagggaggcgttgctcggcgtgctcctctccacggcgacggcggcgtccgcgcccgtcgccgccgtggccgcgaccgccgagttgcaggaggggttccgcacgtacgaggatgaggccaacaagttcagcatcgccattccacaagactggctgatcggcgccggcgaggtcagcggcttcaagtccgtcacggcgttctaccctgaccaagtcgccgactccaatgtcagcgtagccatcaccggaatcggccccgatttcaccagcctcaagtcgttcggcgacgtcgacgccttcgcagagaccctggtgaacggcctggacaggagctggaaacggccgccgggggtcgccgcgaagctcatcaactccagggcagccaacgggttttactacatcgagtacacgctgcagaaccccggcgagcagcgccggcacattgtctcggccatcgggatggcgttcaacggctggtacaaccggctctacacggtgacaggccagtacatcgatgaggacggggatgtagacaagtacagggctcagatagagaagtgtgttcagtcattcaggttcacatgaaagaggagcatcctacacaacatccaacaaggcgaggacgaaaaacattttgtaaaccaacgtatttcgttataattgtaaatcaatcagtatattcatgtcatcagttcaaccaactaaatgtacaccaattgttccgagattttgacgatgcggccttgccgaggccaacatgagctaattatgttgtggcaagtcataagcattgttttctatgcatttttaagggagaaaaaacaggtgtatttgtt

SEQ ID NO: 17806 - DNA, 1312 bp, Oryza sativa
  ref <308>: DATABASE ACCESSION NUMBER: AK068228
  ref <309>: DATABASE ENTRY DATE: 2001-12-06
tcatggagatcccagatcactgaggccactggacctggccaagcagcgcggccgcagcagcggcaatggcacggcggcggggagtgccgtcgacggcgcgtcgccggcaggttcggactcggaggagcacgtgctaccgggcggcgtcgggacgttcagcatcaggcacgcgtcaggtactccgtcgagagaagaggccggtagccatggcggcgtcaggaggagtgcgttcgcatttgcacctgcgcttcatggcgccaggatggagaatgcacatgaaacaggaggaagatctgggagtagggctcaccgtgcgccgtcgacgatgtggcaagattctgccattgatcaaagatccataggccagacaccatatgaagcagcaagagcagagggaagaagtagcgccagcagcgccgatcagggacccagcactccgagatcaaagcattcagcaactgatcagagaaggaggaccaagataaatgacaggcttgaaatacttcgtgaactcctgccacacactgatcagaagagagacaaagcttctttcctttcggaggttattgaatacataaggtttttgcaagagaaagtccaaaagtatgaggaagccgatccagaaaggaatcacgaggattccaaatccatgccatgggcaaaagtctactatagatcatgctggagaaacacaaagaacaccagtcaagtccagggggaagatttgtcaccatccacacaggacatgaacaacgaacagtacggtcccaagcacatatcggcagcacaacctgctctcttcaacacacagagtgtaaccagtacaaccaccagttcctcccacatggcaacaggcacaccacaaaatttggaaaagaacagcacacccagcaatcagccaccatggctgagcatgtcaacaatgcgccaagagtctgaaccaggcaacaaaatgccgaacaagcatgagaaacagacccttcacgatgaaaaccatagtatttctagcgcttactctcaagggtctgttccttaaccatttgttacttcaagactaaagttagcacaatatgtaactaacaggatactacttcaatttgcaacagattattcaacagattgacagaagctcttaaaaagtcaggactagatccatctcaagctaatatagctgtagagatcaacctggccaaacgagcaagagataatactagtgacaactcaaaggtatagagctttacaaagttgatttattcatgatgtttgaacatatagatcgtctgcttaataattattttgtacctttgtcctg

SEQ ID NO: 17807 - DNA, 2418 bp, Oryza sativa
  ref <308>: DATABASE ACCESSION NUMBER: AK068229
  ref <309>: DATABASE ENTRY DATE: 2001-12-06
ggtcaaatccgcgcctcgtagagggaggcaagaatcgaggggtccggtgttttttctgcgggatcgtgggggaatttttcctcggatttttccgtgctcgtttccgccgcgggcggcgtcgcagagcagtgtttgagaaataatacgagtcaatgaaattccgcaaagggacaaaggtggaggtgttgcagaaggggggtgcgccattgggttcctggaggcctgctgagattgtttctggcaatggacacacctatcttgtaagctatggctcatgtccaactcagggtagtgtggctgcggaaagggtgccaaggaaggcaatgagacctttgcgcccacccttggatggtattgtatgctgggtcaaaggtgagattgcagaagtctttgacagctacacatggaaggttgcggaagtggtgagattgcttggttttagttactatctcgtcaggctccttggatcctccctggagttgaaagtacatgcatccaatcttaggataaggcagctgtgggaagatggcaaatgggttgctattccaaaggattctgcaagattccctggtgattcacctagaagccagttgagatgtggaaaagttggccatgagttggtgcatacttcaagggacaaccgtcttctactgaagaaaaagaaagtatatgagggcaatacttctcagggcttgaagagaaaatcatctgcactatcagctttccccatgcagtacagtgaagtaagtaagagatttcagacatcacatagagatggaaggtgcctgcctgttgttcctggaggttctcttcatttgatggataagttgcaatccctgcggtagcccctatggatcaacacatcctcaagagtatgattgtgcagatatttgtagtaggactgatgatgctgaagtttctgtatctggaagagaatcgtttagtaggactgatgatgctgaagcttctgtatcaggaagagaatcacctgctcctgttaatgatggtctgaaagagaaaacccatttgcttgagttacatgcttatcgtgcaacactgatggcattatatgcgtctgggtcaattagctgggagcaagaggctatgatgactaatctgaggcttacattgaacatctcaactgatgaacatttatctgagttaaggagtttggtttcctctgaagttcattctagatagtcatatgaaacagtaggtgtctgtcttggtggttatgtaggcatatcacttattttacaattgcagagtcatggccagtgttgaaaccacatccagttggagtacttgatgttctgtattaaccatggaaacagggccgaagttggaggcttgtaaagcatccttcggtaggtccatgttgatggaggattttgtcacatggtctacatggtgatcaatgtggcaacatttccatcaaactttggttgaaattcagggagagcttccataatgatatactactactattttggcgatactgagtggtgagctgtatggctgtaccttcaacatactttgatgaggtagtgaatcaggtaagtaggcatattgttcattgtcaggtgtcagtagacagtacttatacaatatactcgtatttgctaattgttttccgtgacgtaaactgtatatcataagtacttcctgctacgcgatttgactctgacaagtgttagcacatatgtggtaatgcagaagttatgtacagtttcttattaacagacaacagttatgaaggagacatgattccatatctggccttgttgctgctgctgatggtttggtcatttatgtgcatgtccttttacatgattgttcttggtgtatatataattaatctggttcattgttctgtttcttcttttgtcttaaagaaattttatatcatgtcctgtatagtgataacattcagttttcttcctgtgcatatcgtggcgctttagatcactggtattctctgagaatatcacaataatgattctacatatgaaatgaatattggaccattcaatacacctagcctatgtgtcaactggaacattttttttctatctttacaaatgcaagaacatgtaatgggatggattttttttttgtcacatataaagtagtcacatacaaaggttggcaaataacaagctaccaaagcagcaacgtgggaaaatataactgaggagatgcagcaacgtgtgtaaaatataatggaggagaggaggatcactgtggtgcacaaaagctttttttttttttgttgttgttgtgaaaactaattacaactttttatagcatgtatgtatgtacacaataagagggtgaaatgtaaagcattaactgaacagctgatgtatacatgacttgtttctgaagcagtatggaatataatcctctttttcagcc

SEQ ID NO: 17808 - DNA, 2082 bp, Oryza sativa
  ref <308>: DATABASE ACCESSION NUMBER: AK068230
  ref <309>: DATABASE ENTRY DATE: 2001-12-06
ggtgcacctgtccgcgacgcatctgccgcagcttcgcagcagcagcagcatcatgggccacgccgccgcagccgccgcggcggcgcacgtgccgctgggcgcgatcaccgtcgacgacctcctcgccgcgggggtggcgggtggtgcggcggcggagctgcacgaggcggtccggcgcgcggtgggcgcgcgcggcggggacggggatgcggcggcggtgtggggggagctctgcagggccgcgtcctcgaggcgcgagggagggagttcctcggcgacaagtacaaggatccaatcgctagcttcaccgacttccacaagttctccattgagaatccagagggcaggcgtactggaagatggtgtttgaggagatggggattactttcagtgtggagccatcttgcatcctgagggagaacgatgcttaccccggcggcgagtggttgcccggcgccgtgctgaatgctgctgcgaattgcctgaccgcgaagcccacgaaggagttccgacgacgttgctatcgtgtggagggatgaggggaaggattctgagcccctcaactttgttactcttgaggaactgaggaaaaaagtttgcctggtggcaaatgcgcttgatgcactcaacctggctaagggatccgcgattgccattgacatgcccatgaatgtgaatgctgttgtgatctacctggcaattgtgttggcaggctatgtggttgtctcaatcgcggacagctttgctgctcccgcaatatcaatgaggctaaagatatcagaagcaaaagcaattttcacccaggattacatccttcgagatgacaaggaattgcctttgtacagtagagttgtggaagctaaggcccctatgacaattgtgatccctgtaaggggatcaacaccaataaaaggactgcgtgctgatgatctgtcctgggaagattttcttgcaaaagttaaccatgccaaggctgataattataccgctgttgagcaacctgcctatgccttcaccaatatcttgttttcgtcagggactacaggggagccaaaagcaattccatggacacacttaacacctctgaagtcagctgctgatggatggtgtcacatggatattcgcagaggtgatgttgttgcatggcctactaacctcggttggatgatgggcccatggcttgtttatgcctctttactgaatggagcttccatggctctttataatggctccctgaatagttcaggctttgcaaagtttgtacaggtatggatgcttcatggtagaatgttcaacctcatgaaaatcagtatcagaaactgtgcactatcttttgattttgttcaaatacataataagaattctcctaagtatcagtgtcaaaatgtttccaaaataatttagaatgtgtgaatagctcctgtgtaggcctatgcttttccagttaagttcttttggtagtaataatacagatggatgatgttccttaactttgttagtaggaacaatgaacagcgtagccatgaaatttctgatactctctttttctgtatatattctacaatttttcagtttgaattacaatattttcttatactattttctcattactgaataacttccaggatgcaaaggtgactatgcttgggttggtacccagcattgctcgttcatggaaaagtacagattgtacagctgggtttgattggtcaaccattagatgttttagctcatccggggaggcatccagtgtggatgattatttatggttgatgggaagagtttgctacaaaccagttatagagtactgtggaggcacagaaattggtggtggatttgttgctggatcattgctgcaacctcaagcattatctgcattcagtacacctgcaatgggttgtaacctgtttattcttgacaacaatggaaatccattaccacaagattctgttggtactggagaacttgcgcttgatccaaccttcctgggagcttcaacaacattgctgaatgctgatcatcatgaggtgtacttcagtggaatgccagaatggaacgggaaagtccttcggaggcatgggg

SEQ ID NO: 17809 - DNA, 472 bp, Oryza sativa
  ref <308>: DATABASE ACCESSION NUMBER: AK068231
  ref <309>: DATABASE ENTRY DATE: 2001-12-06
ggctggtcgggctggtgagcgcgtaccggtacgagggcccgagggtgagcgaggagacggcgcgcgcggaggcgaaggcgctcgtcgccgcggtgaagagcgccggccacgcggcggcgaagctggtggagaacgacgacgtcgtcaggatcctcaccacccggagcaagccgcacctcgtcgagaccttcaagcactacaaggaaatccatggccgccacatcgaagaggatcttgggcacgaggagacactgagggaggcggcgctgtgcctggcgacgccggcgaggtacttcagcgattgctcctccgatctgtcgcctcgccttgtcagtgcgtcgccatcgtgtacgttgttgctgctgctgttgttgttgttgtgtttttgttgcatgcgtggatcgagacttgtaaacttagcatttcgcagcagagctgttggtatggaataaggtcgatttaatttttctcg

SEQ ID NO: 17810 - DNA, 3104 bp, Oryza sativa
  ref <308>: DATABASE ACCESSION NUMBER: AK068232
  ref <309>: DATABASE ENTRY DATE: 2001-12-06
ggggtctctgggttctctgctccctaacagaaaagaaagaaagaaagaagctttcaccacaaaaacccaacccaccggtggacaagaggaattcgactattccagatagggcgacatggactgcgagatgaggcgactctagtgccagtcactccggtggcccattttttcttcctttttcaggggaaaaaaaggaaggaatttgggtagatcaatcaatggagcagagaaattcgatgtttgtttgtttgtttgttcaatagaggagagcaattcttggtcatgtatgcatcttgcccacagtggaaggagtgagtgtgatttggaagacgcaggtagagggtgtgccttccaggtgttcgatcatttgcctcaaagaatccatatcctcttttgtgctactgtccagatgatgttcaggaataataacagaaagaaaactccaagagtgctgacaagtgacaaccaggagatgcagacatgcagttcctcgatgaatgattcctgatgtccttgtacagttgtcctcagccatttggaacaatggggattctttgccggtatgctctatcatcaggaaggaacatttctgtgagaagagctgctacaagatatgtatgagttagttaaaagaaaaaaaaagatactagaaaccaaagctacagaagaagcaattagaggggcctaactcatcattgtgagcctgaacataatgcagtgttaaagataagtcaacaaagcttcttgtctgagtccacttatgttctgaaaatggcatggcatgcagatcagacaggacatattgctgcagcacctattaatctgcctactccttaagcactaagaaagaaatatatactaaagtgtttattccagttatttttaggtgggacaagatactcctgagtaaacaacccatcattactttgtgatacaattaggcaggccaatcatggagctaaatggaatagaacttgcttagggatagcttataggttttctctttgcaccttaatagatcttcacatccttgttaagagacgtgcctttaaatgattaaattaaggaagtacatgcaagtggtaaagcttttcgggaatacgcaaggagcgcattttttccattaagagaaataaaagttatttacatttgaaagagaaaaacagcacgggactgatacaggacaataacagacaatcctaggtctatctctcgcgcaagtggtaaagctgataggtgaaaagatgagtgtctttctaataaagcttctcaccttacatgtaaagaacagatactaaatattatgttaacatggaacgtaaggagctgtcattgtacaaagaggatcaacagcaaagtaatatttcttttctagtatataataaagtttgtacaatccaatagattcttaggagctattttttcttcaagtgaggattttgatgcatatatgtaggcatcatggaatcatatgccttgcttccacattaacttaagagcagtctgaataagcataggtcatccaacttgtcaggtttaatcgattttggttagaaaagcaaagattatctgtactaatgcagagggaccaaatggccatcttgagttactttaccaaggtctcatgtgggcagaaaaggcaaagcttatggtaaaatgggcaatgatgagaaatgtgctctccagtgtgtcaccacaagcactaagacactatctaatggttggaaaacgtcacaggaaccatagaagaagatcccaggttcatcataatagaagctgaacaaagagagcagagcaggggagcatgcttactttcaggaaaagattgaagtggactgaagtttcaactggagctccaatagacaccacattccccaccaagacacaagtttgggagaagagaatccatgaagagctcttcagttgcaccaaggctgaaacaggagagacaagatgactgtaagtttcaggaaggtgatgtgaacagccttgagcttcggcttggcatatcttccgacaatgaccagatcagtggtggtggtgctgctagtccatggcttggtgtgggagtgcacccttggagcctggctgcaaggcaagggaaggcagccttggagcaagctcaccagaggcctaatgaatgtgctgtccaaagagaaaaccgcgcggcttcatcagctcagctggtgggatggccaccggtgcgcgcattccgcaagaacctgtccaccccaaaacctgcagatgcagatgacctgatgaacaaggtgaagctctgctctgatgagggccatggctccagatgtgcagcccaagagaggaggtcatcatcaaccatgtttgtgaaggtgaacctggagggctatgctgtcggaaggaagatcgacctgaaggcgcaccgcagctatgactctctgtcccaggctctgcagagcatgttccatggcttcttgtcagatggcattgcaactagagacaatgagctgcagcagatggaggagggcagcaagaagaggtatgttcttgtgtatgaggataatgagggagaccgcatgctcgtcggcgacgtcccatgggagctgttcattgcttcagtgaagaggctctacattgctcaggatcctagagttcatgcgaaggctacgataatagcaatgttgcaagctgatcctgaaagcctggaccgcaaccgaggatgagaaagatcgattgctgcttttatcatgagcagatgcaaggaaatatatatatggcataggatgacaggagcatcatattcaaagagacgaagcagcaatatgtgctagtgtttagctgacatgctgtccctgttcgcttaattagtagaatgattaaatttgccttggttgtgcttgagggagctagtgctcatactagactatactaattccctaaaaaaaaacaacaaaaaaagtagacttctagtgcggttaatgtagaaagttttggttgtgtatatattttttgacctgttgtactataattgaactgatggtgcattagctagtgcttgttaattagcttgtactatgtgtgtgggtggatgtaaatgacactgggtgcaataaactagtcttgggtcc

SEQ ID NO: 17811 - DNA, 2143 bp, Oryza sativa
  ref <308>: DATABASE ACCESSION NUMBER: AK068233
  ref <309>: DATABASE ENTRY DATE: 2001-12-06
ggtgtgagctttaactccccccctttccccgcggccactagggtttctcctcctctttcctctcctcctccgccccgacgcctcgctagggtttttgcctctccctccgccgccgccgctgccgcgaggagaggagggggggagagcacccagccggcgagccagccatgtcgctgcgcccgagcgagcgggtggaggtgcggcggaaccgctacaaggtggcggtggacgccgaggaggggaggcggcggcgcgaggacaacatggtggagatccgcaagagccgccgcgaggagagcctcctcaagaagcgccgcgaggggctccaggcccaggcccccgtccccgcctccgccgcaaccggcgtcgataagaagctcgaaagccttcctgctatgattggtggagtttattcggacgataacaaccttcagcttgaggccacaacacagttccgcaagttgctttctatagagaggagccctccaattgaagaggttattcaatcaggcgttgttcctagattcgtgcagtttcttaccagagaggatttcccccagctacagttcgaagctgcgtgggcacttacaaacattgcatctggcacttcggagaatacaaaggttgtcattgatcatggggctgtaccaatatttgtgaagcttcttggttcttctagtgatgatgttcgtgagcaggctgtatgggcattgggcaatgttgctggtgattcccctaagtgccgtgaccttgttcttgccaatggtgcattgctgcctctgctagcacagttgaatgagcacactaaactctctatgctaaggaatgcaacttggactttatcgaacttctgcagaggaaaaccacagccatcatttgaacagactaggcctgctcttccagcactggcacggcttattcactccaatgatgaggaagttctcactgatgcgtgctgggctctttcatatttatctgatggcactaatgacaagatccaagccgtgattgaagctggtgtttgcccccgtcttgtggagcttctcctccatccatcaccttcagtgcttatacccgcactacgaactgttggaaatattgtaactggagatgacgcgcaaactcagtgcatcattgatcatcaagccctcccttgcctcctaagtctgttgacacaaaatctcaagaaaagcatcaagaaagaggcttgctggactatttcaaatattactgctggtaacaaagatcagatacaggctgtcataaatgctggcattattggtcctctggtgaatctgctccaaacggcagagttcgatatcaagaaggaagctgcatgggccatctcaaatgctacttcaggcggtagccatgatcaaatcaagtatctggtgagcgagggctgcatcaagccattgtgtgatcttcttatttgcccagatataagaatcgttacagtttgtttggagggtctcgagaacattcttaaagtaggagaaaccgacaagaccttggctgcaggtgatgtgaatgtcttttcccagatgattgatgaagcggaaggtttggaaaagattgagaacttgcagagccatgataacaatgagatctatgaaaaagctgtgaagattcttgaggcctactggatggatgaggaggatgatacaatgggagctaccacggtagctgctccccaaggtgctacttttgactttggccaaggcggtggtgctgctcaattcaaataaatacagatttgaccagaggtggtaaattgtggccactgtgcggggtactgaattgttctggtggttcaataagctaaaggtttcaagggggccagtgttacattatttccctactggtcacggatatcatatcactacgtctgtaacagggattaaagctttgaagtctgcgtttttcatcaggctactactatgtagtgtttgcatcttttagtatggtgtgcaacattttgctacttgtatagcctgagtcgaagcttctgcaaagccgtcacaacacattcctgaacccgtctggttttgagtttcgtcaggagtgtgctgagttgcagtttgtccggacatgtaaaccattatgccttttaaattatatattgctagggtttgttcggttc

SEQ ID NO: 17812 - DNA, 1199 bp, Oryza sativa
  ref <308>: DATABASE ACCESSION NUMBER: AK068234
  ref <309>: DATABASE ENTRY DATE: 2001-12-06
gaatttttccctgaaaatatttgcagtgtgttcccaacagcatgatcaacctgtttcagttaagggtagacagagcatgatctttcgtttcccctttctttaacagtcagattttcagtccaaaaccggagaattatatattagaagtccaccacctttggtttcttctgtaaagaaatttaccgttctcctaaagaaagagagaaattttacctttctttttcattggatcacaagctaactcaagcgagctgaataatatattactgaagatttgaattgtgccaaattcggtcatctttagtgctattgcaagaattggtgaaagaaaggtgctcttggagggttcttggagcagtacaatgttggccaaaagattgaaaagatgcagcattcttctgttcgcctttctcctcgcagacgcatccgggagtcttcttgagagcagcggcggccaggccgaggcgatcggtccacagatctccccggcgacagagggcgagggcaagaggcggtcgctggcgacggggatgttctgcgtggcgctgccgaacgcggacccgacggcgctgcaggaagggctgaactgggcctgcggccagggccacgccaactgcgcggcgatccagccggggggcccgtgctacaaggcgaacaacctgccggcgttggcctcctacgcctacaacgactactaccagcgcaactccggcgccggcgccacctgcagcttcaacggcaccgccaccaccaccgccaccgaccccagttcagggcaatgcgtcttctcaggaagctccatggccggaggcaccacgccggcaggcgaacgcgccgtccgccgtcggcccgttcacgccggggttcggcaacgggtcgtcgccgacgttcccggggacggggagccccggcggcgcgctgacccccttcgacgccgccgacagcgtcatgtccggcgctcgccgggcgctctgcgcgctgctgctggcgtcgccgatcttcctctccctcgttctctgatcagcagttcggcactagttggagtttgtccatgtaaattatgcatatggcattatgtcattcgttataaattcactcaccagagagagtcagtgacgactcaggagtcagagtcaccttgacatgttttattcccgagtaaatgaccagtgtttatatgtcagatgtcagattggatc

SEQ ID NO: 17813 - DNA, 3008 bp, Oryza sativa
  ref <308>: DATABASE ACCESSION NUMBER: AK068235
  ref <309>: DATABASE ENTRY DATE: 2001-12-06
gccgccccgcgattccccgccgcctcctcgcttctcctccctccgcacgcatcctccttcctcgcgacgggccagcgccgccgcaccgccggaccagcgccgccatcccaaatcgcaaacagccaaaccccaccaggcagacccggaccagcgccgctacgcctccggccttccaccaacgactccggtgctaccaccggtgccggcacgatacggacgccgctattcctcccacctccttgccgcaggtcgcgagtcaccgcgattggcacctccttgccggacaccgcgcgacccccctagattcacgcccaagctccggccgacggtttcctctcggctctcgcgacacgagaccacgcatttcatcccctgatgatccccttccgtgcaccggtaactccatctcgatccccttctcctccgtgaatgacagatcaatgtcccctcttctccataccgtgcgtggctagcgctatggagcacttctccaactgaaccagccatcttctcatctgcgccaccaatgcaccctcaatctccatggccagttggccacacactcaatcttcgtcgtcgcagctcctcctgtcaacacctgctctccgtcaacaaaccaccggccaactcatctctccagctaagaacgtgagatgtcggtggtaatttttagccgaccagagatgctggcaatcttgcggaaacaacaggtgttaaatcttttctttatgcacacaagatggtcgatgaaattacccaatgcatgacatgcactgaaatgcttccctcgcattctacaactactactgttatgacttatgacaagttggatgttgatgattggaactttgggagactgtcttgggaggataagaaccacagaaaccgctttgctttccttgcgctcgggtgtgcacaattattacgatgtgccagcaactgaaatgagcggtcaatttgttgttgtgcacttgtccacgttgtagagtggctgttttctattctctggttgaattggaattttttttcctcacttgtatctgttagtacgcaaggaattgcccacagccaatgagttacagggaaatggaacttggagatacagatatatacatactggagatggctctgttagtagcttcagaggtgatggctttggggtgtccaccaacctcgagatcacaatacatactccaaaggcttcaggtacaacaaagtattgcctttctttttttttactgttcagaaggaattatgaaagtatttaaattgagtataaaaagatatggtgttgctaacttcaagaaaatgtctcacccaatttctgcttttcctgtctggttaaacaattaccccttgtagagcaagtgagcataaagtagaggtcattatatttttctttttgctgcaattatgtttccaaatgaattaaattatgcctgtacaatttgttcacaggcaagttcataatttttcaatttagttcagttctcagtttccatctgaatatatggatcatcataacactggcaaactgtatatacagctctgtggcatgaatttgttggattcatgctattgatccttggctcggtcaatttatttttctacatgtgtatatgcactgagaagagtcaacagaaaggaatgatgagtaatgaggcttgaaggaataatagtctgtaaggtgatgcatttatattagtttaacaaacaaagggaagattgattcatgcatattagtttagcaaacaaagtgaagaattgatgcgaaggatctgatcatgctttggatctaaataccaaattgatactttcttgtttggggaaaacatttttttcctgttaactttgttaaatgctttagtttatggtttttacacaatgcctttattttatcactggaataatgtgaaactattaagttaccaaatactctgttttcttaccagatgatattttacgtctccagctcactttgtgcactcttagtatttgcattgcattgtgtcttccttagctataaatgcagcaatctgaaagaaactatattgaaatgccaaagtaggaaacatctaatatattatggagtagaatagtatatatttgctaataaagaattttttatgacctggtttaagttatatatagctttcttcaagaatataaattttataatcatctctccatttgccaccttatcttgaagaagtttagttaccgtcatccttaggaatcgtaatttgttgatcaaaataattttcgtagcttctaatgtacatgacttaaatttaatttccatccccagtatagccaacatgaaggctcataactgtggattatgaaggaaggttttgaggtgctgaagcaaaactaattagggaaatattcaatatatttctggtatttgaagttggttcgtgcactgacatggttggatctatactattgacagaagtgatattgggagtcttttgttcaattggtagtgtccaccaacaatgacagtgatcgagaggcaagttgtcgtccatgaccagagattaagaagaataacctctattatttgaagtaatcggcattgaacacggtgattcggtgaaaactacaagttggtaagccgaatctgttttggagcaaggtaagcctcctttgggacagaatggcagggatacactccttcaagaataaatggagcttgtgagaactatgaacacttcttgatatttagctttgattgcccatatagtattgttcttgtttttttttcatgttcatgaaaaatgtttgaaaacgaggatcgtgtgaattaagaaatgatcatttaagggtttttgtttctttattgttagacgcttagcacttgcttatttgtaacactatgaagttgcaaaactacttatacaaagttgattaattgggctcaagttccaatcaaatggtatttacttattgttgtaaattggtacatgcaatagaaactttgaatgtatatttcttcacctggc

SEQ ID NO: 17814 - DNA, 2072 bp, Oryza sativa
  ref <308>: DATABASE ACCESSION NUMBER: AK068236
  ref <309>: DATABASE ENTRY DATE: 2001-12-06
gtacagagacgaaagacacggggaaataaacaaacaaaccaaaaaaaataaaatcgagaaaaaagtggagatataaattcaatcgcaggaagcgaagcgcggatccgcttcctcatccaccgatcgccccctccttcatcctccggtagcagtcatggcgtcgtcggcgctaatctgcgacaccgagcagtggaagggcctccaggcgcacgtcggggcgattcagaagacgcacctgcgcgatctgatggatgatgccgagcgctgcaaggcaatgacagctgagtatgaaggcatatttctggattactcgaggcagcgtgcaactggcgagaccatggagaagctgtttaaattggcagaggcggcaaagctcaaggagaagattgagaagatgtttagtggtgacaagataaatagcacagagaacagatctgtgcttcatgtagctctaagggctccaagagacgaagtaataaaaagtgatggggtcaatgtggttcccgaagtttggggtgtaaaagataaaatcaagcagttttcagaaacttttaggagtggatcatgggttggggcaactggtaaagcattgacaaatgttgtgtcagttggaataggtggtagctttcttggtcctctgttcgtgcatgctgccctccagacagatccagaagctgcagaatctgccaaagggcgacagttaagattccttgcaaatgttgaccctgttgatgttgcacgaagcatcaaagatttagatcctgaaacaacacttgttgtggttgtctcaaagaccttcacaacagctgaaacaatgttaaatgctcgaactctcaaggagtggattgtctcttctcttggacctgatgctgttgcgaaacatatgattgctgtcagtaccaatcttgagcttgtggagaagtttggaattgaccctaaaaatgcttttgcattttgggactgggttggtggtcgctatagtgtttgcagtgctgttggtgtcctgcccttatctcttcaatatggttttccgattgttcagaaatttttggagggtgcagccagcatcgacaaacacttccgttcatcttcatttgagaaaaacatacctgtactccttggtttgctgagtgtgtggaatgtttcctttcttggatatccagctagagcaatattgccctattcccaggcacttgagaaatttgcaccacatattcagcagcttagcatggagagtaatggaaagggtgtctctattgatggcgttcaattgtcctttgagactggtgaaattgattttggtgaacctggaaccaatgggcaacacagcttctatcaattaatccatcagggaagagttattccttgtgattttatcggcgtcgtgaaaagccagcaacccgtttacttgaaaggggaaattgtgagcaatcatgacgaattgatgtccaatttctttgctcagcctgatgcacttgcttatggaaagacccctgaacaactgcacagcgagaaagtacctgaacatcttatctctcataagacttttcagggcaaccgaccatcacttagtttattgctgccctcattatctgcttatgagattggacagcttttatccatctacgagcaccggattgcagttcagggtttcctatggggaataaactcatttgaccagtggggagtggaactgggaaagtctctggcttctcaagtgagaaaatctctgcatgcatcccgcatggaaggaaagcctgtccaggggttcaacagcagcactgcaagtttgctgacacgatatctcgctgttgagccatccactccttacaacactacaacaatgccgaaagtttaatatgatgtgtttggcacgctattttctttgagttaaacaaggttgagccggcatattctgtaataagtttatttatgttccttttgaagttgttacaggcttacagcccgttttacagtaccatagttttgttgtttttttctttttatttactccgacttccaggagaacaaaatggaaaagaaaaaggaaaggaaactattttgcaataaat

SEQ ID NO: 17815 - DNA, 2056 bp, Oryza sativa
  ref <308>: DATABASE ACCESSION NUMBER: AK068237
  ref <309>: DATABASE ENTRY DATE: 2001-12-06
gtccacctcgatcgccatcaccaactctcgatttgcgaggtgaggacgagctcgccccgggcttgattagctcaagccctgaaccccccagagcagcagcagcagcagcggaggaggaggaggagggagaagagtgcgggcgcctcgggaagccggccgacagtggtacaattctgcatccgcatcgtatctccacatgagcaaaagggggcctggaaagcacgcgcttttgagaaattaggagaaaagggatacatgcatagcgagatcttgatcttggaatggtgtccagtcgaaggaacaccgggggaatccagcgggatgggtcgctccgggactggtctgaatttgttgacccctcaccgtctcctaaattgttgtattcgcaatcgtatgttgcaatgagaggactgctgtcttctttggtctcaatggattttgccttactgtcaagcaggctgaaatctgcatgggcggctatactgtcccagaggcatactcggtctcccgagaggtcgaaatcgagggggctgagctgcaagagacttgcatttcatctgtttgtgtgcttcatggtcggcatcttcattgggttcatgccgttcttctcggtcgatgtctctcagaagatagtgtctgaaaacgggaggcttccgtttgatgagggtgcagttgataggggaatggtggatggtaaagttaaggagctggagacaattgtggtggagaaagaggttgacataattgatgagagcgaggttgaagagagtcctccagtccctgcaatgctggatgacgaggctgattttgttgaatcagcccctgcaatacctgatatcaatgatttggacatcactgtgagaaagcttctgataattgttacgatcactactgttcggccacaacaagcgtattacctgaaccgtttggctcatgtcttgaaaactgtacagtctcctcttctgtggttagtggtagaatggcctgatcagtcctttcaaacagcagaaatccttaggtcttctggggttatgtacaggcatctcatctgcaggaagaatactaccagtgtacggaaaattgctgtatgtcagaggaatactgcaatctatcatattaaaaagcatcgtcttgatggtataatgcattttgctgatgaagagcggtcatacatgagtgatgtatttgaagaaatgcggaaaatcaggcggtttggtgcatggcctgtagcaattcatactgggatcaagtacagggtggttttagaaggtcctatatgtaaaggtaatcgagtcactggatggaatacaatccagaacatccagaagaagagtgcagttcgtcgatttccagttggtttctctgggtttgctttcaacagcacaatgctatgggatcctgagaggtggaaccgcccacctatggattctgttattgtccactcaggtggaagaggtggtttgcaggagtcaagatttattgagaagcttgttaaacatgagcgccagatagagggtctcccagaagattgcaacagggttatggtttggaattttaacttggaacctcctctactcaatgtcccccctggctggtcattgcataagaaccttgatgccgttattcctgtaacataatattttgatgccatgccacccactgtgtatgctcgtacctcgtacaggtggccatgaggctgctcagtgatgccttcctgaacaaaccgcacactggattacacgaagttgccgtggtttgatcctccagcaattgtcatatcagattatcagtagctgtgccaagcaagatgcctgaccaaattttttttcctttttttttcttctccacttccttttttttttttgaggtaaatgtgtacttcccttttgtattctgttcattttttcccccagatatccaccagctagatgttcccctatagattttttagcttcctttgttttactgtgtgttaccttacagatgtaaaatcatgcagccattgtaactgttaagagcaaagacaacactattgatacatgaaaagatttgaatc

SEQ ID NO: 17816 - DNA, 863 bp, Oryza sativa
  ref <308>: DATABASE ACCESSION NUMBER: AK068238
  ref <309>: DATABASE ENTRY DATE: 2001-12-06
ggccacccctcctcctcctcctcctcttcctccttgccgccgcgacggcgacggcgacggcgacgggcaacgcgctgccgccggagccgaagccggcgcggtggccggacgtcttccacgcgaggctgttcacgaacctgaccaaccactccgccgcgtcgacggggccaccgctgcgtgtcgccgacctctactacgactggtcgcggcggcgcaacctcaacctgatccgctaccagctcgccgccgccgacgacccgctctacgacgtcgagtgggacaacggcaccaccttctacttcgactcccgctcctgccgcaccgagcgcttccccgtcggcgtgctccgcccgggctggctcgccgacggcggcggcgtcgtctacctcggccggtggcgcaccggcgggatcgagtgcgacgtgtgggacaagctggggttcgtcgtctactaccaggaggtcgccaccgggcgccccgtccgctggaacttcctcgacaagacagggatacagcaattcgtgatgagcttcgaggtcggcgtgaccctggaggacgattcccagtggcaggcgcccgcacactgcttccctgccgccgccgcagacgaagatgaagaggaagaggaagatgaagaacaggatgagatgatcaagagcagctatgatcacattgagggtgtggatgacgggctcgacgccgccaggttactcaggatgctcgcaggagctgcggcgttttagttaccaagtggctcgaatttttgtgcaaacatatactggtacaggcttacagcacagtactgtataagagagtgtggttaattcaggaatttttcaagaagggttaattggatccatgcc

SEQ ID NO: 17817 - DNA, 1251 bp, Oryza sativa
  ref <308>: DATABASE ACCESSION NUMBER: AK068239
  ref <309>: DATABASE ENTRY DATE: 2001-12-06
atttagattcaatggaaattcagaatcatggtgtcgattttgatgccgcggaaccctctaacgccaggaatgagttgcaaatggataaaagagaagaaacttctgaggaagatttggatgaccaaatggaagaaacagaagatccttctgaggaagaattggatgatctcgtgcttaacatcgtgacttgcaagccaaaaagctctgtagcacaattgaatagcgaaaagcaagcagcggataaggactcgcgcttcagaaaacgtcaacaatttgaagaatcttctctgcagaagaggcataaatcctctgatttctctgaaactagaaataggaaacagtctttccctgctatatcaggagccatccaaaatgaacaaaaatcttcagatttgtcaggaaaaggtacacatgagttctcatcagaactcgatggagataaaagttctgctagtgtccaagatgttgaagcactagcagattcttctaccagaaatgggagtgaacaaaattcgcttgctagtgaacctaaaagagtttccttgtggactcagaaatctgcctggagggatcttgttggtggcatggggagtgcatctttcagtctatcacaaatattgccaaacaccaatccagcaccaccaaaagtttcaaatgctaccgaggcctctgcttcacatgctgagtccaggacgaaagtgaaaccaagcgggaaatctttgaaaccctcggaagctgcaactcagctcttgcctgagcagaagatgcctacaagttccatggcaatgctgtctagtgagcgtaaggagaataataagctggaaaaggagagggtggttccaaagatcactattggtgaagtgtgtccgttcatgagaaattcagagtcagaaaagcaatggtcaaaggcaaagaaggttctgactggtttcatcaagaagggcaatgagagcactggatcgaatgtcgggaaagggaagccatcaacaaggagataacaacgtagcatgtcattccagcttcatcttgttgaactacaagctcggtagcatgtcattccagcttcatcttgttgaactacaagctcggtggtttcgtgtctcataggaacatgtgttattttgttgattggtctcatagtctgcctgttaagaatgatctgtctttgtttgtgaagcacaatgctatgtacgagttttgttcaaattgttattattctttgtacgagcaatttaaagtcaaacatgtttc

SEQ ID NO: 17818 - DNA, 1606 bp, Oryza sativa
  ref <308>: DATABASE ACCESSION NUMBER: AK068240
  ref <309>: DATABASE ENTRY DATE: 2001-12-06
gtgctgatccccagacgccggcggctactgcgtttgcgatgcccgccgccgccgccgccgccgcgccgcccaatcccaacgttctgcagctagccccacgcctccgaggcctcgtctccttcccctcctcatactcctcctcatcgccgttctccaaccgcctccgcctccgcctcccccgcgccgcctccatgtccgccgaggcgcgggtgcccgtggcgccgccggcccaccccacctacgacctcaaggccgtcatcaacctcgccctatccgaggacgccggcgaccgaggggatgtatcttgcttggcaaccataccttctgacgtgaaagctgaagccacctttattgcaaaggaggatggtgttgtcgctggaataagcctagcagatatgatatttaagcaagttgatccatcattgaaggttgaatggtttgaaagtgatggaaattatgtccataagggattgcaatttgggagagtatatggttgtgctcgcaacattattgttgctgaaagagttgtgctcaatttcatgcaaagaatgagtggaattgctacaatgacaaaggccatggccgacgctgctcatccagcatgcatactggaaacaaggaaaacagctccaggtttacgcctcgttgacaagtgggcagtactaattggtggtggaaagaatcacagaattggcttatttgatatggttatgataaaggataatcatatttctgttgctgggggcataacaaatgcaatgaaatttgttgatcgattcttggcgaaggaaaagcttgcacttcctgttgaggttgagacaagaacacttcaggaagtaaaagatttattggagtatgctgctgagaacaatacctctttaactcgtataatgttggataatatggttgtccctcttggtaacggtgatattgatgtatcaatgctcaaggatgccgtggagttgataaatggtagatttgagactgaggcatctggaaatgtgactattgacacagtgaagaaaattggagaaacgggggttacctatatttcaagtggagcattaacacattctgtaaaggcacttgatatatctcttaagatagacactgaactcgctctccaagttggaaggcgcacaaatcgcgcctgactctacagaactaatgtaaccttgcaagatctgcagggtgtttctgtggcgtggcttgccagtctatcaatccatgcccttctcatcaacttgtaagcgttgagtgtacaacaaagaatgtgttttcccatatttatgggatataaaccaacaccacataatacagcaaaataataacattaccttgtaggcttgcctaccgtcctagcatttgtatttggtagaaaaaaaactgcagattgcggcaagttatcgaattttactcaggtattaataagactttttgcaccatgaaaaattagcaagctggacactgtaaatgggatgtgcgcggcattgaacttgcagttctgcacttgtgtttgaccaaacaaacactataaaatggtgatgtttgtgatctacaaaagaaaaggaagtctaacacagcagtgcattctttttcagattcc

SEQ ID NO: 17819 - DNA, 1036 bp, Oryza sativa
  ref <308>: DATABASE ACCESSION NUMBER: AK068241
  ref <309>: DATABASE ENTRY DATE: 2001-12-06
gacgagcacacgctactcccatccccactctcgtcgctcgtcggtataccaaaccgaaaagctagtcaatccgaccccacccgatccgatggccgccacatcgccggactccggcgacctcatcctggtcgagccggccaagccggggtcccgggtcgccgtcgtcaccatcaaccggcccaaagcgctgaacgcgctgacgcggcccatgatggtctcactggccgcggcgttccggcggctggacgccgacgacggggtggcggcggtggtgctcgcggggcgcggccgcgcgttctgctccggcgtggacctgaccgctgcggaggaggtgttcaagggcgacgtgaaggatcccgccgccgaccccgtcgtccagatggagcgctgtcgcaagcccatcgtcggcgccatcgccggattcgccgtcaccgccggatttgagatcgccctcgcctgcgacatcctagtggccggccgctccgctaagttcatcgacacccacgccaagtttgggatattcccttcttggggtctttcacagaagctttctcgtgtcattggaccaaatagagcacgggaagtgtcgttaacttgcatgcctatcacagctgaaatggcggagaagtggggtcttgttaaccacattgtggatgatacccaggtgctgagtaaggcaatagaggtctgtgaggccattgcaaggaacaatcgcaacttggttgtgttgtataaatctgttataaatgacgggctccagctggacttggaacatgctcgagctcttgaaaaggaaagagctcatgactattacaatggtatgacaaaagagcaattcgcaagtatgcagaaatttatacagggccggagttcgaagccaccatcaaagctgtgatgatatatgttctgtaccactgtatgtaccgaaatatcaatgtactgtatacatccactgaagtgttcaatgacctgaaagaaaaataaacactgccaatgttgcatacaaagaaagtaccatcttcacatgtgttattgg

SEQ ID NO: 17820 - DNA, 1739 bp, Oryza sativa
  ref <308>: DATABASE ACCESSION NUMBER: AK068242
  ref <309>: DATABASE ENTRY DATE: 2001-12-06
gatcgatgaacagaaatataatctggctttgccatggctctcttcctcctccaactctgcctcccctaatttctatttctctaatcctagtctcatgcttctgccttctctatgttgctcttcccaatccctgattctactctcttgattgtatccctgggcacttgtattcttgagtggatttgcaatatattggtggcactgtgtgtgagagatttggtgtgattgtgttggttcgtgacagatcggggcgacgtgggggtgggaggagagagcgccgcccaacccgagacggtggaggacgccggcggcgagggcatcatggcgggcgccgccgccgccgccgccaagggttccagatataagctgcatggcaagaagagcaaagttgacaatcaacctcaaattaaggaaatccacgataaatgtggaacaattaatacatgtaagactaaggcagatactaaacttcatggggggaaaaactgcatatatcaaggtctgttctacaatctacataacatctaaagttctctccccaaaaatgacaaaagtacaaaatcttcattgtgtccgtttttgaaacctttattttgaagaagtttgatggaacggtgggagtgccaatattgagatccaaaagggttccaccatcagaggtatgctttgattattgattgaattatattgtggaaaaccaatgttagaaacttaaaaggctccatgacataatatttattttgattggctgataggactaaatggccaagacaatatttttgaatttcaaaacttttacatccttgatcctggatgtatcgaatacaccatgcgaaggtagatggtcaaagttgtgcctaactgcctatgacccctcgctggtaacctcaatgcactttcagtaattttactgtacaaaatgaagtgaatatcttttgcttaacttatagcatactccctctgtcaaaaaaaaaaaatcaacctgacaatgtatctggacatagggtatgttcagatacattgtcctataagaggttacatccctttataggttgattatttttttgggacggagggagtatatggtatctctaagagtagctagtttatcattgacgtttatgccttacgtaccagtgcttttttactgcctcttacagagagcagtgcgcatcaactgtatttgtccctttttgctgacctttggcactctttggtgttctacttgagggatgcagttagcatgatactcctgatataaggtagagaaagggttctaggttcataatttaaaacatgggtaaattatttaaatttaaggtgaaaccattctactttagaattttcaatatgcagagggattaaagccaatccctttttggaactttcaattcatttaactgttcatccaaaggggctgtgccaaatacacatgcccaagcaaatgcttagagatttggataacctgaaagcaaaggagaatctttcattttcacatcaattaagattgaaaccaatggacatgcaaggatggttgaattttggggcacttttttcatgcacattgttcatttgtttcttttgaatgcgttattgcaggaggattcagatgcgatggagtcgtaatacatcaagagaatcgtttgttgtccttgtggcagaattcgcaagtcaaggctaaccatataatgcttatttgttctggtttttaagagcctgttctttatggtgcaaactcc

SEQ ID NO: 17821 - DNA, 3974 bp, Oryza sativa
  ref <308>: DATABASE ACCESSION NUMBER: AK068243
  ref <309>: DATABASE ENTRY DATE: 2001-12-06
gctggagccccaactacgccgccagcccgccatctcatcccccggcgagcgacacggtcgcatcccacctgagctccgaccgccgcagcggcggtcgcctcgccggagcagaagccgcgcgtgggggggaaggcggaggaggggaggggttcaatggagacggaggtgttccccgtggttgacctccgcgtgctcacgcagtccgatctggacgagctcgccgccgcctccgcccacgccgtggacccgcggagcagctgccccgaccgcgccgtcttcaacgagagcgccggctcgcgtaagcagaccttctcccgcgtccgcttcgtccccgccgccgccgccgccgctgccgccgcctccgcctccgccgccgccgccgccaagctgcccaggggcaacgacaaggaggacagcttcatcgcctaccacctccgccgcctcttcgcgcccgacgacccctccctcatcgagaacccctcctttccccaaacccaaaccctagctcggtcgccgtctcccgaccccgaccagttgaccaccaactccaggggggtctccgttgatctggtgagcctctcacggcttgccgacccgtacgacgcggagctcgggaagcggactgccaggatgaccacggaggaggagctcatgggcttcatctctagcctcgcgggtcagtgggtgaaccagaggatgcggaggaagttagttgatgcgtccttcttcggggatcacctccccagcgggtggaggctgcagcttgggatcgagcggaaggaccgcaaggcctgggtgaactgcttcagttatgtgagccccaagggacagagttttgctacttgccaagaggtttctgcatacctcatgtcacttcttgggtatccggagttcaaaacggataatattgagtatggtagcacacaacaacatggcttgtgtgctgacgatggtgttaatgttttaggtgttcaacaccaaattggtacaagtatggacagtcaaagtaatttgccagttgcttctgctactttttatagtcattcaagagatcaagacgaaacggttgcagatgatataaattcttatgaatgtcaacaatgcaatttaacttttcatggtcagagtgcctatgcgcatcacctgatcacttttcacaaagtgagttctaagaggcgtaagagtaacaaggttagcaaatttggtgagccagtgataggcaaagatgggaaatttgaatgcccagtatgtaacaagacgtttgaggaacagtcacggtactttggtcacattggatcccatgcaaagtatcaggggctgactcctgaagcattcctacaaaccttttcaggaaaggttggtaacaattcttttgcaggtttgtcatctagccttcaagtattggtcggatcaccacaactgaatgagaagactactgcttgtgaagcacgatcgcagcatcacgattgttcaactaaacatggaggcaatagtacaagaggtatagacctttttaactcaaatcatcctgctaacttcaatgggcataatcaatcttggtgtagatctgatgaaattcctcccaccacagaagctcaaagcacatggacttatagaaataatgagatgaactgtgctgatagaactgttccgagaacagtacctcagcccaatgatcacgaggattgcagggttagtggctttgctgaagcaactaattttaatgatcaagcaggaagacaccaaggttttagacctttctcctttggaactaccaaccattgtcaaggccagataattgatcatgcagtagctgcttccaagcatgctgaggttaataatagtatgaaatcaagagatgtcaacctcaattcacgcctgaacacaatatcctttcctattgcaactgcaaacaatgaaacatcgactgcccttaatgacgtgaatcggtcatgcattactggaaaaggttttagtggaagtttcagtaacaatgatggtgctgcatctatcgtgttgcccagttctggattaaacaataaaatttctagctccctcggtgtagctgacagatcatctattgctgccagatccttcaatgctggttatgtttatgaaaatggcgcttctgaagctaacaatattggcaacaaaaacaataccatggtgtatcaaacaagtttggccatgcgtccactctctcctggcaaacaaagcagcggcgttgcttcgagaaggacagccgctgtggtgtccgagcggcatggaggccaagttgtgagacacccacggactgcttcatcagtttacatgcctgagcaaggtcctggatggttgtgagctccaccagctaatcaccaaaggcagcttatgcatcatgcagctggattggagaactcctaaagctgaaggccacgatgggattggagaactcctaaatcttgttcacacagggtacctcagtactcttcttttcaaacacaggtaacggagacaaattagtttgtatgagattgggtaacgtctgttgaaatatgtggtattcttaaaagaaacgttgttgcactgtggtattgagtggagatgaaagaatcttgtggtattatttggttggtcaaatctttgtggtatagttggaattttcatataataatatatttttccttggtcaaatcttcgataacattttactttgcccgatgttttcccatgatatccctcttagtcacatcccaccatttcttttgggaattgctaactagcagcctgctgtttttttgtctttgtcagccatttttttagccattggatctcccttcaagattcgtgcaccctcaacgtgatccagtccaagcaatcgcatgttgccaaaaatgcccagcccaagcagcagtgggaccctcacctcgcatcacattttttcatcccgacacgcgcccatctgctacagtttgaaaaacagtaatctcctctttcctttttttctccattgcgcacgagagaaagagagagagagaagctgtcagtgagagtgggggaaatctcggtgagagggaaggagagaaggtggcggcgatgcagcagcgggagcgctatgccgtcatcttctccggcagggggagccctcgcgctgccgttgccgtcttctgtggcggagggagcccttgggcttggcagagagcgtgggggaggagggtcgtcgtgttttgtccgagagacacgttttgttgtccccacggcggtcgtcgacgaggcttccgtggagccattcgtgtgcagcggcgatgcgcatatggtactacctgcaccggtggttgagctgaccaagtattctcaaccaaatctcatcatgaatcccaggagttctgaaccggaggcaagcaacaaagagaccacaacgattcacaaggtctgttgtagatctcctccaccgttcatccttagcccgacgccgatgccactgccacctgccattccctcctcaccaaggtaaaagcctggctgacttccatatagctctgagctagtaacagtacttccaaaagggccataaaatcaagctacaatgtttcagacttccaactgctattaacagtacttacttccaaagtgccattacagtcttccagcagctaccatgtttcaaaataaagagctcagtacaaattcatctgactttttttttaactactatactgtgtcaggttactgtccgttgtaaaaaattgtaatttattatctctctgctttgtccaacccgaaacataatttgtatgtttggttttatcaattttgttagttttgtaaaccagctgtagaaaagattgatagaaatattgcatgcttcataccatgtttcatatttgtcagaaatagtttatgaatgatcgtgctctttgttatctcctacttttgtcagttttgtaaaagaattttgtaatttattatctctctgtgtttgtccaacctgaagc

SEQ ID NO: 17822 - DNA, 1413 bp, Oryza sativa
  ref <308>: DATABASE ACCESSION NUMBER: AK068244
  ref <309>: DATABASE ENTRY DATE: 2001-12-06
gtggaaaacagagaggcaagaaaaagaaaacggaaaaccccccgcccagcccaaccacttcactcctcccactccagtactcgactccaccacactccagtccagtccagtacactccgcacacgcgtgccacagggatcatgcgaacctcaagaacgtcgcctcctcctcctctagcggcgtctctcggttgtaggagacgctcgtcgtctttggacggatcggagcttgggggaggaaggcgacaaccatggtgccgatggtcctgggtcacaagacgggcggccacaccgacgacgccaagtgccatcaccggaggcacagcaccgagcaaccccacctctccccattacccttcccccggccacccctctcctcctgatcatcacgcctttctctgcttcttccatttgatctttgtgacaacgtcgtcctcctcccgctactcttcgaatcttttgtgaatttcacgtcgtgagacagtagggattgaagcatgagaagtccagcagcgcttctcccggtggttgcagatggtggtggtggtgttggggtggaggaggagatggatgtggacgaggacatggcgatgtgcggcggcccgcggcggcgcgcgcggggagaagaagcggcggctgagcgtggagcaggtgcgcgcgctggagcggagcttcgagacggagaacaagctggagccggagcggaaggcgcggctggcgcgcgacctcgggctgcagccgcgccaggtcgccgtctggttccagaaccgccgcgcgcggtggaagaccaagcagctcgagcgcgactacgccgcgctccgccaatcctacgacgcgctccgcgccgaccacagacgcgcttcgccgcgacaaggacgccctcctcgccgagatcaaggagctgaaggggaagctcggcgacgaggacgccgcggcgagcttctcgtcggtgaaggaggaggaggacccggcggcgtccgacgccgaccccccggccaccggcgcgccgcagggctcgtccgagagcgactcgagcgcggtgctgaacgacgcggagatccttccacacaagccagcgccggcggccgccgccgacgccgcggcatcggaggagacggaggcggtggtgaccggcgccgcgctgctccaccacgccgaggtgttcttccacgggcagcttctcaaggtggacgacgacgaggcggcgttcctaggcgacgacggcgcggcgtgcggcggcttcttcgccgacgagcatctcccgtcgctgccgtggtgggccgagcccaccgagcaatggacgacctagctagccgcgaaaactttgcttacttggctggggcgaataaacaattccgtagggggttttctgcaaatttttgtaaaatgaaattgtacctagtccttttttgtc

SEQ ID NO: 17823 - DNA, 948 bp, Oryza sativa
  ref <308>: DATABASE ACCESSION NUMBER: AK068245
  ref <309>: DATABASE ENTRY DATE: 2001-12-06
aagggtgcgacggccgacgggggaggaagaagcagcagctccatgcaccggcttcctctggcctcacggccaccgggtccgcatcgcgcggcggccgccgctcatcgcgctccccagaggacgacgacggcgtgctgcggccgcctgaagcaggaggcgacgccgtcatttgcctctctcgccgtcgctgcgtctgcggcagcagagcgcgcggccacgccgctgttggccgcggcggcgctcctcctttctgccgcatctcctggcttcctagcttccacaccatcagcttttgctcaatccgaaggcgcagcgctgttccggaaggcgtgcatcggctgccatgatatgggaggaaatatcctacagccggtaagcttctgaaaccattactcgatggccggacacaaattttcaacctttttattagcttgctgatttgtcacgtacagggcgccactctgtacatgaaggatcttgagagaaatggagttgccacggaggacgagctatacaatataacgtactacgggaagggaagaatgccgggcttcggagaaaaatgcaccccgagagggcagtgcactttcggacctcggctggtcgaagatgatatcaagctactggccgcgtttgtcaagtcgcaggctgaaaatggctggcctaagatcgacggcgatggagattagttcaccgacacaacagagacaagtggcaaacattgttcagtgaaccagtgtatagtttggagtcaggtgtgctgtttgcatctgtaaaatcccaacgaaatccatacaaataaaaagtagcttaggccgtgtttagatttcaacttttttttcaaacttccaactttttcgtcacatcaaatgtttggacacatttatggagcatcaaatgtggacgaaaaaaacccaattgcacaatccgactgtaaattacgagatg

SEQ ID NO: 17824 - DNA, 3487 bp, Oryza sativa
  ref <308>: DATABASE ACCESSION NUMBER: AK068246
  ref <309>: DATABASE ENTRY DATE: 2001-12-06
gacttaatattatggttggttggttttgtccgcaaggttgtattaaggaacattcatattttttaaatgttttttcaccataattttacctgcccaaccttagcaacattagtgatcgttgtaatttgttatcctgtcaataatagaatcctcataacaatcctatattagacttactatagtcatttgtttccaaatatgatagaattagtaacattatgttgctaaccatttctttttgcgcgattgtcccgaatactttctaactagcatgtttctgttgttgacctttgcagatattcgtgctaagagcatctgtaagtatttctgaacttttttctctagttgtaaccagtgtgttcttcctattttctttgttcactatgttttttttccatatttcataatgactgatcatatttatactcaccattaatccctttaatcctgagtccttaatcctcaagtcaaaatgccaaatgctattcgtccatactgaccatacacactggtgctattgtgtgtctatctcttagcagcgggtgatgctgttctctgaggatgtgtttttcttgttagaataactgtgtcatttacaaagccttctagcttatcccgtatcatgtgtggcgtactgctctaacaacagtacattatcccgtatcatgtgtggcgtactgctctaacaacagtacatttcatgccacttatatcatctaaatcgaatgtgcagattgcattatgtgaatactttttcacacactgcaggacatgtttgatgtatttctatatgtgttcccgttttatatggagtctcatacctttgtgcatgatgtgcaaaatgaaaatacatgttcctgtatttatttatttacttctgaaaattcacaaatacaaaagtaacaaaacacggtgttcattggtctatggtacagggcaaaacaactgaaaaccctaatattggagtttcctacagatgcatttgtttgataagttcttaacagccatctgatatcatatcaccaatttgtctgcctgcattttcagaccaacaatattgtgtatcctgagatgtaattaaaggatataaaactgatgatcatgattcatcctcagtacttggttacattccattcctccgaacatgtctaattttactttgtgtttgcatatgtccagttttagttgttgcacagtaaacaggcctagaattagaagcatctatctgcttttactctgttttttcttattgtgacctcttaaatggttgtttgatttcttttgtactactcagaatttagcatgtgagctctttgttgcgcaaacagacagtgctggatcaggagacgtttgtctgtcacaagattctgatgatgtccatatttccattaccacatcaagtattgaccgtctagtttctggccttaaagattatgcactctcacatgctaacacatctgacaggtgtgaagcatgctacatgaacaggtaaacattgcttgctgagtttaactctagacatatttgtttatttctttactttgctattggaaatagatttatgatgtgtgttatcttttggattttgactttcagtggaagcttatcattaccaatttagcatccatatttaatcatttttctggaacttgcacttgaatcgctaaacaacaggtttgaagttaatttatgggtgttttagactttgtgtcacataggaaaagttgtcgctcatgaagcggtaaataaaataattgcagtcactgattctgaatgtagttatgaaaactcacttgtgcacacacgaaggctgggggaataagtcttatcccatcacatctaataaaatctgaaatgtatcaatcaaatatgcacaattgagtgtatcaacattatttaatgtgaagatatcagatcctgccgcatttgagctctacaattgtatatatcaaggcctaatagctttcttttgttaaacaaagtaccgatctatcagatgaactgcttcaggtggccaacagtgtctggtgctattcgctagatttgagtaatgtctaattgccccattttcccatcacccaaagtcccaaacccattcagcatttcagttcaacctttttaggcatgcttgtgtatcctacctttcggtagcctggtatgtagtagttgaattcagtcatgtgcatactaatgaataccatatgtgtatcatctatctctgcaattgtacattcctcaaatagctttgattacatagttgatagggcttgtatgttttgctcttctgccgtctcacttcagagatcgcctgaagattggaactggaacagcaaaatatgtagacaaaagaaaagctaaagggcaacttgttgaagtagtgataatgcttgcacctacttcatctgatttgagctgttggatgacaaattgttcatctacacaggtttgcaccataggcctctaagttacataaactaattatgcaattacattagcatacttgttcttgtgatgtctaactggttatgggtgtagtatacaagcaagagggcctcttgtgtggtatattcttgcttgtatttagtaagcttataaaagttataacagcatggcgtccaatgtttatgctgaaggtgtggttcaagtatgctcactgcttccactcaatggtgaattgtctattgtaggttttgcattttgtagagttcataccatgtccaatctcacaatcctccctcagtgcgctgatgagcatagactggcaaagctacggtttcaagtttaaagggggtttcattgatgacgatggaaatgctgagcttcaatgggataacatggcattttctcatgtcgatattgccattcacacttaccacgaaggtgctgttgatgaatggaagagctctcaacctgaaaggcatcttctaagaaaggcacttaagtctgcattgtttggattgaaagcagaccatgcagaagactttctcagctgccatggccagaaggttcgcgagtatgtccctgatctcgcagaatcgatagctggcttaatcttatcatcaatgatcaagagttccaagatgagtgcatcgctcttctcggcctaggctcagatcaagatctcacagaaggggcggttagatcctgcatcggtgagaagatgaaccgtatcgtagagatgaatgacaccaaggagaacgtagagcacaacgcaccttatctgttcgagtgcgagaggttcgatgaagattatagcctactggatgaagacgacccagatgaggatatgattttcgatttctagcatttccaattgtctcgtagcactcctaatccagagatctcctatgctgtgagagagctttactttgaccagagaactttataaacactaacaaagactgctctctgagactgtttcctgcctcgtgtaaacaaaattcagacattgttacgtcaaaaattcagaaactgcaagtaattgccc

SEQ ID NO: 17825 - DNA, 941 bp, Oryza sativa
  ref <308>: DATABASE ACCESSION NUMBER: AK099046
  ref <309>: DATABASE ENTRY DATE: 2002-08-28
gatcacaccatcacgagcaccaccaccactcaccacgcgccacccacccccgcaccgcacgccaagatccgaccgccgccgccgccgccgccggagtagggagagggagaggagatggggcggagggcggggtcctacccctactacgtggaggcggcgccgccggtggacgtgaacaagaacacggagtggttcatgtaccccggggtgtggaccacctacatcctcctcctcttcttcgcctggctgctcgtcctctccgtctccgcctgctcccccgggatcgcgtggaccgtcgtcaacctcgcccacttcgccatcacttatcacttcttccattggaagaagggaactccatttgctgctgatgaccaaggcatctacaacagactaacttggtgggaacaaattgataacgggcagcaacttactcgtaataggaagttcttgactgtggtacctgtggtgctgtacctgatcgcgtcacacttgaccgactacaaacagccaatgcttttcctcaacaccattgcagttctggtactagtggtagcaaagctgccaaacatgcacaaggtccgtatatttggaatcaatgcagatatctgaggaccatatgaagaacatcagggcacaagcttctgtgtgtttgcaacgagggacaagcgaactttgtgcaaacacggtatctaaagtagtgaaaaaactaaactttttcaccactgcaatctgtagtatgtgcataggtgtaggaagaacctgtaaatgttactgtagcttataatttgcctacaggttggaggctgctgcatgtttgctcatgccacttcctttaagaactctagtggagagtgtagactgtaacttaaataaacatgtaatcttgtggatatggaaagtttggtggttgttaaaatggtgaaccggagttcagttcctgc

SEQ ID NO: 17826 - DNA, 1245 bp, Oryza sativa
  misc_feature (650)..(650): "n"=any one base of a, t, c, or g
  ref <308>: DATABASE ACCESSION NUMBER: AK068247
  ref <309>: DATABASE ENTRY DATE: 2001-12-06
gacttgcagcagctgcaaaataagcgaagatgactacgcaaggatttgctcccgtgcttgcagtagcattgctccttgcagcatttcctgcagcggttcagtccattggcgtgtgctacggcgtgatcggcaacaacctgccggcggcgagcgacgtcgtgaagctctacaagtccaaggggatcgactccatgcgcatctacttcccgaggagcgacatcctccaggcactcaccggctcgaacatcgccctcaccatggacgtcgccaacgagaacctcgccgcgttcgccgccgacgccaccgccgcggccgcctgggtcaagcagaacgtccaggcctacccgggcgtctccttccgctacatcgccgtcggcaacgaggtcaccggcgacgacacgggcaacatcctcccggccatgaagaacctcaacgccgcgctcgccgcggccggcctcggcggcgtcggggtgtcgacgtcggtgtcccagggcgtgatcgccaactcctacccgccttccaacggcgtcttcaacgacgactacatgtttgacatcgtggagtacctggcgagcaccggagcgccgctgctggttaacgtgtacccctacttcgcctacgtcggcgacacgaaagacatcagcctcaantacgccacgttccagccgggcacgacggtgacggacgacggcagcgggctgatctacacgagcctcttcgacgcgatggtggattccgtctacgccgcgctggaggacgccggcgcgccggacgtcggcgtggtggtgtcggagaccgggtggccgtcggccggtgggttcggggccagcgtgagcaacgcgcagacgtacaaccagaagcttatcagccatgtccaaggaggcactccgaagagaccaggggtggcgttggagacgtacgtgttcgccatgttcaacgagaaccagaagaccggggctgagaccgagaggcacttcgggctgttcaaccccaacaagtcgccgtcctacaaaattagattccactagacaagagtgatatactaatattacatttggatttggaataagctagctgctcatgtcaaatgcaaaaccgcatgcatgcatgggaacgtacggccagcatatagttttgtggtaataagcacagctgctcaagattcagcaacgtacgtgtaactctgccttggcactttggcagtgaatactgaacaataacggaatttataactctgtttccttg

SEQ ID NO: 17827 - DNA, 2361 bp, Oryza sativa
  ref <308>: DATABASE ACCESSION NUMBER: AK068248
  ref <309>: DATABASE ENTRY DATE: 2001-12-06
gacaggagaagccgcagccactgaggtcctagttctgatccagaagtggcggctacgcctttgctgtagcctcaccgatccgccgccgccgccgccatgaagttccgctctgattcgtcaggcggcgacgagccccgcgctccggctgccggcgacggcggcggcggcggcgacgagccggccaagaggcagcggaccgatccgtcctccagttcgagccagggcgaggcctcctcttcctcgcagccgccaccgcagcagcagcaggaggagcagcctccggaggatgcgggagagggcgagcagccgagggttccggatctcggggaggacctggtgttcgaggtgctgcggcgagcggaggcgcggacgctggcggccgcggcgtgcgtgagcagggggtggcggcagctcgcggaggacgagcggctctgggaggccgcgtgcgtgcgggagtgggcgaacctcggcttctccgagcggcagctccgggccgtggtgctctccctcggtggattccgccggctccacgctgtctacatccgccccctgcagtggcgtggcgccggcgtgcccaggcaacaggggaggcggcagccgccggtgaggttgggccgggaccaggttcagctctcgctgtcactgttctccattgggttctttcagaatatgccttgtcctaagaaagacaagggaaatgacagtgataagaatggagggggccaatgcgggtagtcgaatttgtggaataagcttcactccaacaagcatcatcctaagctaccatggcagttgccctattgttcacactggtgatgctagagagtgttggagagacgaacaggaaaatcggcatgcttgatttgggacatgagagaaattaagtggaattgcaagatctgaattggttcggttgtgttccgcacttgtaagatttatgtgatagtgtcacatggattgatggacgttgagtgctatgaggacagttgcgtgaatgctgatgacaagtgatttacttcaagagaagggagaaatggtttgcaattcgttctgctgttgctgatattctagttatcagctattgtgtcaacttgatatatctggcccaagagcagtatggactgtgtgccttcttgcgccggtaccaagctttagagggaaagctgatgcaaatagcttttgtttgcataacctttttcaattagggaaacataatttcccatattaggcatatggagaattatgtgagatttgaccttctgtttctaccagaaaaacacaacagtgaagatgtcgcagcctgctgagctttcccgtgaggagaatgtgtacatggctaagcttgcagagcaggccgagaggtatgaggagatggttgagttcatggagaaggttgctaagacagttgactctgaggagctcactgttgaggagcgcaaccttctatcagttgcttacaagaatgttattggtgctcgccgtgcgtcatggcgcatcatatcatccattgaacagaaggaagagagccgtggtaatgaggatcgttgcacgctcatcaaggaatacaggggaaagattgaaactgagctctccaagatctgtgatggcatcctcaagcttcttgactcccaccttgtgccttcatccactgctccagagtccaaggtcttctacctcaagatgaaaggcgactactacaggtacctcgcagagtttaagactggagctgagaggaaggatgctgctgagaacaccatggtggcatacaaagccgctcaggatattgccctggcagagttgcccccaactcatcctatcagacttgggctggccctcaacttctcggtgttttattacgagatcctcaactctcctgaccgtgcttgcaatcttgcaaagcaggctttcgatgaggctatctcagagctggacactctgagtgaggaatcctacaaggacagcactttgatcatgcagcttctgcgtgataacctgacgctgtggacttccgatatctcggaggatgctgctgaggaaatcaaggaggcccccaagggcgaatcaggagatggacagtgaacatgatcgaatgcgtgcgcccacaaactagaatagtgacgctgcaaatgtgctgtgggttatcgtttcattttatagattgtaatgtctcgtgatttgtcggaaacaggaggcgctccccatttatgttgtgctaggaaaccttgcagctgactcgctgcttggctggtggattctcgagctgcactttctttggggggagcctcagggtggaaccttcatgtcacttattggatcgattgttttcggtatgtcagttgtgagccttatctccagagtcct

SEQ ID NO: 17828 - DNA, 2388 bp, Oryza sativa
  ref <308>: DATABASE ACCESSION NUMBER: AK068249
  ref <309>: DATABASE ENTRY DATE: 2001-12-06
gacacgcacagagccacgctactctccccacccagattccaccatttcacgcccccgcctccacttcgccttcgcctcgccgcgccgccgccgtctagcccttccgcgtaggcccaggcggccgggccggcgggaagcggcggcgagctcctcccctctgatggcgccgcagctgcagggctgctacgcggtctcgtcctggccccggctcccgcggctgcccccgtggccctgcgcctcccacgcgcagcggcggcgggtgctgcgcctcctgccgccgcggcgccgctgcgccggtgcggtccgggtggtcgcggaggctggcccggccctggcaatagaccgcgtcgcggaggaggcggacgtgcggtttccgggggatgtggagggggttccgggccagcagcagcagcgggaggaggaggaggatgcagtggatgagagggagaggttgaggcggatgcggatctcgaaggcgaacaaggggaacacgccgtggaacaagggcaggaagcacaccccagagacgctgcagaggattcgggagagaaccaggattgcgatgcaggatcccaaggttaagaaaaagttgatgcatctgggacatgcacagagcgaagagacaagaataaagatatccatgggagtgaggcgaggatggaacttgcgtttacagaaattaatgatccaggatggttgctttgtggagtggagagacatgatagcagatgctgctaggaagggctttgctggtggaatatccctacaatggaattcatataaaatcttgactgagcagatgcggcaggagtggttggaaaaattccagaaaagaagatcaatgcctcggccaacaggtaatcgacgagcaccaaaatctccagagcagcggagaaaaattgcagaagccattgctgcgaagtggctagataaggaataccgtgaacgtgtatgcagtggaattgctagctaccatggaacatcttctggaactaaagtaccacgaaagccaagatctgccagagaacctggttcaaagagagatactgtgaaaaagaaacctattcaatccagatcagctggattggaggatgcatgtggaacgactcccacagttaagagaaagaaaagtgcaactccttacaaagatccaatggctggtgaaaaactagagatgataacaaagattcgagctcaaagggcagccctagaaatagaaaagaaagaagctattaaaagggctaggtcactgattgcagaagctgagaaggctgcaaatgctctggagactgttgcttccacaagcccttttgctcaagcatcacttatagaagctagaaagcttgttacagaggctagattatcacttcaacacgttgatgatgaagggcctgcagatagtgcttctgatgatgcatcacaagactcaggtgcgtctgatttgcacaatcacgacatggcaaatcaaaatgacgtgatcaagcaagagaataaaccagtcaatgggatggagcttcctccaagcaatgttaatggcagagatttctattttgacgtgtcgactctcactgaaacagatcaccttagagattatcagagaatagaaaattctatggaaagagcctatctgcttccttccgcttcttcagctattcaagacgtgaacgaaaatcacaggatgaaagattttaacgcacatcaattaatggttaatgatgaatcaataacaattgaccaaattgcatctgaagtagcagaaatttatcctgacgagccacaggaggatgacacgctacctgtgcagaagtctaaaatgaggtgggtacgtgggcgactagttgaagtggaagaataaacagttaccagaattatattggttgactaaactgttcaagatatcattatcttgcattccgcttctgctttgattactgttggtatggaccaaaatgggaaatgattgctgatcttggcacgtattcatggtgcattcaaccatgggaattagtcgggaatacgccatgacagagcctattatattctgaggtgagatgcttgtaattagtagttgccaactttagatattttcctcttcttgaatgtagtcaggttagccaaactgaaatcctaaaatcacggtgtggtggatgcatttatcttgtattagaacattttgtagctgtcagattgaggtcctacggatagccctaacacagatttcattaagtcaaatcatacgaggttgtcttgtaagataagtcaaatcatacgaggtcgtcttgtaagatattctgtagctatcattttttttctaggttatcttgtacctgagttcatttgtgaacttgtatcgagagaactactgtttctggctttctgctttgtgcc

SEQ ID NO: 17829 - DNA, 4239 bp, Oryza sativa
  ref <308>: DATABASE ACCESSION NUMBER: AK068250
  ref <309>: DATABASE ENTRY DATE: 2001-12-06
ggagagagagagaggctcatcgccaatccgaccaacgcaaccactccaacccaccggcggcggcggcggcggcggtggggcgcggcgacccggcaccacgcgaccccggcgtcgccatgccgcactcgcgctccgattcggggtcgggttcccgcggcgctgacccttgccgtgggaggaagcgcgggaggctgttgatgctcgaggaggaggaggaggaggaggagtcggggatggaggggtgctcggcgccagcatgcggcgatgtgcggggggatttcgttggatggtgttcggaccggcatcaggtggcttcctgcagcggcgaccagacgcaaagcgccagcatgtttgccgcgatgcaggagaacgcctgctccatcgatagcaaaggtgtggtgtgtccgcagtccgggctagggtattcagctggccagaacgggacgcacggtggtggcgggtctatgctgcatcagaatttggaaggctgcatgtatatgaatcagcttgggcagatgtgcggcccttatccacctgaacaactgtacgatggattatccactggtttcttgcatcgagaccttgctatttatgccgtttttggtgggaaaatggccaaccctgtttccttaggttccctgaaacagtttctttcacaatggagttctgattctgtggtcgccacaagagacgaatcggtggagagtaagaaaatggcccctgttaacaaattgattcttcctgataatctttcaagtgaagaatcatgttggatgtttgaggacgcagaaggccgcaggcatgggccacattctcttgctgaactttcttattggcatcacagtagctatctacatgacctttcaatgatttaccatgttgatagcaagtttggcccatttacacttgtatcactaattgattggtggagtggaggcacagagcattcagaatcttcagccaatgattctgggtcactgaacgctttaatggatgatgtagttgaagatatcagccatcagctgcatgctggaattatgaaatcagcccgcaaagtttttattgatgaaatatttagcagcgtacttccagaaatgattgcttgcaggaagacagagaagcaaatggctgcaaaacgtaagagccaagctgctaagactgacaatgtgagtaacaagaatgctttggtacttaagggcaagggtgatggaacatctactcgtccaaaaagcctaaactcgtataataataaagtaccggaagatccttctgtggctgttcaatcaactgcaatgcagtatgaatttgctgatatattatcggcagtttgggaaacaatttataacaaatccatgaagagtatctgggatgaagtactgtatgatcctgtcatggactactgtgatgcatggcttaaaagaaaaaatgagtcgaatcttctctctacagttgttcctggagcctctgataaccaaaagatgcaagacacagatgaaatgtcaccaaaggcaatttgtgattcagatgctcctgaaagtgacatggatttccctccaggatttggaccaaatcaggaatctgctgagcattcccactctgcgtgtgttgagtatgttactgaaaaaacagatgggaggtctggatcaagtatcacgttgttttctggccccttaggacgagttcaggtaatgctggcaaatgaactatatgtggcagcaaaggaagctttgttccagcattttgaggaggtcatttcagaggagataacaaactgtttgtgcattggatttgaagatgatattaatcaagaacgaattcgtacgcctgttcacgcaccagaaccatccagtcctcctggaatatctgtgcatgaaacgcccagtcctgctgaaatgcctcgagatggaatttcggatatggctgaaatggctcgagatgaaatttcagatatggctgtagatacaataccctgccctgctgatatggcggcatctggaacatcaactgttcctgaagtgacaacagacaaactgatcattccttacgtggaacatcaatcgccctctgcatctcatgcaagtatatttgaaaagttggatgcacatgaagaagctgaattggatgacagttttgatgaggtgcctcctggaacagaggctggcttagcttcattggtgattatggagaaaaacaaataccagccctcaaaatcagtagactcagtgcttgacatttatagatatactagttgggcattcttcaggcaaatactgcatgagggtgtaatgaaagagtgggcatctctcttctcaggtgctctcagcaattgttttgactcatggtatgccaggaaaaatattgtggctaaaaccatggatgatacattgagacccaaagaatatacttactacaggaagaggaaactgaggaaaaactgtgaagcatcatcatcagaaaaaccaatggatgagcagctctccagacctcttcgtgatcttgttgaatgcaaggttaatatgaaaaatatccatcgatcaagcaaggctgggatttcgcagagagtttctgttgtggagaagccctccaaaaagcgtgccaaaccttcacataatgataatattaatctgaatatccagcaggacttgaaactcctttccgaaaaggtgccaaagagaaacaggtcttcccatcctaccagtaagcctcttgttagtagcaaagtgcctactgaggatagaactacatcagcaatgcctgcaaagaaaagaaagcagaaaaacttggccactgagtccaacctgaagacaaaagcagtaattttatctccagaatcacatggttgtgaagcgcctactgagaaaagaactacagctataatgcctgtaaacaaaagaaagaaaaacttgtctggtgaatccaaactgaaggcaaaaccgttaacaagtccagaatcgtatgtttgtgaagctcctattgacaatagaactacatctacaatgcctgcgcagaaaagaaagcagaaaaacttgtccaatgagtccaacctgaagaaaaaaccgttggttttatgtcctgaatcatatggttgtgcaagagcttctgtgagtggatgggaatggcgtgattgggcacgcaatgccactccatcagaaagagctcaagtgagaggctaccgagtgaggagtattctctcagctccagaaaataatgtattgaaaagttcacaagttaagggctcatctgcaagaacaaaccgggttaagctacggaatctgttagcagccgctgaaggcactgacctactaaaaattatgcaatcgaagtcaaggaagaagcggctacgttttcaaaggagtaagatccatgaatggggtctggtggctcttgagtctattgatgcagaagattttgtaattgaatatgttggtgagctgatccgccgacaggtctcggacatacgcgaggatcaatacgagaaaagtggaattggaagcagttaccttttccgtttggacgatgactatgtggttgatgctactaagcgtggtgggttagcaagattcatcaaccattcttgtgatccaaattgctatacaaaagtaattactgtcgagggccagaagaagattgtcatttatgcaaagaggcgtatatatgctggcgaggaactgacttataattataaatttccactggaggaaaaaaagattccatgccattgtggttcccagaggtgccgcggatcaatgaattaggaagtaaagtttataagtcaggaggtaactgcaattgggtgctaccccagtatgtatgtgtcatgcgtgcttgtcgattgtactgggcagaagttcactgcagaaatgttcttggatttactgacaggatggtaattgtgtagcaaggttagatggactaattcgggctatccagaggaaggtaaagcgctcaagtgtggactgatggacttgttggttgccttagtgtgtctcctgaacgaggttcgtgtttacttgctgacaaggtacatggatacatttaatctatcatccgtggtgtatgtgtatgtatttcgtccagaaaaaaaaaagcatccgaatcatgtggtcaggtggatacagacgtgcatgaatatctgatatcacaatcgtaagtatgaattcaagtattttaccagcttatatgtactttgtgcaggctaacaacagggcaaaagcaagccactaacaaccaacccgttcc

SEQ ID NO: 17830 - DNA, 2228 bp, Oryza sativa
  misc_feature (29)..(29): "n"=any one base of a, t, c, or g
  ref <308>: DATABASE ACCESSION NUMBER: AK068251
  ref <309>: DATABASE ENTRY DATE: 2001-12-06
gctcctcctctactccccccccccccctnccccctccccttcttcctctctgtctccagcgcacgcacgcacgaccacctcgcctcctctcctctcccctcccctcccccacctcgcctcgcctccacgcgcgcgacgcggccggcgacggcgagccgcacggcgcgtgggcgtgcctctcctcagccggcggctagccctctcctcgcgcgggggcggcggcggcggcggttgttgctggcctcattccaccgccatccctcctccgtgtctcgggctcgactcggtggtgaaggtcaggtgctgatgcaagatataggttgttctatgagaaggatagctgtgcacatcaagacccaaatataatctcacttggttgtactatagtggtggttgaacactaagatatagcttattctgttgtttcaaaaacatgggttcgaggtttccatcgcatcagcttagcaatggcctgtatgtgtctggccgacctgagcaaccgaaggagaaggccccaaccatttgttccactgccatgccatacactggtggtgatataaaaaaatctggagagcttgggaagatgtttgagctccacgctgtcaagtcaagaaaatctggtccactgagcaatgcaccttcgaggaatgcgtcatttggaggtgctgcatcaaactctggacctgtccctaatgccggggatcggtccaactactctggttctctatcatcttcagttcctggtgctagtggatcagcaagagcaaaatctagctccggacctctcaataagcatggagaaccagtaaagagatcatcaggtcctcagtctggaggagtgaccccaatggcgcggcagaattctggccctctccctcctatgcttcctacaactggacttatcacatctgggcctatcacatcggggccactgaattcgtctggtgctcaaaggaaagtatctggacctcttgattctgctgcatccaagaagacgcgggccacatccttttctcataaccaggctgttactaaaatcaccacagaagacagttactcaatcacaggaagcctttcgaagctaatactcggggcagtgggtgtgctctttgtgttggggctcatagcaggcatcttgattcttagtgctgttcacaatgcaattcttctgatagttgttctggtgctgtttggttttgttgctgcacttttcatttggaatgcttgctgggcaaggagaggtgtgattgggtttgtggatcgctattctgatgctgatctaagaactgctaaagatggacagtatatcaaggttacaggggttgttacttgtggaaatttccctctcgagtcctcgtatcaaagggttccaagatgtgtgtacacttcaactaccttacatgaatataggggttgggactcaaaagctgccaacacccagcatcaccggtttacctggggattacggtcaatggagcaacacgcagtggatttctacatctcagattttcaatctgggctccgggcattggtgaaagcaggatatggtgctcgagtgaccccattcgtggatgaatctgtcattattgacattgatcctgacaacaaagacatgtcccctgaatttcgaagatggctgcgggaaaggaatctctcaagtgatgatcggataatgcgcctaaaagaaggatacattaaggaaggcagcaccgtgagtgtgatgggggttgttcaaaagaatgacaacgtgttgatgattgttcctccaccagagcccatctctactggttgccagtgggccaagtgtgtcctcccaagggacctttatggattagtcctgagatgtgaagatacctcaaatatcgatgtcatagcggtttagcaagctgggtgttggaacttagaagagctgctgctgaagaagtgctttttaaatgttttgacttggagtttgtttcgtggaatgttagaattgagaaaaatgtacaaatgttggggatgattaaggttagtaaaaatagatgttaagctggggtttggatgtatagtcttttcttgtattttgtcctttcttttcacctattcctcggttatgagcactgaatgcttgtcttgtgaaatatgatggcttggttattactaccatccagctgtttgaagacttagtgaaattgggtaaacaactatatatgtttttttcaactagatgtatcactgctgttaaagcc

SEQ ID NO: 17831 - DNA, 1071 bp, Oryza sativa
  ref <308>: DATABASE ACCESSION NUMBER: AK068252
  ref <309>: DATABASE ENTRY DATE: 2001-12-06
gttcgtcttcccgcttccattgcaaccccaccccgccgcacgccgccgcatcgatcggaaccaaaccctaaccctaaaccctagcccccccacctcgccttccaccccccacgctcccatggcggggcgcggaggctacgcgtagccacatcgatcgaacaccctgtatggattgaggtgggtttcccgaggcatgggtacaaaccctagcctgcacgagctggcggcgggggcggcgccgcggggacgcgtggtgcgtatcctcgtgcgcgacgccgacgccaccgactcgtcctccagcgaggacgaggcggttgcggtggcgcagcctcggccgcggcggaggggtaaggtgggtggtggtggtggtggtggtgggggcgtgaagcgccgcgtgatggaggcgggggcgggggaggcgaggccgaccgcgcggttccgcggcgtgcggcagcggccgtgggggaggttcgcggcggagatccgcgaccctcacctccgccgccgcctgtggctcggcaccttcgacaccgccgaggaggccgccgccgcatacgacgccgccagcgtccgcctccgcggttccagcgccgccaccaacttcgcctccgtccgctgctactcgctgccgccggagctacccaagccaactatttcaccgcctgaagcagctgtgaggccaatcaccttgccaattgggacagctaagccgacccttcttccacgggtgaaggaggaaggtgagagctgtggcggtcgggtcaaggaggaggccagtagctgtgaggtccaggtgcttgctccggagccaatgtggacgatgatttcaggcaagcgtaagaagcgatcgggctgtggaacccgtgtccgtgccttccatgctgtgtccgcctgtgtggaagaagttggcggggcctgagggtccaattatccgtaattactatcgttagcagctttattgttatgcatagcatcattggaaacttggtattgtgtaattttggttagtattgaacttatgatgtgaagatgactctgcatgtgacctgatttggtaaggttatgatgtgt

SEQ ID NO: 17832 - DNA, 1294 bp, Oryza sativa
  ref <308>: DATABASE ACCESSION NUMBER: AK068253
  ref <309>: DATABASE ENTRY DATE: 2001-12-06
atttggtacttttgacttaagcgccaatcaacagaaagggagcatgccatttggtattcagaatggtgctcttgagttcctgaatgagcaaaaccgtgggccacgtgctacaaaaccaaagaaacaagacacagagaactcttcaatagatgacaaaaatgagaaaaatgttcctctggttgatagtgaactgtataatcgccctgattttgtcactgaatacaaggatgcaaattttttgtaataaagtcctacactgaggaccatgtacataggagcattaagtacaatgtttgggccagtacagctagtgggaatagaaagctggattctgcttatcgcttggccaaagaaaaagaagactattgccctatttttctatttttctcggttaatggcagtggtcagttctgtggtgtagctgagatgattggacccgtcgattttgacaaaagtgtcgattattggcagcaggacaagtggagtggccagttccctgtgaagtggcacattattaaggatgtcccgaacaacctgctgcggcacatcattcttgagaacaatgacaacaaacctgtaactaatagcagggacacccaggaggtgaagctggaacatggtctgcagatgttaactatcttcaagaaccatgaatcggagacgaacattcttgaagactttgacttctatgagcagcgggagaaagccttgcaggagaatagacgtcagcagcagcctgccagcccagagctgcagaaaccagcagagaataaggccctaggagaacttatggcccacatctcagacacatttggtcagactgtccagctaaaagaaactgagaatggcgaaagcaagcctgcagttgagggtgtttcttcagctgatgaagcgtccaccgcaaccaccaaggctgaagatggaacggcgagcacgaacgctagccctgtggagtaaagcagtcgattttctcccccatatcatttactaatttggagcagcagttggatcatatgatgctcttatggaggtgagaagggttaaaagagcaggttggttatgtcaggtgttgctgctgcttcagttgtacaacattataggctttgtttcacctccctttaggttataattccaatttcatagttccgaaattcttgctgtcaatcttctttcctgtctcaatgtgttccctttcgcttttacttatgttgcgtcatgaatgctgttcaatgtgagtggtggtgtttagccataagaagctgcataattatgctgccggtagctttccagtctc

SEQ ID NO: 17833 - DNA, 1671 bp, Oryza sativa
  ref <308>: DATABASE ACCESSION NUMBER: AK068254
  ref <309>: DATABASE ENTRY DATE: 2001-12-06
gagccgaagccgcaacctgcaaaaccaagtccacctccgcctccgcctccgcctccgcctccacccaccaccaccaccgccgccgccgcgccgccggagatgaacaggatgacggcgccgcacggggggatgccgccgccgccgatgccggcggcgggggggctggcgaggtacggctcggcgccggggtcgctgctggcgtcgatcgccgactcggtgatccggggccgcggggttggggttgtcgatcagctgcatcatcatcagcatcagcatcagcttccgccgccgccgccgccgcagcagcagcagatggtggggaggtacttctccgcggagtcgtcggggctcacctcctgcgagtccagctgccggacgacgacgacgacgtccacagcggcggcggccgatgtcgggcggcacccgctcgagcgcgcgtacggcggctccggcgagatccacgtcgacgcctcctccgccgccgtcccgctcttccgccacagcagctcccccgccggcctcctctcccgcctcatggctgacccgcacggcaatggcatggccgcgacgagagggatgggcggctactccggcggcggcggcgacgccggcgcgatggcgcacaggaggctgagctcgcagtggagcttctcgcggcaggacctgccgcagatatcggagatgggcggcctcatccccgacatcggggagagcatcgtcaccggcggcggcggcaacagctccagcgatggcgccggccacggcgcgcagtcctcctccttcctctcctccaggaacttctccatgagctcctgggacgacaccaactccatcatgttctcgcccccgagcagcagcaagaaggcccgcgtcgccgccgccgccgccggcgaccacggcgacgacatggtctccagcttcagcaacatcgactcccagtttggcttgtcgaagcagtcgtcgctggagatggccggcatggatgacttcttgcagctccagccagactccgtcgcctgcagggcccgggcaaagcgcggctgcgcgacgcacccgcggagcatcgctgagagggagaggagaacgaggattagcaagaggctgaagaagctgcaggatctcgtgccgaacatggacaagcaaacgaatacatcagacatgttggatattgctgtaacctacatcaaggagcttcagggccaagttgagaagctaaaacatgaccaagcaaactgcacttgctcaggcaagcacgattgctgaggctggagaaccagatctccgagctaatgttgtaatgatgtgattggtgaacccaaagttttgcttcagaagattagggtgtaaaagcacttcacatgtcaagtggcctccatgcctcgccctcccctttatcggttgtgttatggacagcgtcaatgacttgaagagtaggcggtgacaaagtagattaattgttgtattttaattgatgtaaggcagtggcttgtatgtaaaatcatccatttcaacgccaatgggattgcttcttattatcattgctcttattaaaagtatcctcctctttggcaccatttttgtgaattaccgactcattactgttgtttttgctgtaaatcaccttgtatgtctccttttcgtttttccaacaaacttattagttgttgtgtc

SEQ ID NO: 17834 - DNA, 937 bp, Oryza sativa
  ref <308>: DATABASE ACCESSION NUMBER: AK099047
  ref <309>: DATABASE ENTRY DATE: 2002-08-28
gctagccccccaagcagccgcaccctcactccctcctctctcctctcctcccccccacggcggcggcggcggcggcggcggcaggatggcggattcgacggcgaggacggtgaaggacgtgaaccctcatgagttcgtcaaggcctactccgcccacctcaagcgctccggcaagatggagctccctgagtgggttgacatcgtgaagactgcgaggttcaaggagctccctccttatgatccggactggtactacacgagggctgcctcgattgcaaggaagatctacctgaggcagggtattggtgtaggtggcttccagaagatctatggtggccgccagaggaatggctcacgtcccccgcacttctgcaagagcagcggcgctatctcacgcaacatccttcagcagctgcagaagatgggcatcatcgatgtcgaccccaagggcggaagactcatcacctcccagggaaggcgtgatctggaccaagtggccggaagagttgatgttaccatcgcctgaacagatccatggatcttcaacccttactgcctctcatatgtttggtggttgagtcggctacagtttgtttgcagttttgaattagaacatgccctatctttggttgagtcggctatagtttgtttgcagttttgaattagaacatgccctatctttgctggctcagagaattggaagttggatgcatctaggtatgatactgcagtatgtgttttgtcttttcctgaatgaactcctaatgcactgtcactagttccggacaaaagaaaattaaattaagcccatggaatgtctctgctgatgccagtattactctagcggcaccgagttgtctattttcttatgttcagtacaagtgattacttgccgtgtcatttatcagttaagcatcgaggagtactggtaattcgt

SEQ ID NO: 17835 - DNA, 1136 bp, Oryza sativa
  ref <308>: DATABASE ACCESSION NUMBER: AK068255
  ref <309>: DATABASE ENTRY DATE: 2001-12-06
ggcgctatccattctcctcctctcccacgtctcctgatccgtacctgcttaattccttcgtcttcctctcctcttccttcttcttccaccatggctgcaaccgcttcgtcctcctccaccgccaccgcctcgccgctcctcctcccctcggcccgccgcccgctcccttcctccaaaccgtggcttcccgacggcagggcgttcaggggcagcagggcgctgagttcagcggcgcggcgatgcttctgctgctgctgcaggtgcgaggccgccggtgaggcgggaacggcgccgccgccgcagcagcgcggagtggatgacggcggcgtggtctgtaccagcgccacccggtcccggaggaggagcgttcttggagtcgccgtgggggtatcgtcggcgctggcgctcggcctggccgcgttcgatgatgccctcgccgccgggctgcctcccgaggagaagcccaagctctgcgacgccgcctgcgagaaggacctcgaaaatgtgcccatggtgactacagagtctggtcttcagtacaaggatatcaaagtgggtgaaggcccaagtccacccattggcttccaggttgctgcaaattatgttgccatggtaccgaatggacagatatttgacagttctctggaaaaggggcagccctacatattccgtgttggttcaggacaggtgataaagggacttgatgaagggatattgtcaatgaaggttggaggactacggcgattatacatacctggcccgctagcatttccgaagggccttacttcagctcctggaaggcaagagtggctccaagcagcccagttatgttcgacgtcaacttattgtacataccaggtcttgatgatgagtgaaagcatgcataggaatatatatatatatacatcctcttctggttttccacatcttttacaagaaggatgatgaagcaaatgatttaccatacagtatatcgatctagagggaccattaattcttttcggctgtagattgtgggcaagtatgttatgtgttgagtacaaaattttattattagactgctttaagtagcatgtaaagacttttgtagctctcatttttcttaatgaaattgggggagctctgcttcctagttt

SEQ ID NO: 17836 - DNA, 2939 bp, Oryza sativa
  ref <308>: DATABASE ACCESSION NUMBER: AK068256
  ref <309>: DATABASE ENTRY DATE: 2001-12-06
gaaacgatctcggttaggcacggcgagcccaccaccatcttcccccttctccttcccctccccgcgtcgcctcgccgtgtgcgtgcgcctccacttctccgagagacaaaccagggcgccgatctcgcagcctccacctcctcacccacgcggcctcgcgcttgcgtgcgacgccggagaagaagcttcggcaccggccccggctccacccgcagctccgccatctcctccggccgcggccccggcggcgaggcgaggcgaggcgaagcggagggcggcgagatgtgggtgttctacctgatatcgctgcccctgacgctgggcatggtcaccgtcacgctccgctacttcgccggcccaggcgtgccgcgctacgtcatcgccaccgtcggctacgcctggttctgctccctctccttcatcatcctcgtccccgccgacatctggacgacattaactggccgtgagaaaggtggcatcggcttcttttggagttggtcgtattggagcacatttatcctaacatgggctgtagtacctactattcaaggctatgaagatgctggagatttcactgttaaagaaaggctgaagactagtattcatatgaacctgctcttttattctattgtgggggccattggcctctttggactcatattgcttctagtgatgcatagagcatgggatggtggtattgtgggctttgcaatggcatgttcaaatacttttgggctggtcactggtgcattccttcttggttttggtttgagtgaaatccctcgaaacatttggaaaaatgcagactggactcaccgacaaaaagtactttctcatagagtagcaaagatggctgtcaagcttgataatgctcatcaagaatattcaaatgcaattgttgttgctcaagccacttctaatcaaatgtcaaagcgtgaccttttgaggccttatatggatattattgacaaaatgttggctcagatgctgcgggaggatccatcttttaagccttctggtggaagattaggtgaaaatgatatggactatgatacagatgataaaacaatggccacacttcgacgtcaacttaggagggctcacgaggagtactacaggtgtaaaagtgaatatatgacttatgtcatggaagcccttgaactagaagacaccattaaaaattatgaacgacgtgacgcaaatggatggaaatttgtgtcaagttttagggaaagtcgaccgggcacactgggttcccttttggacacaatggagttcatttggcgctgtgttctgaggaagcagcttcagaaaggatttgctattgttcttggctgtatgtcagctgctatactgctggctgaagccactctgctgccaagtggtgttgatttgtcccttttctccattcttgtcaagtccgtagggaaacaggaggttttggttcaggttgctgcatttgtccctttgatgtatatgtgcatttgcacttactactcactgtttcagattgggatgttaatgttttattctctgactccgagacaaaccagttctgtcagcttgcttatgatctgctcaatggttgcaagatatgcacctcctatttcttataacttcctgaatctcattcgacttggtggtgatgccaaaactacttttgagaagagaatgggaaacatcgatgatgccgttcctttctttggaagaggcttcaacaggatatatccattatttatggttgtttatacactattggttgcaagtaatttctttgggcgtttgattaactttttcggaagctggaaaaggttcaaattccagcgtgaggaagaaaatatggatggttttgatccgtctggaatgatcattctgcagaaagagaggtcttggattgaacaaggatgtaaagtaggcgagcaggttatcccattggcaagaaatttcaataatgtcaacacagatgttgaatctggaaaggtgccattggttgaaaatacactggagatgaaatcaggagctacttcctctagagctgacggaagagtaggtcaatccaaatatgctaacaacagagaaactattgctaccaagtattcagctatcagagaacagagcagacaggcagtgaagccagcaaaaaaggaaatttcttcaacttctgtatctttgcttgaggaagggagttctgaacagtggtccaatactggtgcacccgtgggctcatcagctggaatttcccaaacatgggcaacgatgaagattggttttcagaacttcaaagcaaacatgggttccaaaaaattcattactttgcgccaagacccaggatttgctccacattcaaatgtctcttcgcccgaatcacttgatgaaatcttccaaaaattaaaacgacgtcctgcagatatgcctgtggattaccttgacgatgatgatgacaatactggtgacatggatcctacattcccaggatcaacaagataggttatgatatattcttttagaagttagaatatgcaagctcagaaattaaaacgatttggtagcattagatgcagaacagaagatacaggatgtatagattagatgatggaggtggccttcttggaagctcaggagtcaggacgcctgcccatctggaaagctgcaaagataaaaggatgacatgatgatgacaggttctgccctacgtgtgcagaaaggacagcagattctccaaacaagagatcatgagattatgggacttttctgctctacacatacagtacattgttaacatgtttttgtaacactttggtaatggagaggatgtagtgagtcgaagctgacgagtgtaaaatgtcttggaaaaaaatcacgaatataatgtattaactgaaaaagaagtacacacaaatgtttttgtgtggtggaaattccatttgtcttgtctactg

SEQ ID NO: 17837 - DNA, 4471 bp, Oryza sativa
  ref <308>: DATABASE ACCESSION NUMBER: AK068257
  ref <309>: DATABASE ENTRY DATE: 2001-12-06
gatgcatattttgttccagattatcgatggtggacaggacaggagccaactgcaacaagatatactcattctcgatcgatttctaagagatacctagacacttgctcctcctgctataagatgaatagtgtagtagagatcatggcgatcagttacccgccggaggatggccggtactactgttcttccgttgccgccggcgatgattcacctgcggcccatcatactaacgcccacgacgactgggactgggactgggtacccccaccccctgctgatgctgctgctgctgctgcggcggacgacgacgacgacgatggcgatccgactcctgctggtagtcctggcagcaggggcgaagacgaggaggaggagcggcagagggcgcagatggtgagcgccatgaacgggcagctgaacatgctggccagccggttcctggcatcggcgggcgtggaggaggagtggctggaggtggtgacggcgctgtcctgggaggcggcgctgctgatccagacccacgcctgcaccgccggcaacgacatggacccggcctcccacgtgaagatcaagtgcgtggcgtccggaaggcggcggcaaagccaggtggtgcgggggctggtgttccgcaagaacgcggcgcacaagcacatgcccaccaagtgccaccgccccaccctcctcctcctccacggcgccctcggcctcgactcccatctcggcttctcctccttcgactccatggagcaggacaagctcattctccgagcctccatctcccacatcatccacacctgcagccccaacgtcgtcatggtcgagaagaccgtctcccgcgacattcaggagctcctcctgcaccacggcgtcactctgctgctcgacatgaagctccaccgcttgcagagaatcgctcgctgttccggtgctcccttgctctccttctcccagcttctccatgattgccccaaccacctcaagcactgcgactacttccacatcgacaagttcttcgaggaccataacaccaccaccactactagtgctgctgccctgaacaagccatctaaaacattgatgttcttggaaggcttttccaacccattgggatgcaccatactgctcagaggcgcaagcacccaagaactgaagaaaatcaagcaagtcttgcactacacaatattcgctgcataccatctggttgttgagacatccttctttgaagatcagagggtattcttgaatgatacaaatgttgacgggacaccacaaatcactcatcagacttccattgtctcaaatcgttcacttcctactgattatgatgtcacttgtactagcaggggatcattactggaataccatgatggggatcacaaggctacagttcctttcacaaataaaccagactcgtacacacaagatgagggtacagccatccactgtgaagcacctccatctgaaaacctgctgtcctcagtctccggatcactcagaagattcattgatatattccgttatcagaatatttatttacctgtaacttcttctcaagatacaactggtcatcagaatgaacaagatactgaaaccagccaagaaacggcgtctgataccttaacaaaggatcattcttgtgagtatatggatcagttaaatgatctccaggaacaagtattcgccaaaaccaaccaaaaaatgtcacagcctgatcctttcggtactgaaaaacatcagcagaatgtggaacagtacagggccggcgaaaatataaattcagacacagatgaggctgatgatgtaatggattctcagagcatactcatcttgttatccagccaatgtgttacgaagcaggttgtctgtgaggagagccatctataccgcataaactattatgggaatttcgatgtctccttaggacgatatttgcaagacattttgcagaatcagaacctaagctgttcctcatgtggagagcctccagatgctcacatgtactcttacacccaccgcaatggaaatctaactattaatgtgaggcgtttgctgcctcagcatcatttgcctggtgaatctgaaggaaaaatttggatgtggactagatgtctaagatgtgagcatgagagagggatatccaaatcatctcggagagtgctaatatcaactgaagcgcgtaatctctcctttggcaagttccttgaactcagtttctcaagccactctgctgctagaaggctatcagtttgtgggcatttggtcaacagggactgcttgcgatattttgggttgggttccaaagttgcaaagttgcaatattcatcagttgaaatttacactgcctgcaaaccgcaacgaacccttgagtttcacaatcccgatatgcgtgagtggttcgagcaagagggaagaaatgttcttgcgagaggagttaagcttttctatgaagtttctagcttaatacagcacatgaagattttctctgaggtggcaattaactgtggagactctcttcctgtcaaagaagtttcccaacttgaagagatgctaattgaagaaaaagctcagtttgtggattctctggtgaaggctgttgatgaaagcgggatgtctagctcctctgtgaatgagattcttggtgtaaattgtctctaccaggatcttctgattcgactgtacgtgtgggaccgtcgtttccatcaaattgttgagtgtaagtctggaagaatggctaattgtgtcggcaagaaggaagctgctgaatttgccggtgaaccagctgcaactggtgaaagtgcagtgccctttgagaatggatatatcaaggaaatgcagtacagcagcgaaaccttaactgatgaaaattcacggcgtgaggagcaacatatcacaaaagtgccttctttcagagtcttggaaggtacagatacgcagttgataaatcctgaatgtggggataacagggaaacatggatttggagtccattgcacgagttaagagagagttacaggcatgaactgcaggccgggtatttggaaagattcgaacttgtcaacaactattctccatctcatctatcccccctgcacaaacaatcatctgctgagttcatagttggtccaggtggcaatgtgttgtgcatatcagaggatgaaatatccagcataatatcccgcgcactggccatatcggaggaacgtcgccatcttttactagatgctctcatggttgaaggtgaggcagcctacagcagggggagtgagagctctaagatggagaaatcttacagctcattatctgaagcttcttcggcctcttcgtcgtggtcatctattggatcttcagactcagatgcaagcttttcatctgacgacctcttctccagctatgatagctcacttctgtcatccttacttcatcctgaagtatctgtcaatgggaaatcatctctcaaagggaaatactcggttatttgtgtacatgccaatcagttttacacccttcggaagaaatgctgcccatctgagcttgcatatatcacttccttgagccggtgcatgaagtgggatgctcaaggtggaaaaagtaaggctttctttgcaaaaacattggatgacaggttcatcatcaagcaaataaagaagacagagtttgaatccttcatagaattcgcacccgattactttaagcatgtgtatcattctctcgacactgggagccaaacttgtcttgccaaaattttaggaatctatcaggttaagcaaatcagacatggcaaggaagtgaagcttgatctgatggtgatggaaaatcttctcttcggacacaaattgtcaaggatatatgatctcaaaggtgttgttttctccagacatgtctctgattcgaatgaccatggaactgtttacttggatcaaaactttgtcgatgatatgcgtgtttcccctatatatgttggtggaagaacgaaacatctcttgcagcgggcaatctggaacgacacagcttttctcacttcaattaatgttatggactactcgttactggtgggagtggacaaagaaaagcatgagtttgtatttggcatcatagattacctaaggcagtatacatgggacaagcaactggagacgtgggtgaaaacttctttggtagtgccaaagaatgcttcaccaacagtaatctcacccaaagagtacaagaagaggtttaggaagttcatggccaagtatttcctgacagttccagacgattggagtacatagatagaaacgtctggggtcctgcaaatcctgtccattatctgttttgtttgtacacagtagaatggaacgctcacttgtttaaagttctccaatagtttgcagttttaaggcaaaattttggagcgaggcccaaatacatgatcaaaatcattgatccctcacatgtattggttactggtttgtggtagaaaaaaaagtttgtatc

SEQ ID NO: 17838 - DNA, 2354 bp, Oryza sativa
  ref <308>: DATABASE ACCESSION NUMBER: AK068258
  ref <309>: DATABASE ENTRY DATE: 2001-12-06
gactgattcctctccgccgccgccgccgcctcgcttcctcgtcgccggctcgccgcgccggcggcagcattgtgagcctccctcccctccctgtggctgtgcctcccccggtggccagccgccggcctttggcagtagtccctgcgcggcggcgggccggcggcgaggctggtctggacgcggcggaggcgactccgtccttccatctcggcttcgaatcgaattcgaagagagagaaaaatttggggggtttgagctgagctgaccaccacgtctaggtcaggtccacccccctgctgttcaagctgtggagtgaggagatgcgtctacttttgccaaggaattagcgaggcattgccaggtttccgatggataataagcatcataagaatgttgaggcagggaaaagctcattccacaggatggttcttgggcagcttgttggggaattcggtttcgacgaggagaatgttccttgcaatactccgagaagctcggttcgctcgcggttcggtgcttcggctagcagaatcgtcgcgtctactagcggtgcgtcagttagccccggtgagtatgtcagagatcctgggtccatattgagcctgcagccttggatctttaagaggagtggctctcagaagaatgaggaaaagatgatgctcgcaagtggtagtagggttgttggtgaaggcaagaatctgatggattcctttcgagatggctcggctgttgaggtctctccaaggagccctggtcttggttctggacctgggagaggtcgaggtgctcttaggagcagacggtcgcgtaggcacttgattaggccactcgtgccgatggagaattcctacattcctcaactttatagtgcagattttgaaattgatgagtgcacgtttgggccagctccctcccccgcttctgctaggccgttcatcgtaacagatggaaggagagtcattagtaagtcacgttatcaaccagtgcctgtaccatttcatattggatttgagaaggaagggcgtcgaaacagctcagaaatggtggaaagtgtaattgggattgctcctctacctgagctgaagaaatcaaaaagggagaggcagggatcacacaatggagggatgggtttgtctgctttcgagagtagtaagccatcaaaatcaacagatttacttgctcgactgcgcatattctctactggtgtcagtattggtattatatcatccactttatcaaacaagaatgagcttgatgcattaaagggtacagtgaaacgaatggagaacttgattcaagatctgcatgatgagctggagatgagagagggtttaactgtaaaggaattgcctaatgaaatgtctgtaaaaattgatgatgatgagagcaaagctcatgtaactgattcagagcccatgagcaaaatcgaagaagagcttgaagctgagcttgcgagattggaattaaatataacttcaaactgcttgaaagaacaaacatttgacttcagtgaggatctcattggagatattgtccagggagaactgaagatcgatacaacccattgtgatcttgctgaccacagcagtgagagtgcccatggcagggatagtagagaaagctccccagattacacacatgatgcaaactatcctgtctcacctagggatctcagcctccgtctccacaaggtaatccaacagagactcgaggagcgaatcaaggaacttgagacaacacttgcccagagtgagatgcagacgcaggtgcaagtgatggccaccgagcagatcttgtgtgaaagaacctgctcagacagtgattctggttctcccaaccaggaaagtccagtgtatatacaagaaactaactccttggtagaaccgttctgtctaaacctagctggagacgcgctagaggcttacgatgaagcttatgaggaattcatgagaattgcggactccccttgcaccacaagtaccaacgggaagcctcaagttcatgaagattactcggtggaccgcagcttgatctggggcttggaggatggcagtgcaaggaagctgaaaaaagtgcccacttgggagcgaattttaaagagcagagagcctaacagaactcaggagagtgacggagatgatgaagatgaatttgaagatgatgaccaggatagtaagatgctcatccaacagattatagagagaactaaacaaggctcacctgtactaattcatgctcaaagaattgttttctgtggatgattagattgttggactatattgaattagaatttagtgccaattgattgtttagagaaaaaaacataatattattcttttcatcatcttccggtg

SEQ ID NO: 17839 - DNA, 2289 bp, Oryza sativa
  ref <308>: DATABASE ACCESSION NUMBER: AK068259
  ref <309>: DATABASE ENTRY DATE: 2001-12-06
gaatcctaggcttccagccgctgtgccgacccaaacatggggcgctgctccaacggtttcagaccacaccactggtgagtgatccctttggttaggtactactactatctctgtgtgttttctttctggtttggaattcaggatacggaatcttaacataatcagtttgacactttgctgtttttaattctggctgttatatttacttactccagtaatagtaaccgatcaggtcatgatatgagaatatgagatgctggattgataatgggttggaaactggctggaaaggtttactgtatgtgattgaagggaaactgggaaggaaaagaatggagcaggcaacttgtggttcaggtaagagtgcaaagaagatatcctacatgcagggaaggtatttttgcccggtcagatacggcttgcggccttatttaccgggttgggcaggtaaattgggtaaaatggaacactattctgtaccgatatgggtggagcgtcaagtgtggtaagttaagttggtgttactgtcaagtgactcaaatcctagaactgataggaatcgaagataatttacttagccgacttggactgcttgtctcagctttgtttggatatgcaccagtgagcaagcgctgattgcttaacattcagagcttatctgagccgccgtacagggtttttctttgtctcgtcagctcacacatttctgtgcgtcatctaatctggatatgcactactagcacaagcggtggttgcgccgttgtggtcttctttactactagtatactactcctcactagtgattaccagtaagctagagtgattattctttttcctggtgatatgttagtgagtaaacaggaatattgtttcttttgctgctagtgcctgatcatgatgttctggctgtgtttagttcagcgtaaaatttaaattttagttaaattggagatgatataactgaaaaattatgtgtgtataacagattgatgtgatggaaaaaaactgaagtttggatccaaactttagatctaaacacagcctctgtctctctctcccaagttgtggctttcaggttcagctggaaggcagacgtgaggtgcttgtcgtttttgttttgcttatctgaaacctgaaagtgtggggctacatagtgtccactcaggggcaaaaaaaccacattggtttatacttagtttgtactacatataaaatcttcattatccaaaaaaactaatacctccattttaggttataagacattttaactttggtcaaagtcaaactgctttaaatttgactaagtttatagaaaaataataataatatttttaacacaagacaaatttattatgaaaatatattcaattactgatttaatgaaactaatttgatattataaatattactatatttgtctataaacttagttaaatctgaagtagattaactttaaccagagccaaaacgttttataacctaaaacggagggagtactagctatacaatctttctttctcactggccttgttctgttatgttctttgttcttttttacagaatgaaccaagtatggctaatggacttggagattcacgcaccgaaatatcgagtgctcttctctctcttttccatgagattacaaagatggtgcacgccatggtgggcaatctcacagagcagtctgaactctgaacaacaaggatattctttacccttcgaatcggatgaaagtatcgcacatattcttgtttccggcaggtagctgctcaccatggaatcgtttgacggcgaatgctgctgtgtaccaacaaaaagagataaaaatcaagcaattgtcgtgcaagtaccaatcaatcgccaggtcgttttcttctttccttacccaatggaggggattggagcagttgccgcgtccaaaaaagatcagaaatctgcctgctcgtcgacatggatgcattggatcatacagctacacaagctttctccagtcggattggtagattacacgcgtaatcgccgaccagatggagagaatcagagtgctaattcgcctcttcttcaccatgaacacgaagcttctcatgatctgtcgccgatagcttcgcctgaactactacaatttctgtccattttccttactgccgttcgtagctgaaggttccggcctcacaggcagatatgttcatttttattcctgaaaaaagtatggagatttcataacggaacgatacgaactcatatcgccatcagaaattaaaatatgaaattgaattataatttgcagcg

SEQ ID NO: 17840 - DNA, 1291 bp, Oryza sativa
  ref <308>: DATABASE ACCESSION NUMBER: AK068260
  ref <309>: DATABASE ENTRY DATE: 2001-12-06
ttcctatagttattagtattactcctaccacggagtggtcattagcttagctagtgttagcgagctccactgccagatcaagaagaagctagagagagagcagaggagcaagcagatcaagaagaagaagacgaggaagatgcacgccaagacggactcggaggtgacgagcctggcgccatcgtcgccgccgcggtccccgacgtcgcgcggcgggcggccggtgtactacgtgcagagcccgtcgagggactcgcatgacggggagaagacggcgacgtcggtgcactcgacgccggcgctgagccccatggggtcgccgcggcactcggtgggcagggactcctcgtccagccgcttctccggccaccccaagcgcaagggcgacaagtccagctccggccgcaagggcgccccggcggggaaggggtggcaggagatcggcgtgatcgaggaggagggcctcctcgacgacgaggacgagcgcaggggcatccccaagcgctgcaagtacttcctcatcttcgtcctcggcttcgtcgtcctcttctccttcttcgccctcgtcctctggggcgccagccgctcccagaagccacagatagtcatcaagagcatcacgttcgacaacttcataatccaggcggggacggacgcgtcgctggtgccgacggacatggcgacgaccaactcgacggtgaagctgacgtaccggaacacgggcacgttcttcgggatccacgtgacggcggacccgttcacgctgtcgtacagccagctgacgctggcgtccggcgatctcaacaagttctaccaggcccggagcagccggaggacggtgagcgtgggggtgatggggaacaaggtgccgctgtacggcggagggccgacgctgacggcggggaagggcagcggcagcatggctccggtgccgatgatcctgaggacgacggtgcactcgagggcgtacgtgctgggggcgctggtgaagcccaagttcacacgcgccatcgagtgcaaggtcctcatgaaccccgccaagctcaacaagcccatctccctcgacaagtcctgcatttacctctgaatccatcatattcattcattattatcacctgctcctcggatcacctccattcctgctgcttctttcttcctttctctctacgatctgatctgtgcattcttccttttcttttttcctttttgcggatccaacaacagccataaatatgtatgtactgtatttcccagtcagattcgttattataccaaacgatcaattcgttgc

SEQ ID NO: 17841 - DNA, 1334 bp, Oryza sativa
  ref <308>: DATABASE ACCESSION NUMBER: AK068261
  ref <309>: DATABASE ENTRY DATE: 2001-12-06
gaggtggagggggagagccatttcttcctcttcttctctcgccggcggcaaccctgcgagcctgcagtgacgccgccgccgccgctgcgtcggttctgagtttgcttcgtctccgggctcgctggattgagctttgtcaagagcagaagaagtcatgtttagctttaggaaaaagcatgcctctcgcttcgattcagatgacattgagcaacaagaagcaaagatccaagagctcagagctgcacttgggccgttgtcttcctctggtaagaaatattgtactgaagcatgcttgagaagatatctagaggcccgtaactggaatgttgataagtccagaaaaatgttggaagaaagtcttaagtggagaacagcttacaggccagaagacattcgttggcccgagatttctgttgaatcagaaacaggtaaaatgtacagagcaagttttgtagatagagaggggagaactgtcgtcattatgagacccgcaaagcagaacacatcgtcccatgaagggcaggtacggtttcttgtatatacgttggagaatgcaatcctcagcttgcctgaagatcaagagaaaatggtttggttgatagatttcacaggatggaccttggcaaatgcgacacccataaagactgccagagaatgtgcaaatatcctgcaaaatcattaccctgagaggttggctatcgggatcctgtttaatccccccaaagtatttgaggctttttggaaggttgtcaaacatttccttgacccaaaatcaatccagaaggtgaattttgtatacctgaagaacgaggagagcatgaagatcctgcacaagtacattgatccagaagtccttcctgtagagtttggaggaaagaacaatgtggtgtacagccatgaggagtactccaagttgatggtgaaagatgacattaaaatggcaagcttttgggcatcggatacaaaaactgaccatgttaacaaagtcattaacgagcactccgtccccgaggttacgcaacagtcgtcgctggtggctgcgaaagcgagctgaggagtatcaatctgccatgatgggggttataaaccaaaacaaattctaaaagacgatgtagaggactattggtatgttcatgataaataaatggaactgcagaataatttacctgggatgttacagctccatgtattactgctaaaaatctttagctaaagaccagtctacaaaaaatctttagctaaccgacctgagctacagattcagagattatagcgagttcattacaaactatcaccagtaaaaggaaataacagactttaatttgcccggtatt

SEQ ID NO: 17842 - DNA, 2205 bp, Oryza sativa
  ref <308>: DATABASE ACCESSION NUMBER: AK068262
  ref <309>: DATABASE ENTRY DATE: 2001-12-06
gtccataccacgatacactccactcctactcttttcttttcaagtttttgaatgctccgcttgctctcgcctcgtctcctcctcgattctcgtgtcgctgctgctgctgctgctgctgttgagcagagcaatctctcgctcgtctgcttggtgtttgctcgatattgagatcgaataggaagtagagttagagcgagtgaagtgattgctcctttcattgatggcgagcgagctacctgtggttagtttccagcttttctgagctgtactgttggtgtgggtgtggtcaatccgtgaaaaatccccaaaatcctgtaaagtttcatcccgaattcgttccagaaatccatccatttcttggatttgatctttgtggaatcgaatcatcaatccaatctcgttgggtcttcacggctccgattggggatttagcggaggtgtgtgttcgagtggtagcaatggcgaggttggtggtggtgattgtggcggtggccatggcggcgtggtgggcggtggcggcggtggaggggttggggataaactgggggacgcaggcgacgcacccgctgccgcccaaggcggtggtgcagctgctcaaggacaacgggatcgccaaggtgaagctgttcgacaccgacttcgccgccatgagcgcgctcgccgggagcggcgtcgaggtgatggtcgccatccccaacgaggacctcgccaccatggccagcgactacggcaacgccaaggactgggtcaagaagaacgtaaagcgcttcgacttcgacggcggcgtcaccatcaagtatgtggccgttggcaatgagcccttcttgaaagcatataatggttcgttcatcaacatcacattgccggcgctgcagaacgtccagaacgcgctgaacgacgccggcattggcgaccggatcaaggccaccgtccctctcaacgccgacgtgtacgaatccacggtgccgtccgccggccgcttccgccccgagatcgccggcctgatgacgggcatcgtcaagttcctggccaagaacaacgcgcccttcaccgtcaacatctaccccttcctcagcctgtacctggacgaacacttcccgatcaacttcgccttcttcgacggcggctcaacgccggtgaacgacggcggcatcatgtacaccaacgtgttcgacgccaacttcgacacgctggttgccgcgctcaaggccgtcgggcacggcgacatgccgatcatcgtcggcgaggtcgggtggccgacggacggcgacaagaacgccagggtggacctcgcgcagcggttctacgccgggctgctcaagcggctcgccgctaacgtcggcacaccggcgcggccgaaccagtacatcgagatgtacctgttcgggctggtcgacgaggacatgaagagcgtcgcaccgggcagcttcgagcgccactggggcgtcctccggtacgacggccagcccaagttcgccatggacctcgccgggcagggccggaacacgatgctggtgccggccaagggcatcgagtacctacccaagacgtggtgcgtcatcaacaccaatgccaaggacgtgtccaagctcggcgacaacatcaacttcgcctgcacgtacgccgactgcacgccgctcggcttcggctcgtcgtgcaacggcatggacaccaatggcaacgcgtcctacgccttcaacgcctacttccaggcgcagagccagaaggaggaggcttgcaatttccagggcctcgccgtgcccaccgagaccgaccccaccaccgcgcaatgcaacttcacaatacagatcaagtcgtcggcggcggcggcggcggcggcgccggtggccgccggcgtggtcgtggcggcgctggcacagctcctgcttctgtggtagcattgagatcagtgtgcattgttgatttgttgcattctttggagattttaccctttggattagaagcctgtgatgtgattcaggtgctttttatttgaagaaatagaggaggtggttaatttgttgtgtaattagttgatttgagtacagtttatctgatgacattagcttaaattggtgctttgtttttttttttgctcatatccgtccaatgtccaatgtcgattatctaatattcagaaagttcatctgacaggggaaaaaaactacgctttattctctcaaaataaattaatcattgtactgc

SEQ ID NO: 17843 - DNA, 2005 bp, Oryza sativa
  ref <308>: DATABASE ACCESSION NUMBER: AK068263
  ref <309>: DATABASE ENTRY DATE: 2001-12-06
gcccagatctgatcgcctcttctcgcgactcccccccaatgcgcaggggcggccacgccgaggcgttgctgctgcggcggcggcgcgggccggcgaggctgtgggtcgcggtgctggcgctgctcgccggcaccctctggctcttctcctcctcctcctccgctggcctcggcctcggcctcgcccgctcctcctacggactccaggatgttgatgtaaataagttgtggagaactgcagattcaaatggttggagggcatcttctgcaccgcgcacctattggcctcagtctgagtcaaatggttacttacgtgtccggtgcaatggtggcttgaaccaacaacgtagtgcgatatgtaatgctgttgttgctgcacgaataatgaatgctacactagtgctgccagagctggacacaaattctttctggcatgatgagagtggttttttaggtatttatgatgtgctccacttcatcaagacattaaagtatgatgttcgaattgctatggtcattccagaaattactacaaatggaaagaccaagaagctgaaagcccatcagattcgaccgcctcgagatgcaccagttacgtggtatacaacagttgctttggagaagatgaagaagtatggagctatatatttaaccccattttcacaccgcctggcagaagacattgatgatccagagctccagagattgagatgcagggtgaattaccatgcactacgattcaagcctcacataatgaaaacaagcagtgagatagtcaataagctccgtacagaaggccatttcatgtcaattcaccttcgatttgagatggatatgcttgcatttgctgggtgcattgatatattcacacctcaagaacagaaaattctgatcaagtaccgcaaggaacattttgcagaaaaggaacttatttatagggaaagaaggctcatcgggaagtgccctttaactccagaagaggtaggtcttattcttcgatccatgggatttgacaataaaacaagaatctaccttgcttctggcgatctctttggtgggaaacgattcatgaagccatttaaggctatgtttccacgcttagaaaaccacagcactgttggtcctggaaagctggaagaaaatacaagagggctcgcgggttctgcagtggattacatggtctgtctcctgtcagacatttttattcctacatatgatggcccgagcaactttgcaaacaacctaatgggccaccgcctatactatggtttccggacaacaatcacaccaaacaggaaggccctagctcccatattcatggacagggaggaaggtcgcgccgctcgctttgaggagcgagtcaggcaggttatgttcaacacatattttggtggcccccacaagcgtgtccatccagaatctttctacacaaactcatggcctgagtgcttctgccaaccgaatccaaggaaccgtgcagacaaatgccctccggacaacatatatgaggttctggagagccaatttcagagtgtagagggtgaagaagatatcgaagaagtgaaatccactaatcagactgactcaacgagccaaatagaagaattagtggtctaattgagttggctaactgcgattgtatgagaacaccatgttggatcattcattgaccaccgcatactggtggtatggcattttcagttgaaaggatgaatctgatggtgtaatgctgagtgttgaaagcttggtcaccacaggcaagacacgattctgtctaactggaactgttaagagaggctagaattaggagagcagtgaaccacattttggctagattggtcaactaggaatttcagagggaaaaccatacacgttctgtctatattagctattcatttgttaaagatttgagtgcggcatgtggtgtgtaagtatgatgaggctacattgactggaatccttaatacaggatatattgcctttatacgggatatatattgcagctg

SEQ ID NO: 17844 - DNA, 1831 bp, Oryza sativa
  ref <308>: DATABASE ACCESSION NUMBER: AK068264
  ref <309>: DATABASE ENTRY DATE: 2001-12-06
gtataccagttatatatgtactgcatctttccacttttatttcctgtatttgtttaaatcttcatattatgcattgatcgttaatggattcttcttactgtatgttatcgatatataccaagaaaagatcgtgtgcaccaatgaaatttgtcatctattggaataaactatccacatttattatatattcaatataagagcatcaccaacagttcccaaaattctatccctgaaatcttttgtttaaatcactaatgagaaaattttgggatagaatctagggctaacttttcaccaccaaacctaaaattttgaaaccatattgaacatctattactgatagaaaatcgtaataatccaggtaccaatacttatagctgtatgctcaacatgaatttgttaaaccatgcctaaacgataacacacgtgctttttcatcctcactttatgtaaaatgtttagtaagtgttgctagaacttggacaactagatacgtaaacttgtgtaaccctcccaaaattagcatggtaggactaaacttctcatttcatactgtacacacgtagacttctatgcactaccagacttgtgctaaccctacggatcaaaaattgtcagaaaaatagggtttatccgtagaaattgtatttttgagggaaccgacaagaattgccgatagaaaaatcacaacggagaaattatattttcctatgggtttccctatgtgtttaacacagaaaacttccattggcatcgggttttgtcgcctaaattgtgacgtgctgccgtcaggaaaaaagatcatgtggcaccataaaataaaatggctccaagacaacctcccgcccccccccccccccaacaattcaatccacatatccatatggattattgaacataactttttcaacaaaatatgcaaatgaactcttttttttttactgatacataagtgataaagctacagataggcatgcacaacaattcagcatcaaattttaagcaaacttcaatcctgtaagttatataaccaatacacgtacatgccaattcacatcaacaagaatcttttattcaccactataagttacaagttatggtactacatgtcctccggcagcaatattccaagctagatgagacaatgaatgcagatatcttatcccttttcgatgcatttttatctctatctattttctcctctttacttgccttgagaatactacagattatggtaaaaatatatcaacgtataggagacacacaatattgtaagctggtcaataagatcctgctatatgcttaaaaagttgtggttactgaggatactacaaacagcataatattgaatacatgtaagtaactgtcagtctaagaattccaaggatataaataactgattaatcatatggctgctattatcatgctttaatgttctatactatttatgaaattcatatattatttagcccaatagcttaaatggaattatctgccatatcaatctagctagcaggaagcacaattaacccatagcttatacttaatctaatcgtattccagcgggctttgcacaaaatatatatccttcactgacacacgaactacatatccttaacaagatggacagggactgaagatacacgcaaaataatgaactagctagagactttaagtgtatacatcgatctaaatatgttgttttttaatcataacaatattagaagaaaccaagggaaggccatggcttttttctacaataggaaactatgaagtcacaacctctcagcattcaagcaccttacttaatacagtagacaaaaagcattcg

SEQ ID NO: 17845 - DNA, 1805 bp, Oryza sativa
  ref <308>: DATABASE ACCESSION NUMBER: AK068265
  ref <309>: DATABASE ENTRY DATE: 2001-12-06
gactaaattgatggggttacaatatactttccagtataagaaaggagtggagaacgtggtagctgatgctttgtctcgagtgcctcctcagtctcacttatctgctctgtcagtggctagccccatttggttgcaggaagtgttaaactcgtatgctgtggatactcaggctcagaagttattggtagaattggcagtccattctcctaatgatcagggttattctttgactgatggtctcattcgtcatcatggtcgcatttggataggagctaatctgggtttgcagactaagttaatcactgcttttcattcctctccaattggtggtcactcgggcactatggccacttatcaccggctcaaaaagttgttctcttgggttggtctgaaaactgcagtattcaactttgttaaacagtgtcaaatctgccaacaagctaaacatgagcattgtcgattgcctgggttgttagttcctttaccagtaccgaaagaagcttggatcgacatctcgatggattttattgaaggtttgcccaaatctgatggttacactgttatacttgttgtggtggatcgtttcactaaattcgctagtttcattcctttgagacacccttatactgcttcacaagtagcggtcacagtggataaatttgtgtttaagacccatggcttaccacagtcaattgtgtcggatcatgacaaagtgttcactagtcgtttttggggtgatttgtttaaagtatggaacactcaattgaacatgagtacggcatatcatcctcaaaccgacgggcaaaccgaaagagtgaatcagtgtctcgagatgtatttgaggtgcatgattcaagctactcccaccaaatggaacagttggctgcatttggctgagtactggtataatacatcttttcatacatctttgggttgttcccctcacaaagctttgtttggagtggaacctcatatcagtcaagtgccggtgctgctgtcctcagttcatcattctgtggtggacttaatttctgaacgcaatcagttgtctgtctttttacagcaacagttacaacgagcacaattgcgtatgaagcataaggctgataaagggcgatctgagcgttccttttctgttggtgatcatgtctttcttcgcttgcaaccttatgctcagtcttcggtggtgaatcgcccatatcccaaactggcattcaagttctttggaccatttcaaatcttggagaaagttgggtcggcagcttatcgtctggctttacctgaaggcagtgcggtccatcctgtgtttcatgtgtctcaactcaaagctcatgtgccagatcacactccagtgtttacttctctacccacaccggttgtactggatgctgccgatgtgtggcctgaactgattctggacaggcgtctggtaaaaaaggggaatgcagctcatgttcaggtgcttatcaagtggtcatctctgtctgctgatgatgccacctgggaggattatgatgtgttgaagacacgattcccttctgcgccagcttggggacaagctgcatctttggcgggcggtactgtcacagctgatggtattcagtgcgacgcgccacagtagtcgtgatggacagctagtagcgttccaggaatagagtgaaatgggcctgcgcgctcacatgagttatgttgggttgttgggcctgcgagctcatgctgttgcttagctgtaaggtctataagacaagggaccactcggtggggaagacatcatgaatgaaaaggaagaaaactaatcctccccc

SEQ ID NO: 17846 - DNA, 1999 bp, Oryza sativa
  ref <308>: DATABASE ACCESSION NUMBER: AK068266
  ref <309>: DATABASE ENTRY DATE: 2001-12-06
ttggtactcaagccggaggcagcacactgcaacttaagtttttctatagctcctagcaagctagcaatggctccctcggtgatggcttcgtcggccacctccgtggctcccttccaggggctcaagtccactgcgggcctcccggtgaaccgccgctccagcagctcgagctttggcaacgtcagcaatggcggaaggatcagatgcatgcaggtgtggccgattgagggcattaagaagttcgagactctgtcgtacttgccgccattgacagtggaggaccttttgaagcagatcgagtacctgctccgatctaagtgggtgccttgcttggagttcagcaaggtcggattcgtctaccgtgagaatcacagatcacccggatactatgacggtaggtactggaccatgtggaaactgcccatgtttggatgcaccgatgccacccaagtgctcaaggagctcgaggaggcaaagaaggcataccctgatgccttcgttcgcatcattggctttgacaacgttaggcaggtgcagttaatcagcttcatcgcgtataagccaccgggttgcgaggagtcaggcggcaactaagcgctttcgttccttcgtgcatgttctttctttttcttttttttttttgtgtgtccgtgttaagctgcacgtaattgttctctcgcgctccgacctgccgttgttgcaagagtactactacaactatcggtctatcgttcggtgacggtgagacagggcacgtgaatgcaagatctccggctatacacacgtactcatgtaatatgatgcctagagcatatctgaatccgtcgacaatgaaattttggttttgcaaaatgctggtatttgtttatcatcctggcacgtgatatttgcctagagcatctaaatcacttttacgaaatgtgcgcgtcaacaaactgatacggcccaaatgccagaaattaccagcatatatagccatatcaacttttgattcgtatatatgaaggttgatttagttagagaaattcggttgtgagagaaggaggctagcaaagattcggttgatcaagctgtaccgccaggccaggacgtgctgtgcgcgcggctgtgccgcttgaccgcagaaccatacggaattgacggaccaattgtgcatacggacttagctaaaataattgttgatttttggcaataagaaaagcgagtagcacataaaatctaaagtggatgagtaaagggacaaaattttatacatgttcaggccttctcgatgagaagtaatactatactcctgttttggggattatatttgtcagatgttgtatcaatctgacgatcgagttatggttattgttggcggctgttaaatatcgattttatgccatcaatacctgtataatttatacagaaataataaaacattcaacatagtggtaggctttaattctaacatattccataagtgttggtgtatatttggatgcaggtaataaaccaccgaattaggaggaaatctagactaagttgaaggaaattttcatccatacaagtgttgggctttttaactccattttaacaccaaaatgcaagcccaaaaacctgcgaaatggataaggcagactgagaaggaggcccaggccaaaacttgggccagttgggccaagccaggtttcggccaaatcctgatcatcgctgttgatctcagggtttggcatggacgctcttgatttactcctgatggcagttgcagggcatttccgatcattcgcatgctctacaaccatcatacctacttatttaaggagctctcatcctcacttcatatcacacactccaatcttgagctgaattataagaggctctattgtattttattgtatactagaattagggaaagattaaggtcgtagaagaaatcggaggaattccggagttatcggtgatccttttctatttcttatactttgttatttgctttaatagaaatatcatttcaagt

SEQ ID NO: 17847 - DNA, 1363 bp, Oryza sativa
  ref <308>: DATABASE ACCESSION NUMBER: AK068267
  ref <309>: DATABASE ENTRY DATE: 2001-12-06
gaccggacaagccaagcgcgcggcgcgtccacacacatttgcatagccacagccaagaagcgacgccttcttctgcttcctctacatctccatcgcgctcgccacctacctgctcaccatgatcgtggtgcagaaccagaccaacttctcgcacaccgcctacgtcgtgtcggccaccgcgctcctcctcgtcctcttcctcccgctcgtcgtcgtcatcaagcaggagtaccagatcaagaaggagctcgacgactccctccgtgagccccccacggtgaccatcgaaaagccagccgccgccgccatgcaaatgtcagcgatcaccaccaagcccaaaaccgagacaccgtcgtcgtcgtctccggcgccggcgccgccgtcttgctgcctcggttcttgcctgaagcacatgttcaacccgccagcgcagggggaggactacaccatcctgcagtcgctggtgagcgtggacatgctggtgctgttcctcgccaccatttgcggcgtcggcggcacgctgacggcgatcgacaacatggggcagatcgggcagtcgctggggtacccggcgaagagcatcaagacgttcatctcgctcatcagcatctggaactacgcgggccgcgtcacctcgggcttcgcgtcggagatgttcctcgcccgctacaggttcccgcgaccgctgatgctcacggcggtgctcctcctcgcctgcgtcggccacctcctcatcgcgttcggcgtcgcgcagtctctctacgccgcctccgtcatcatcggcttctgcttcggggcgcagtggccgctcctcttcgccatcatctccgaggtgttcggcctcaagtactactccacgctctacaacttcggctccgtggcgagccccgtcggcgcctacgtcctcaacgtccgcgtcgccggctacctctacgacgtcgaggcggccaggcagcacggcggctcgctcgccggcggcgacaagacctgcctcggcgtgcagtgcttcaggaaggccttcctcatcatcaccgccgccaccgtcgccggcgcgctcatctccctcgtgctcgtctggaggacaaggaacttctacaagggggacatctacgccaagttccgcgagaacaccgccaccgacgaagctaccaccaacggtaactccgccgatacagcggcggaaaaaaggtcaaccttagtcaatgacgaggacagtaaaaaggggtagtaatgtagtttactgatataaagattactacaccaaaagacaagagcttgttacttcttattagcagaaaagtcaaaaaatggtaggcttgctgctaatataagtttccagatatctgtaaaaaattttggggct

SEQ ID NO: 17848 - DNA, 1876 bp, Oryza sativa
  ref <308>: DATABASE ACCESSION NUMBER: AK068268
  ref <309>: DATABASE ENTRY DATE: 2001-12-06
tgagggaaaaattccgaaagccacccacactctccgtctcctcctcatggcgatctcgaaggcttggatctcgctgctgctcgcgctcgccgtggtgctgtcggcgccggcggcgagggcggaggaggcggcggctgcggaggaggggggcgatgcggcggcggaggccgtgctgacgcttgacgcggacggcttcgatgaggccgtcgccaagcacccgttcatggtcgtcgagttctacgccccgtggtgtggacactgcaagaagctcgctccagagtatgagaaagctgcacaagagctaagcaagcacgatccaccgattgttcttgccaaggttgatgccaacgacgagaagaacaagcctcttgctaccaagtatgagatccagggtttcccgacactcaagatattcaggaaccagggcaagaacattcaggaatacaagggcccgagggaggctgagggcattgttgaatacttgaagaagcaggttggtcctgcttccaaggagatcaagtcaccagaagacgcaaccaaccttattgatgacaagaaaatctacattgttggaatcttctcagaattaagtggcactgagtatacaaacttcatagaggttgctgagaagctgagatctgattatgactttggccacaccttgcatgccaaccaccttccacgcggtgatgctgcagttgagagaccattggttaggctattcaagccctttgatgagcttgttgttgacagcaaggattttgatgttactgctttggagaagttcattgatgctagcagcacccctaaagttgttacttttgacaagaaccctgacaaccatccttaccttctgaaatttttccaaagctcagctgccaaggctatgctatttttgaacttctccactggaccgtttgagtctttcaagtcagtttattatggtgctgctgaggagttcaaggacaaggaaattaagttcctcattggtgacattgaggccagtcaaggtgccttccagtactttgggctgagggaggatcaggtaccactcatcatcatccaggatggtgagtccaagaaatttttgaaggcacacgttgagcctgaccaaattgtttcttggttgaaggaatactttgatggtaaattgtctccattcaggaagtctgaacctattcctgaggtcaacgacgagcctgttaaggttgtggtcgctgataacgtccatgattttgtcttcaagtctggcaaaaacgtccttgttgaattctatgcaccatggtgcggacactgcaagaagctggctccaatcttggatgaggcagctacgacgcttaaaagcgacaaggatgttgtcatcgctaagatggatgcaactgcgaacgatgtgccaagcgagttcgatgtgcaaggttaccccaccctgtacttcgtcacccccagtggaaagatggttccctatgaaagcggcaggacagccgacgagatcgtcgacttcattaagaagaacaaggaaaccgctggtcaggcgaaggagaaggcagagtcggccccagccgagcctctcaaggatgagctctaaacaagtgagtaggagagggcatggatgcttgtggctgtagacatggaggagacgggacctgacggctaacatgtttgacagctccaacgccagattttgccaaggttctgaaagacggtgagatggagagtagtgagagtgggggaaatagttgatgtttcggcatgtctgtcccattgagaaatactgtacaatcaacccgtggtacctagttaattttacccatgcaaaagtgatagtcggtagagaagtggttctggacaagttgaataaagctgcctcggtcgcatc

SEQ ID NO: 17849 - DNA, 3440 bp, Oryza sativa
  ref <308>: DATABASE ACCESSION NUMBER: AK068269
  ref <309>: DATABASE ENTRY DATE: 2001-12-06
gtgcaatcctctcttgctagccatctcttgcaaccggcacttcccccctgcgagtccacgagatctgctatcgcatcatcagagcagactaactagcagccacactgagaaagagtgcacaagatgtctgaagcgatagcccttgcgatgtcaaagattgaaacctgtgtagagactggagcttcattcaacaacgcaatgtccaagctatctaaaaaggataaggttgtgaaggaattgctggaaaagatcaaacaaatacaggagcaattggatatcaccaatgatttcatccaaaatcacataggcacagccaaccttggtgacccattagatgagagttggattgccacagtgaggaggctggccttcattgttgaggatgtaatggagaagtacttgtattatgctcatcaactgcgggaagaggggtcacagaagcaccctgtcaaaaggtcaagctatgtcgatgttttcaaaaaagttggtcagttgatggacaagataaataatcgcattgggcaccttttaagcatcagagagcagagtaagcttgcaccgcagcttgttcctcactcaccataccccgattcagagggccaaccggagctcattggtaccaatggcccaattaatgtactactgaaatttctgaagcatggtgaggacggagctgtgctgcaactcaaggttctatctatgcttggaattggtggaattggtaaaaccgcacttgcatccaaggtgtatcgaatgcttcgagaagaatttcagagccatgcttttgtgacagtgtccaagatgcctgatatgacaagggtcttatttgatatattggaccaaattggcctgcggaagtatccagctagtttgaacgagaatcaagtcattactcaaattggacaagacctaaaggataagagctatctcattgtaattgatgatttatgggatatgcaacattggaagactatcaaggatgccttgcctgatgtcaattgtggtagcagattgatagttataactcgtctaaacaacatagccaaaacatgtagctctggccagaataatttgacgtataaggtcatgcctcttgctcaccatgactccagaacattgtttctcaaggaaattttgggccatgagggcagttgcttggatgcaccagtttttgatgaaattttgaaaatgtttggtggtatgccttcagcactaaaatgtattggctcatttctgcgcaacaaatcagtcacaactgagtctcagaagatcaatatgagttctttgtattctgaacttgagaattttcctagctggaagaaattgaaaattgctcttttcctcagttgctgtggtccttcccaaactctggaggcttgctcgttgtacttaagtacattaccagacaatcataagatcgagagagatattttgactaggaaatggatttctgaaggaattatccttaaagatgatgagcttagtattaacggagtggtgaataattgctttgaggaactaatcaataggaatgtgattcagcaagtggacaatagttttggggagtaaacctatgaaatccaatttctgatgcaccacattcttaggcagatagcacgagaaaggaattttgctaccttcctatcggaaaatattttgatatcatgcaaggagcctatccatcgcctctcatttcactgttctaagttaagaatttcgattgataaaggtgatattcagattatttcggattcaggagattcaaatcaaaaacctaagagtctatcgcttgctcgctccataactctatgtggttatgcaaagccagtttcttttaagcttttggagcacctgcacgtgttagatctggaaggttgctggaatgtggacaactctactttggatgatatatgccgcatgatcctgctgcagtacttaagtctcaagaaaacacgaataactgtgctacctccacagattgagaatctaagatgtctcaagacactggctgtaacccaaactggaatcgcagaactcccactgcaaattgggaagttgcctgatttggagactctggatgtaaggcatacacaggtcaaagagataccgaaggaacttgttcaacttcctaaattggtgtgtttgctttttggtcaaagtggttttcacggtggagttaagttccctgtgggaggtaatccttcaaagtcactaaaggtgctgggttccatcgattcaacacaatgctcagcaagtttcatgggggagcttagtagtttgacagggctgacgaagctttcagtagtgtgctatgacgggaccaaggacatggagtggaatcttcgtatgatgaattctatgttcaaatttagcaatcttgtatccctgacaatttatggtgatttcattttgggcaacgaagttcctgcactccagaatcctcctaaacttcagaagttgaagttggccggaagatgtttgagtgttcctggttggattgataaattcagcgatgttacccttctagatatcagggtttgcagcctagaagagagtgatatggagatacttcgcaagatgagctccctgcagagacttgtgttaacacaggttcacatgccaataaaacaactagaaatcacaaaggaagcaagtttcagcaaactaaatggtttcacatttgattgccgtgtgccttgggtaacctttaaagaagaagctatgccaagtctgcaatacctcgaactgaagctttatgctggcccagcgggtaaaattccttcaggtattacatgcctaccatgtctcacaaaggttatcctccggtacttggtacattaccaaagcagtgctagtgtacaggatacaatttctaaaatgagaaaagaaagcagtgagcatcccaatatgatcgtgctttctcaaaatggtgagcatgagattttcccacaaaatgctgtttctcgaaatggcgaactcgagattgtcccggtcaatgctgttgatggcatgcatcaggattagcacaggcaaaaattgaagaacaatattgtcattgttaacgccctatctgactgcattctactgccgttgttctctggtgggttataaggactggtatattaacttgcatcgtacaaacggcaaattaatcctcattctcgtgccagacatagttgtggagcagacgggcaaatcagatcctattggaattacaatccttctatgactcaagccaaccaaatcaatcaagatagaagccaaattaagttgaaaaatatttgctagggattgcaattcgcagcagtgaggagcgcaagtaacaatcaggtagtactttgataatttggtttctctaaagttccgcatgtattagtatgtattgaattggaattaatgtgtccctgttcacattgatatctaatatatcacgatttccc

SEQ ID NO: 17850 - DNA, 1005 bp, Oryza sativa
  ref <308>: DATABASE ACCESSION NUMBER: AK068270
  ref <309>: DATABASE ENTRY DATE: 2001-12-06
gggagacccctcctcccctcggcaacgtaacacaagagaagaagagatcgccatgtccaacgtgcccacctccctccgcgactcctccctcaccgtcttccgcctcgccatctccagctccgacccctggcccttctccctttaaccccatcaaacgcttcttcctcttccaagaagatcacaagcttcttcgtgttcttgttcttcttcggatcactcggttggtttcttggtttcttggtttcttggattgttgcgagatgcacgggaagcatcagcatcagcagcagcagcagcagcagggggggatggtggtggtggcgccgaaggggtgcgtgacggtgagggtgggggcggagggggaggagcagcggcggttcgccgtgccgctcgcccacctcaagcacccgctcttcggggcgctgctcgaggaggccgagcgcgagtacggcttcgcgcagcggggcgccatcgccatcccctgccgcgtcgaccgcttcgtccacgtcgagcacctcatcgtccaggacctccacggcgccgccgcctcccacctcctcgacctcgactcctcctcccaccaccacacccagatccacctccacctcccccgcttcgccggttgcttccgcgcctgatccttccatcatctccatggatgcatcgccatggcggtggagcggagctcccagattgctcttcttcttcttcttcagggttggttggtcgattaattacttagtttagctagttttttggtttccttttgcttcgtcctccgatctctcggtttgttggggatggatttcgattgggtttgtggacgggagaatcggaggacggattcgatgctgatgacgacgaaaaattgagatcgatctcaaaagtgtaaagacagagtaattcttcttagtagctttattctagttttattttttttatcttttttctttgcttgtacatccacttcttgaaacacatcaataatacagtatactttgatcg

SEQ ID NO: 17851 - DNA, 1054 bp, Oryza sativa
  ref <308>: DATABASE ACCESSION NUMBER: AK068271
  ref <309>: DATABASE ENTRY DATE: 2001-12-06
tactttccttctactcacacgcacacagtcctcagtatcacacacacactcacgctcacgctccactacaacgcactgtacacagttgattattagctagttgggtttctggcccggccgccggcgagatgggcaaggacaagcaccaccgcgactggatcctccggcggtgctgcggctccatcgccgcctgcatcctcacgctcgccgtcctcgtcggcttcatcgtgctcgtcatctacctcgcgattcacccctccaagccttctttctacctccaggacgtccagctccgcaacatcgacctctccgaccctgccatctccctcaacctccaggtgacgatcgcgtcgaggaacccgaacgacagggtgggggtgtactacaagacgctgcacgtgttcacgacgtacagggaggagccgatcacggtgccggtggagctgccggcgatctaccaggggcacaaggacgtgtcggtgtggtcgccggtgatgtccggcgagtcggtgcccgtggggcagtacgtggcggacgccatgaggcaggacatcgcggcgggctacgtgctgctgcacgtcaaggtggacggccgcgtcaagtggaaggtcggcagctgggtctccggcggctaccacctcttcgtcacgtgcccggccctgctcgcgccagcggcggcaacgtcggcggcgccttcgccatgagcgccacggcgggcggcggcgccggcggcaacgccaccgtctcgctcaagttcgcgcaggcggcggactgcaccgtcgacgtgtgacgcgaaatcaccgtgcaacccccagtgagcgtgtacgctagcttgtcgcgggagaacgcacgcacggcggcgccatgagagctacagacgcaacggcaacggcgcacctcgccgaagtaattagtatcggattagcaattgtaacagtgtaagcttatcgagtcagcgcgtcttccccccctcccccaattctgaatctgtgcagaataaaaggccacttttatatgtatacatccgcttagtatcatttgtcattgtcgaagc

SEQ ID NO: 17852 - DNA, 1523 bp, Oryza sativa
  ref <308>: DATABASE ACCESSION NUMBER: AK068272
  ref <309>: DATABASE ENTRY DATE: 2001-12-06
gtctctcttttgctctctctggtgagggaaatgagcagtgacacaagcaggcgggatcatgccgccatggccgtgcgggaggtcctcgccggcgacaggaaggtgggcaccgtgtccaggtcggcgaggaggaggaggcttgagctccggaggctcgggcggacggcgtcggcggtggcggaggatgacgccgcgaagagggtgcggccggcgtcggacagctcctccgactcgtcggagtcggctaaggtagcgcccgagcccaccgcggaggtggcgagatggccggcgtgcgtgtcgcacggggcggtgtcggtgatcgggcgccggagggagatggaagacgccatcttcgtcgcggcgccgttcttggccgcctcgaaggaggcggcggtggaggggagcggcgtcgcggaagaggaaggcaaggaggaggatgaggggttcttcgcggtgtacgacgggcacggcgggtcccgcgtggcggaggcgtgccgggagcggatgcacgtggtgctcgcggaggaggtgcgggtgcggaggctgctgcagggcgggggcggcggcgccgacgtcgaggacgaggaccgcgcccgttggaaggaggccatggcggcctgcttcacccgcgtggacggcgaggtcggcggcgccgaggaggccgacacgggcgagcagacggtgggctccaccgccgtcgtcgccgtcgtgggtccccgccgcatcgtcgtcgccaactgcggcgactcccgcgccgtcctctcccgcggcggcgtggccgtgccgctctcctccgaccacaagccagacagacctgacgagatggagagagtagaagcagcaggtggcagggttatcaattggaatggataccgtatcctcggtgtccttgctacttctaggtcaattggagactattacctcaagccatatgtaatagctgagcctgaggtcacagtcatggacaggacggacaaggacgagttcctcatattggcgagcgacgggctgtgggatgtggtatccaacgatgtggcctgcaagattgcgagaaattgcttaagcgggcgggcagcttccaagtacccagaatccgtctccgggagcaccgcagccgatgctgccgccctgctggtcgagctcgccatctcccgtggcagcaaggacaacatcagcgtcgtcgtggtcgagttgagacggctgaggagtagaacgacggcgagcaaagagaacggtaggtagcgtgtagaagttggagcggctgtcacagcatttgagcatggcgagagaggaagaagctagaggatttgcagctgagtttgctgggatgtttgtaaagagaaggctcaggatattattccgtccatagagctgctccgatgtcgtgaccgatgagcgtgtgctatttgtagctgagatgctgtattgcgttgagttgggttctttagttcttaagctgacatttcggccgaggcagcatgaagcatgtgctgatttcgtctgttctgatcattggttatctc

SEQ ID NO: 17853 - DNA, 878 bp, Oryza sativa
  ref <308>: DATABASE ACCESSION NUMBER: AK068273
  ref <309>: DATABASE ENTRY DATE: 2001-12-06
gcgaaattgcatccaacagcagctgccatagttgcaagtgagctagagctcagagaagaggaggaagaagaaggcgtcaatggcgaccaccatagctgcgatggccatgcttaagccgtccaagatcgtggcgcggtcatcgccggcgccgtcggggagcggcagggtgcctagcatctcgctcaagagcctggccaagaagggcatgtcggtgtcgtcgtcgtcggcggcggcggcgcccgtggcggcggcggcgatggcgggcgcgttcttctcggcgctggcgtcgacggacgcggcgctcgcggcgcagcagatcgcggacgtcgccgcggcggcggcgggtgccgacgacaaccgcgggctggcgttgctgctgccgatcgcgccggccatcgcgtgggtgctctacaacatcctccagccggcgctgaaccagctgaaccgcatgcggtcggagcaggtgctcgtcgccgggctcggcctgggcgcggcggcgggtgccgggctcgcgttcccgcccgaggcgtcggcggcgcaggaggtggcgaggctggcggcggaggcggcggcggcggagggcggcgacaaccgcggcctgctgctgctgttcgtggtggcgccggcgatcgcctgggttctctacaacatcctgcagccggcgttgaaccagctaaaccgcatgcggtcagactgagagcttgagcttgaagattgcatccgtacatgtgtgtacgtggtgtgttttgagggtggtggagtggagtggagtggtagtgacgtggaatgtggtgtacttatgccttaattaatcctgttcctaatcctctcttcccttgaacaaaaattcagtacagctcttcttcttatttgaattc

SEQ ID NO: 17854 - DNA, 1816 bp, Oryza sativa
  ref <308>: DATABASE ACCESSION NUMBER: AK068274
  ref <309>: DATABASE ENTRY DATE: 2001-12-06
gagtaccccttccactactactgctcgtgctcgatcggccaaccatggcgtcgggctccaccgatcccctcctcccccgcgccggcgccgcacgccgccgccccgccaccggcggctggaggtccgcgctgttcataatctgggtggaggtggcggagcggttcgcctactacggcgtctcgtccaacctgatcagctacctgaccggccctttcggggagaccaccgcggcggcggcggcggccgtgaacgcgtggtccggcgccgcgtcgatgctgccgctgctcggcgccgccgtcgccgactcgtggctcggccggtaccgcaccatcgtcgcctcctccgtgctctacatcacgggactgggcttgctagcgttgtcgtccacgttctcgtcgcctcagagccaacaatgcagctcctccggcgatggccggcaagtttgccggtcttcctccgtgcagagggccttcttctacgtctctctctatttggtggccatcgcccagagcggccacaagccgtgcgtccaggcgttcggcgccgaccagttcgacgcgacggaccccggcgagtcgtcgtcgcggagcaccttcttcaactggtggtacctcgggctctgcgccagcgcgaccgtcacggcggcggtgatgagctacgtgcaggacaacgtcggctggggcctcggcttcggcgtgccgggcatggtgatgctgctcgggctcctggtgttcctgctcgggacgaggacgtaccggttctacgacggcggcggctccggcgcgttctccggcgtcggcgaggccgtcagggcgtggaggaagagccggcggcgaggagaaggcggcggcggcggcggcgccacggttgaggcggagcacggcgagctcgcggaggaggtgagggggatggcgaggctgttcccgatatgggcgacgtgcctgctctacggcgtgctgttcgcgcagccgccgacgctgttcacgaagcaggcggcgacgctggaccggaggatcgggccgtcgtcgtcgttccaggtgccacccgcggcgctgcagagcttccttggcgtcagcatcatcccctgcgtgctgctctacgagcacgtcctggtgcccgcggcgcgcagggccaccggcgtcgccaccgggatcaccatgctgcagcggatcggcgcgggcatcgcgatgtgcgcggtgacgctgctggtcgccgcgctcgtcgagatgaggcggctgagcgcggcgagggacgccgaccccggcgcggcggtgccgatgagcctgtggtggatggtgccgcagtacgtgctgttcggcgcggcggacgtgttcgccatggtcgggatgcaggagttcttctacgaccaggtgcccggcgcgctcaagagcctcggcctcgcgctctacctgagcgtcctcggcgtcggcagcttcatcagcagcttcctcatctcggccatcgacgtcgtcacgaggagggacggcggcaccagctggttcgacgacgacctcaaccggggacatctcgactacttctacctgcttcttgccgcgctcaccgtgctggatcttcttgcttacgtatatttttcgatgtcttatatttacaggagaaaggttgtcgatgttcaatgatccatggatcgatgcacgcaatgcgcttgtatagatgtatattaacctgctgaattcagcatggttataacagtataatggcaatgccaggggtaaaatattggtgtaaaattccctctttacctttattttccttctagttacaaataaagaagtgagaatcgaaattcattgcctgc

SEQ ID NO: 17855 - DNA, 2354 bp, Oryza sativa
  ref <308>: DATABASE ACCESSION NUMBER: AK068275
  ref <309>: DATABASE ENTRY DATE: 2001-12-06
gacacgcgattcctcccctccaagtctccaactaacagagaggggtggtggtggactcattcgcgcgaccaagtatccgctagtacgcgccgcggagtggaggagacggagagagcccgcgcgcgcgcgcgcgatggtggcccgccggttcgtcgtgcggcaggggggcggcggcggcggaggcggcgaggcggaggagcacgaggtggagtacgacacggagcacggcctcgacatcctccgcctccagatcttctccctcacctccgtcccgcccgagctccagaagatcgtggtggaggcggacgggtccgtggtggacgacgggaccgacctggaggccatctccgagggcctccgcctcgtggccatcaccggggaggaggaggaggctgaggctgcggctgcggcggaggcggcaagggcgcaagagaagtcggatgaggagctcgcgcggatgattcaggcggaagaagaggcacttcttctacaacagtacagcatacgcaatgatggaggggaggaattcagagaaagagttgagccatacatgcaccaggttctgatgtacgaggatccaatgcgtcaagaggcagcacggaagactgttccaatggatgaacttcaggagaaggcactggtttcactagctaaggaagggaacttcagtccttcaaaagatgaagaggatcatgcctttctcttgcaattgcttttctggtttaagcaatcattcagatgggtcaatgcaccaccctgcgacagctgtggccgtgaaacattcaatgttggaatgggcaccgcacttccctcagaaattaaatttggtgccaatcgcgtcgagatctataggtgcaactattgttctagtaccacccgttttccaagatataatgatccatataagcttctagaaactaggaaaggacgctgtggagaatgggccaattgctttacattctactgtcgaagttttggatatgaagctcgtctgattctggatttcactgatcatgtgtggacagagtgtttttcaaacttgtatgggaggtggatgcatctagatccatgtgaaggagtctatgataatcccctattgtatgagaaagggtggaacaagaaactagattatgtaattgctatttcaaaagatggagtacgtgatgtaacaaaacgctacaccagaaagtggcatgaggttctttccaggcgaataattacctcggaagataccgtttcagctatcttgtcatcgataacagggaaatatcgcagtggattgtcaattgatggactcacagccttagaaaatcgtgacaagaaagagtccgaggaacttagtaaagctgcttatcttgaagttgacaccagcatatctttacctggaaggcaaagtggttctgtggagtggagaaaagcaagtcagaaatgcagtacatacatccttagcattaccagtggcaatggatgtggttgatgagatactgagtaattacaagagtaatgcggtttgcacaaaaggtcaccaattcccaagaggcaatagactctgttcaggttctgtccttgcaagtggtgaacaactcccaattggaattgcaacggcggcatttgatggcattcgctcatccaaatgggaagagcctgatggagccaaaggatgttggataatttacaagatgcttgatggccaaacttgcgagttggattcatatgatttgatgtcagctaatgatgttccagagagggatccaatggactgggttcttgaagggagcactgatggaggctccacctggaatacaatagacgcccggagttctgtaattttcgacagtcgtttctataggaaaacatttactgtggacaagagatataaagcaaatgcttttcggtttcggtttctgcgagtgagagaatctaatggcaatccaaggtttcagataggttcaattgacctctacgggaaaagcacatgagctttcttgaaagtgtgttacctcgaatagaaagccttttaaaccttctcgaagctaaactatacgtggctgtgaccatggctattatttgcaaccaacgcagttgcattatttattggaagattgtaaaatgtgaaattcaactatggaaggagtgattatcccttcaattcttgagaagactctttatatgcccccattgccttaagtctctagttgtttcctacaactcaagagtactgcagaataaggaagcacagaggagctatctaagtgttgtgtgatatatagacatgtatatgtcagtttgtaccagtatctaattgtttaattaaaagccttaccaaatgttcatttggtagtgtttttgagagt

SEQ ID NO: 17856 - DNA, 1027 bp, Oryza sativa
  ref <308>: DATABASE ACCESSION NUMBER: AK068276
  ref <309>: DATABASE ENTRY DATE: 2001-12-06
gacacactccaagcaagaactcagcttagctagctagcaatggccagcgccctcgccttcgtcgccgtcctcctcgccgccgccgccgcggcgacctcgccggcggcggtggcggccaccacgctgaccatccagaacctgtgcccgcacccggtgtggccgctcgtcacccccacctccggccaacccatctccgacaacaccgcgcgcctcgaccccaactccctcatctccctcgccttcccgcccacgccgtggtccggccgcgtcgccgcgcgcaccggctgcgacgcggcggcgtcgccgccggccgggtgcgagaccggcgcctcgccgccgtccaccgtggcgcagctgagcgtccacggcggcggcgacgtcgcgacgtacagcgtcagcctcgtggacggcttcaacgtgcccgtggtcgtcagcccgcaggccgtcggcggcggccagtgccccgccctcggctgcgtcgtcgacctcaactgcgactgcccgctggggcagcggttctccgacggcgccgcctgccgcggcccgccggagtacttcaagggccggtgcccgcagacgaggacgacgccgggcgacgtcgagcccgtgccgcagagctgccgctcccccggcgagctcaaggtcatcttctgcccgcccaccatgctcaccgccgccgccgccgccgccgccagcgacatgctcatccgtaccgtcgtcgcctccagctagatcgctcgcttcgccggcgagacgacggcgagaagagaaatcccgtgcctaatgctgacgcatgcatgggcttaataataaattaattaatcaattaagctgtggctttgagcatgttaattactacttaattaatcttaattagcatcgatctgtggctgtggagatgtaattagctcgagctttggcttggagcatacttggtgttcgtctgtgttgtttttcgatgtgctacgccattagcaatggctagcaaaaaataatcaatcagtatgaaatttctcgtgttgtgatg

SEQ ID NO: 17857 - DNA, 2561 bp, Oryza sativa
  ref <308>: DATABASE ACCESSION NUMBER: AK068277
  ref <309>: DATABASE ENTRY DATE: 2001-12-06
ggctttgtggagaaggagaaatgttgatttcttgagagttgagacgaggaagaagagcaagcggataaaccacctgtgctaaaaccctcatcgccgcgccgccgcctccgcctctgctccgccgctcccaaccctgcgcggcgggcggcggtgagccggtctgctcttccctctaccggccgcccacgctgctcctcacggcgctctcgattcctggttcctctccccgtgggcctccatgtctttgaccaccgtttctttctcataccccgccaagccgcttcccaaatggccgtgcacgctgcctaagccgccgccgagggctcgctgccgttttgtggtgcgggcggacgtcaaggtgatctcttccggtgaggcctgccgccgtgggctcgccgccggcatcgacaagctcgccgacgccgtcgcggtcactctaggccccaaaggcaggaatgttgttattgaccaagacgatgttcctaaagtaatcaatgatggtatcacaattgccaaggctatagagctcccaaatgctgttgagcacgcaggtgccatgttacttcaagagatagcatccaagacgaatagttctgttggcgatggaacaacaactgctattattttggcaagagaaattatcaatcttgggttgttggcagtagccactggtgctaacccagttgccctgagaaagggtattgacaaagctgttcatgaacttattgggatcttgaagactaaatgtatccctgtaagtacaaaggaggacataaaaggtaattttgtcacctgggaagcatacatcacgagcacagaaatacggaataataaaccatacccactagactagtaacctttcctttttattttagaaagcatatagtcgatatagcatgaagcatatcatgatttgtctgtgaatgcaccgaaattattctgtggtcagattataaaatgttgtaaatctctaaatttcattttcagctgttgcttcaatatcagctggcaatgatgaatatgttggcgatctcattgctgatgcattggagaagataggtcctgatggaataattaaaattgagtcctcatcttcaatatatacttcagttgaggtgcaagaaggaatgaagatagacaaaggttatatctctccacatttcatcacaaatcaagacaaagcaattgttgaatttgaaaatgctagggtacttttaactgatcagcgggtggatgatgtccaagagatacttcctttgctagagaagaccacacagttgagtgtccctttgttgattattgcggaggatgtttcacatacggtgtattcaactcttgttcttaacaaactgaatggactgctaaatgttgctgttgttaaatgtcctggtttgggagatgaaaagaaggctattctccaagatattgctattatgacaggtgcagatttctttgctagtgaccttggctggtgtcttcaaggtgctacttctgatcagctaggtatggctcagaagatcactataacaagtgatactactactatcattgcacatccttcgatgagaccagaaattgaggccagaattcagcaacttaagaaagatctagaggagacaacaagtgcctatctaaaagaaaggttttcatctcgtatcgctaaactctcaagaggtattgcagttatcaaggttggtgcagctactgaagctgaactcgaggataggaaactgagagcggaggatgcaaaaaatgcaacctttgcagccattagcgaaggcataactcctggaggtggtgtgacgtatgttcaattatcaaagtatattcccagtatcatggatcttgtagatgactctgaagagaagattggtgtaaatatagttgggaaggcacttctcgtccctgctatgacgatagctcgcaatgctggggcagatggtccagctgttgtagagaagcttcttgcgagtgaatggcgagttggatacaatgcaatgactgacaaatttgaagaccttgttgatgctggtgtggtagacccatgcagggttgcaagatgtgtgcttcaaaactctgcctctattgcaggacttattttaatgacgcaagctatgatgttcgacaaaataaagaagaaaaagtccaccattcctcaaattcctggcatcccaccattgcagataaatcaaaatgcttagatttgaactagtaacttactgtcattgaagaaaggtccatgatgcaaggcctttgtttgatcggttagatgagttgaaccaagaattggaagtggagcctctgagcagatcatcagctggagccactgggtacgataacggaggaaaagatctacttctatggttcagatatcagtaacttaaaactaactgtatactagtcagcaaaatgtctccatatccctcttctctcttttcccttggaggtgcaaggagcattttttttccttcacaattttgtaacgtagaagataggattactagtccattgcagatcccaaaatgttgaacgtgctagttttattgtacttttatatctcc

SEQ ID NO: 17858 - DNA, 899 bp, Oryza sativa
  ref <308>: DATABASE ACCESSION NUMBER: AK068278
  ref <309>: DATABASE ENTRY DATE: 2001-12-06
gatcgaatccgaggagatagggagataatggtggggaggaagccgctgcgccggcggcggcacgacgcgccgccctcgccgccgttgttcggggccacgcctcggccgacctcccctcggtcctcctccgcctccgtggccgcggtcgcggaggagctggacggcctgctcctcacggcgccgcggccgtcggcgtcgtcgtcggagccgcggagcttcccctacgtggtgaagcagcggtgctgggagaaggcggagcgggtggccgggcgcgacccggagaggtggcgccgcgacgcgctcggcaacgtcgtcttccgcaagctcgtcggctgccccggatgcctctgccacgactacgaccacatcgtcccctactccaagggtgggaagagcacattggagaactgccaggttttgcaggctactgtaaaccggtctaaagggaacaaaacagagttatccaaatctgagctcatacagaagagtgcctattgtagggtctcaggacgtgatatggatcttcttgaactctctgcatatgggaatgttaggcgagggccagattcaggtggttgcagaatccaatgaagacgatgggtacgtctgaagagtgatgataatcagtttcaaaaggctgcctgcctacctcaaatctgataggaaaaatcccagctgatgtttgtgccaaatatgtatactcccagctttatgggcattcatcatccattttctaaggattgaccatcaggaatgttatgaattttgtcatcttagcatacttaacggatcctgatttaaggcatattttattttgtattacataccatagttccaagtgcggtcagtgtaaacatgtgtcgacgcatttgttttaaatgtgacatcacattcgtgcc

SEQ ID NO: 17859 - DNA, 2668 bp, Oryza sativa
  ref <308>: DATABASE ACCESSION NUMBER: AK068279
  ref <309>: DATABASE ENTRY DATE: 2001-12-06
gctggcctcctcgcctcgccacttcgcccgccgcctgcgcctgcgccgccggcgacctccatcccgtccccgcgcgagcagggtccccggcgacctgctgcttcctccgccggtgagctccggtacctaggcacacaatcctctccagtgtaacaggagatggtggagcatgccactcttgaatcctctaagccgcgcgccttccacccacatccgcagcttagctcgtgtcctactctcatgcctccccaccggcggcgaccgcctccggcgtttgaacccggccatccatgcccgtgccaccgtcgcaggaagactcgacgacctcttcctcaccaacctgctcctgcgtggctactccaatcttggccgcctccgtgacgcccgccacctgttcgatcgaatgccccaccggaaccttgtctcctggggctcggtcatctccatgtacacacagcacggccgcgacgattgtgcaatttccctcttcgtggccttccagaaggcctcttgtgaggtgcccaatgagttcttgcttgccagtgtcctacgtgcgtgtacacaatctaaggctgtttcgcttggcgagcaagtgcatgggattgccgtcaagttggacctggatgctaatgtttatgttgggactgcgcttatcaacttatatgcaaagcttggctgcatggatgaggcaatgttggtgtttcatgcactccctgtaagaaccccagttacttggaacacagttatcacaggatacgctcagattgggtgtgggggagtagccctagagttgtttgacaggatggggattgagggtgtccgtcctgataggtttgtactagcaagtgctgtcagtgcttgctctgcacttggctttctagagggtggtaggcaaatacatggttacgcgtatcgtagtgccacagagacagatacatcagtgatcaatgtgttgattgatctatattgcaagtgctccagactgtcagcagctcggaaactgtttgattgcatggagtaccgtaatcttgtgtcttggacaaccatgatttctggttatatgcagaactcattcaatgctgaagcgataaccatgttctggaatatgactcaggctggctggcagccagatggttttgcttgtacaagtatcttgaactcatgtggctctttggcagcaatatggcaaggaaggcagatacatgcgcatgtcataaaggctgatctggaggctgatgagtatgtcaagaatgctctcatcgacatgtatgctaaatgtgagcatctaactgaagcaagagcagtatttgatgccttggctgaagatgatgcaatttcatacaatgctatgattgaaggatactcaaaaaatcgtgatcttgcagaagcagtgaacatattccaaagaatgagatttttctcactaagaccaagtctattgacctttgtttcactccttggggtgtcatcatctcagttagccattgaattgagcaagcagattcatggccttattataaaatcaggaacttcattggacctttatgctgcgagtgctctaattgatgtgtactcaaagtgttcccttgtgaatgatgccaagactgtattcaatatgttgcactacaaggacatggtcatctggaattcaatgatttttggccatgcacagaatgagcaaggggaagaggccataaaactcttcaaccagcttcttttatcgggtatggcacctaatgagttcacgtttgtcgcactagtaactgtggcaagtacactagcaagcatgttccacggccagcagtttcatgcttggatcatcaaagcaggtgttgacaatgatccgcatgtttcaaatgctcttattgacatgtatgctaagtgtggcttcattaaggaagggaggatgctgtttgaatcaacatgtggggaggatgtcatttgttggaactcaatgattacgacttatgcacagcacggtcatgctgaagaagctcttcaggttttccggctgatgggagaagctgaggtagaacctaactatgtgacctttgtcggtgtgttatcagcatgtgcgcatgcaggttttgtgggtgaaggattaaaccattttaactctatgaaatcaaattatgatattgaaccaggcattgagcattacgcttctgtagtcaatctttttggtcgttctgggaaactgcatgctgccaaggagtttattgaaaggatgccaatcaaaccagctgcagctgtttggagaagtttgctgagcgcttgccatctttttggcaacgctgaaattgggaggtatgccgctgaaatggcactcttggcagatccaacagacagtggcccttatgttttactgtcaaatatttatgcctctaaaggactctgggctgatgtgcacaacttaagacagcagatggatagttctggcacagtgaaggaaacaggatgtagctggattgaagtgacaaaggaagttcacacgttcattgtgagagggagagaacacccagaggcagaactgatatattcagtactggatgagctgacgagtctaattaaaaatttgggttatgttcctgatacttctgaccatactctgttgtgtgagactggttaatctagtaatctacttgttaaggcttctacacagatttcc

SEQ ID NO: 17860 - DNA, 1842 bp, Oryza sativa
  ref <308>: DATABASE ACCESSION NUMBER: AK068280
  ref <309>: DATABASE ENTRY DATE: 2001-12-06
gatcatccaaagatacaacgaccgtgtcttctcgagctctctccctgacagaagtagctagctaggtatggctggaggtggatcgattgccaacgatggtgaagcagccgccggcggcaacggcggcggtgacgaggtgacatttacagttgttatgagctgcctcacggcgggcgccgtcgggctcttacttgggtacgacatcggtgttacaggtgggttgacgcagatggaatcgttcctgcaggcgttcttcccggaggtcctgcggaagatgtccagcgcgaagcaggacgcgtactgcatcttcgacagccaggtgctcaacgccttcgtctcctccttctacctctccaccatggtcgccagccttgtcgccggccacctaaccaagacgctggggaggaggaactcgctgctgatcgccggcgtgctcttcttcgccggcaccctcctcaacctggccgccgtgaacatcagcatgctcatcatcggccgcatcctcctcggcgtcgccgtcggcttcagcagcttggctgcgccggtgtacctggcggagatatcgccggcgcggtggcgcggcgcgttcacgtcctccataggcctcttcgccaactttggtttcttgatggccgacatgatcaactaccgcgccactaccatggcgagatggggttggcgcctctccctcggcgccggcatcgtcccggccctcatcgtcatcgtgggcgccgcgtccatcccggacacgcccaacagccttgcgctgcgcgggaggctcgacgaggcccgagactcgctgcggcgcatccgcggggccggtgtggccgccgccgacgtcgacgccgagctcaaggacatcgtccgcgccgccgaggaggacaggaggtacgagtcgggcgctctgcggcggctcctccggcgcgagtaccggccgcacctggtgatggccgtgctcatcacggtgttctacgagatgacgggcggggtcgtggtcagcatcttcacgccgctcctcttctacaccgtcgggttcacgagccagaaggccatcctcgggtccatcatcaccgacgtcgtcagcatctcctccgtcgccgtcgcggcggtcgtggtggaccgccgcggccggcgcaccctgttcatggtgggcggcgccgtgctgatcctgtgccaggtggccatggcgtggatcttcggcgcggagctgggcaccgacggcgggagggcgatgccgcgggggtacgccgtcgcgatggtggcggtcgtgtgcatgtacgcggcggggctatgcgtgtcatgggtcccgctctcgtcggtggtcaccagcgagatcttcccgctggaggtgaggtcggcggcgctggggctgggcggcgccatctcgtcggcgctcacgttcatgcagtcgcagtcgttcttggagatgctgtgcagcttcaagtacggcgcgttcgcctactacgccggatggttggtgatgatgacggcgttcgtggcggcgttcctgccggagacgaagggggtgccgatcgagtccatgggcgcggtgtgggcgcagcattggtactggaagcgctttgtcaagctggcaccggccaagcaggccgatgggccagaatgatgcgttgggaatcgggtttcgcggcacgtgtccatgcggtggtgtacctaggatttcgttgagcccggggccgagcgtaatggttgttcgaaaccataagcgctactaggtgtaagatatgcttgtttaacgttaactagctggtggcccgcgcaattgcgtggctaacacctaaacaaaacatatattttttactatgattttacttaaaatttatt

SEQ ID NO: 17861 - DNA, 1512 bp, Oryza sativa
  ref <308>: DATABASE ACCESSION NUMBER: AK068281
  ref <309>: DATABASE ENTRY DATE: 2001-12-06
gtcgttctcccctcttctgctccgtacgtacgtgttgggtgcgcgcgcgttgtactggaggagctgaggaagcgattgatcgatggatcatcggtggtggccgcggcggcggccggagccggcggccatcgacatcacgtgggtctcgtgcaggggcgtcaggtcgtccgtccccttccacacgccctgcctctacgcctccatctacctgcaccacccgtcgccgtcgccttcgtcgtgcgggcgccgccgcccgcaccgcgtcaagaccgccacggaccgcgccggcggcgggaacccggagtgggacgcgccgctgcggctctacctcccctcctcctcctcgtcgtcgccggcgacgtcgagcgacaacaaggacgaggttctcttgcggttcgagctcaagtcggaggtggccgtgctcggggacgtgctgtccgcgaccgccgccgtgccggtgtccgagctcgtggcggacggcgcgacgcggcgcgtgtcgtaccagctcgccgggcccgacgggaagcaccccaacggcgtcatctccttctcctacgccgtccacgccgccgccgccgccgacacgtcgtcgtcatcacccagcagcgacgccgacgacgaccggaggagcaccaccaccaccaccaccagcggcagcgagtgcgacgaatactccatcactccacctcgctcagccgcatccagagcgatcactctccctccgccgccgccgtcgtcgacgatgtacccggcaatagactggccgccgactgagcaactcatccccatgctactctacccgccggcgaagcctcatactacggccattgtcaagggctcgacgtgctaccctcctccgccaccgccgtcgtcgactcctccggtggagcccgtcgcggtattcccgccgccgccgtcgccggcgtgcggcgtgtactacccgccaccgacagtgagggagccggtcatcaacagaagcgggatgtacccgaaggtagaccttgatattccggtgagttgctacccgccgccgccgacggcggcgacgatgtacggcgggggatgcgggtacgcggcggcgccggagtgggacggccggtggttgcacggttgaatatatagcacgtgcgtcatcgtcgttgctgcgcgcgggttcgatcgtttcttcatttgtgccgcgcgccctctgcctcgtttttttaaattatttttgtgttttaaatttgtttgtttgcttaaaggtgtgtgttcacgctaaaattagaagtttgattgaaattgaaacaatgtgacggaaaagttggaagtttgtgtgtgtaggaaagtttaatgtgatgaaaaagttaaaagtttgaagaaaaaattgggaactaaaccagacctaagtttaagttttgggcataggcggagaatgtgggcggcctgtagttcttctttgctgcttcaatatacccttcctactgtattttgtaattttttgagaaaatatactgtgctactcgttggagttct

SEQ ID NO: 17862 - DNA, 750 bp, Oryza sativa
  ref <308>: DATABASE ACCESSION NUMBER: AK068282
  ref <309>: DATABASE ENTRY DATE: 2001-12-06
gagacgcggcgagatgcggggagtcgggggcccgctgctcaccatcggcgacctcctcagcgacctcgccgtcgacggcggcgccgacctcgccggcggggaggtgtccgtcccgtcgtcgccgtcgtcggcggggcagcaggcggaggaggccgacccatccgagctgaaccggctattcggggagcactatgacaatttgatgaaagcgctgcaagaaaatgacccttcatggccttcattgatgctgaagctgtgcacggctctgaagaccgcagataagctggtgagctgtgcgagtattgatgctgagcagctgctgcagaaggtagagttgctggagcgcctcttagtgaggggcgatcgtgcggtcacggcaatagttgaggaactccagcgctcacgcccctccgaggatagtcactcatcgaaatcaaaaccaagtggcaaatagtgccgtgatcgtgttaactcttgtatttgatcacatagatcagggcaactattgtcagtgttcatgagactgaaggagctgtttgttggccctttcatgaatttcaacagtatctgtgtagctgcttatattctagcatttcctggaaaaatctgtatttcctgcaatagagtgtgaaatttgcttattgcttgttaattctcaaacttggttcctgctagtatgcattcaggtctggagtctggaccctgaattttgagttttgggtccaaaattacaaggaaaatgaaatcttg

SEQ ID NO: 17863 - DNA, 914 bp, Oryza sativa
  ref <308>: DATABASE ACCESSION NUMBER: AK068283
  ref <309>: DATABASE ENTRY DATE: 2001-12-06
gatccctctcccatcgccgcggcggcctatccatctctctcccccgcacacgctctccctcccatggcgctctccctcaccaccgccttctcccacctctccctcccctccacctccaagttccacccgctccccctcctccacctccgcttcccctcctcctcctcctcccgccgcgccgcgcgcctcgcgctcgccgcctccgccgccgaggccgccgagcctgtcgaggtggaggaggcgcccgccgaggacggggcggatgaggtggtggccgtggaggacgagctgtccggaccggcgctgcgaaagtacgtgaagcagcggcttcccgggggcttcgcggcgcagcggatcaccgccacgggccgccgcaagacggccatcgcccgcgtcgtgctccaggagggcaccggaagggtgttcatcaacttccgcgatgccaaggagtatttgcaaggaaatccaatgtggatggagtactgcaaggtacccctggtgaccctagggttcgagaacagctacgacgtcttcgtcaaagttcacgggggtggtctctcgggccaagcccaggccatttgcctcggcgtcgcccgtgcactggtgaagatcagcaccgcaaacaaagttactctgaggggagaaggtttgctgacaagagacacccgtatagttgaaaggaagaaggctggtcttaagaaggcacgcaagcgcccgcagttctcaaagcgttagagtatgcacaaccttgttgttagactcatttaaaagttttacattccacagtttgtattggcccttctctgttattttctgtgcaaattatgtgctcctcaccacagacttgtaatcttcgttctctgtaagcaattttattgaggtcacaaaaggcaattatcttgaaatcattcctg

SEQ ID NO: 17864 - DNA, 3081 bp, Oryza sativa
  ref <308>: DATABASE ACCESSION NUMBER: AK068284
  ref <309>: DATABASE ENTRY DATE: 2001-12-06
gacacccggctagctgttcgaaaatggcgcggccgtggtgccccgacgacgcttacgcctgcctctccctcctcctcctgctcctccttcctgcagccatggccacgtcgtactcctctctctgcagcttccccgccgaggccgccgacctcgtcgtcaccgccggagaacaccagtccatcgcggaccggctcaatcttcccttgccctccgacggttacttctccggcggcgacaagctcctcttcgcctccgacgaccaccgcctcccacgttccttctccttcttcactcgccgcgcggcccgcaccaccgaccccgccatcacccacctcgtcgccacggtcaccctctccggctaccgcttcttcggcgggcgctcgtggcgcaccaacgttagcgcccactccgtgtcgttcgacctcgaaggttactactccaacgactctgcctcggcggcgctctgcatggtcgggtcaggctcccgcgcaagagacgacggcttgggtgtcgtcatcatcccggacgtcgccctccgcctccggctgccgcgccccgccaccctcacgcggcccttcgtcaccggccgcctcgagggcccggacttcggcgccgtcaccatcgttgcgtacgccgagggtgactacaagtacggtgaggccacctcctgcccgacgccgcccggcgccgtgcggtccgagagcaaggtgttcgacggaaacttcacgtgcgaccgtctcggggcgctgctccgaggctcctacaccatggagtacgcggagggacgcgcgccgagcggcttccctctgcgccaacgccttcgcagcatgcacatcagcgagatttactgcggcgagaacggcgccgtgcgcgcgtacatggtgttcgacttcgacgacgcctcatcggacgccattcttctaggcatccacgaagcgccgtggaggcgtggcttccaggccgacggggacgaggcgctcgtcgccgacgggttctggaaaccgtcccagggacggctctgcctcagggcgtgccgcaccgtgcgctcgacggtgcgcgagagcgactgcggcatccggatccacttctggttcccggccgtgtggtcgatccagcaacggagcttcgtagccgggatgatccggaacacgaggagcgacgacgacggcgacacgaacaaaatgtccggcgcgatatcggtgtcaagaactggcttcaggggcgatctctccgacatcaagtaccattacaccagagtggaggacgccaagaactactaccactccaacccagagctgagcaaggagaggaacggcaggtttccggggaactactcctaccgggacttcgcgttcagtttgtacatcacgacacacggcggatacgggtacgcctcgccggtcacgctcggttccgccatggttgacggtggcacgctgacggccgacgacgcgttctctcgccacgctgtggcagagatgatcaagcagaggctcctgagtgtcagctacgaattcgatatccacctctatcgtcgcgtgaattcatccagggcgtggaatgtgtcgcgtgtgcctgatcggtggcgcgtctcggcggaaggcgtttatgataccaagtcaggtaccctgtgcatggtaggttgccgagtgatcaacagttcgtcggactgtcagatcctagtgaccgtgcaactccctgcgctgggcggcgaggacggcactgggtcaatcagcagcctgaggaagaagagtgacaccctcttcctcgagacgcttggttttgctgcgtatggtgcgcagcccgccatagaggcggcccaggcgatctcgagggtggacacggagcgcatcatgctggtgacctccatgacgctgtcctgcgtcttcctcgtcctgcagctgcgccacgccaggaagaaccccgacgcgctcccggccacgtcgatcaccatgctcgccgtcctggccctgggttacatgatccctctcgtggtcaactacgaggccatgttcgtggacgacggcggcagcagaaacaggcacttcatcgagctggcgaggggcggccgccggtggctcgagctgaacgagttcgtgctgaggctcagcaccatggtggcgttcgtgctgcagctgcgcctcctgcttctcgcgttgtccgcgagatcaacggccggagcgagcggcggcggggacgaccggtgggcagccgagcggagcacgctctggatatgcctgcccctatacatcgccggagccatcctgatctggatcccccacatcggtgacgggcacgatcatcagccgttggccagatgaagtccgccatccacgtgccgccgccgccgccgccgccgctgtcggacgacctcctctcctacgccggcctgatactggacgggttcctgctgccccagatcgtgtccaacgcgttctcggcctccagggtgaacgccatctcgccgtggttctacgtgggcggcaccgcgatccgcgcggcgcctcacgcgtacgacgggctcagggctcgggggtacgtgcagaggtggatcccgtcctacatcgacgtctacgcggggcctcgtgacgggctcttcagcgtcgcgtgggacgtcgtgataccgtgcggggcggcggcgctggccgtgctgctcttctttcagcagcggctcggaggtgatttcctgtgttgtgtgaagagaaggaagccggggggatcatacgagatagtctcgacgtcaacactttaactgttggccggcaatccgtggcattcgtagacattagtgcggtttgaataaacaatacagggggcgcaattagggcccgggcgccggacgtcctatatttacacggaattgcaactcatgtttaaaaatgcgtcaaatttagtgtgggacattaaaaaaataatctttgctagaatgatatcgaaaaaacgtggttttgctagtacactattgaatgattttcggcggttttgggaggaaattttcacgaaatgattatttccgcgcgctgaagtcctggaatggatacggcaaaaatttaaaaatacactgatcattcatttttttcc

SEQ ID NO: 17865 - DNA, 1510 bp, Oryza sativa
  ref <308>: DATABASE ACCESSION NUMBER: AK099048
  ref <309>: DATABASE ENTRY DATE: 2002-08-28
ggcaagcagctagctagcactactgcccagcaacaagctagagagatttgccaaaagaaaaaatggcgatggctaggcgcggcaatggcggctaccagtacggcgcctacagctacggctacggctacagcaagccgcaggtgaactaccacagccagagctccgagagcgtcaccaccgtcgtgacgaagatggacgagatgagcgtccacgagaacgccgtgcagaagatgtcgtcgtcgttccgggaggagaaggtgtacgagcagcagggcggcgccggcggcgacgtgcaggtgtgccgcaatggcggcgctgctgcaggcgccgtgcagaagcacacctacgaggagaagaaggaggaggaggtgtacgaggagagcaaccatggcggaggcggcggcggctgcggcggctacgctcgccagcacggcgccggcggtgggcagaagcacgccacgtaccagcacgaggtgttgaaagggtacgagagcgccggcggtgggtacgccgccgctcgccacaacggcgccggcgccggcggcgtgaagaagcagtactcctaccgcgaggaagaggagtacgacgccggtgggtacgctcgccacaacggcggcggcgtgcagaagcagtactcctcctaccgccgcgacgaagaggagtgcgacgccgcagccggaggagggtacggccgccaccacggcgccggcggcggcgccgtgaagcagcacgccacctacaagcagcaccaggccatcgagggtgtcaacggctgcggcgccggcgggtacaactacaaccgccaccaagccgtcgccgtggctggcggcgggcagcaccactacggtggcgccactgccgccgcgtatggcaacgcctccaacaagcagcacttcactgccgccgccgccggccaccacagcagcggcggccatacccaataccaccaccaatcctacgaatgcgaggaggaagattccgacgaggacgactgcgaggacgacgacgacgacgagagcgacgacgacgacgacgacggccactgcccacctagccgccaaggcagcgtccacagctaccaccaggcggcgtaccagcacgaggagaagcagcacgccggcggccgcaaccactaccatgcatacgagcgccacgaggagcacggcggcggcgcgcaacgctaccagaagtacgagagctccacccaggtgggctacgccggcggcggcggcggcaacggcggatgcgtgcgtggcaatgccaagccatgtttccgaatcatggcctaatcccaaactaattaaccgcgcgtaagtaaaaaaaaaatatcaattgcgttgctgatgcgcttaaaataaactgttcgacgcttggcttaagaagttactattactactaagatctctaatgtatcagaaaataaattgtatgtcttattatagatgctctgcatccactatgtggtaaatgatgataatgtataaggttttataaaggtttgatgattact

SEQ ID NO: 17866 - DNA, 1760 bp, Oryza sativa
  ref <308>: DATABASE ACCESSION NUMBER: AK099049
  ref <309>: DATABASE ENTRY DATE: 2002-08-28
ggagttggtcaattaattctcattgaacagatatatcagcagccatggcagcgacctcagactcgacgccggctgctgctgctgctgctgctgcttcttcttcttcttctccacttcacattgtggtgttcccatggctggccttcggccacatgatccccttcctcgagctctccaagcggctggccagccgcggccacgccgtcaccttcgtcaccacgccgaggaacgccgcgaggctgggcgcgaccccgccggcgccgctgtcgtcgtcctcccgcctccgcgtcgtgccgctcgacctcccggccgtcgacggcctgccggagggcgccgagtcgacggccgacgtcccgccggagaaggtcgggctcctcaagaaggcgttcgacggcctcgccgcgccctttgcccgatttgttgccgaggcctgcgccgccggcgatggggaagccgtcaccgccgccgccgggttcttgaggaagcccgactggatcatacccgacttcgcgcacagctggatatggccgattgccgaggagcacaagatcccatatgccacgtttttgatcgttccggcggccttggtggccatcctcggcccaagaagagagaatctgactcatccacgcaccacggcagaggactacatggtccagccaccatggatccccttcccctccaacatcgcctaccggcggcgccatgaggcggagtggatggtagccgccttcagagccaatgcctccggcgtgtctgatatggatcgcttctgggagtcagagcaacatcccaattgccgtctcatcatctatcgtacttgtcccgagatagagccacggttgttcccgctcctcaccgagctcttcgctaagccggctatccctgctggtctcctgatgttccctgatactatcaacaacgacgatgatgcttctgaacaatccttcgttccaccaacaatagagtggctcgacaagcagtctgagaaatctgtcatctatgtcgctctcgggagcgaggcgccattgacagaagaccatgtgcgtgagctcgctctcgggcttgagcttgccaatgtgcgcttcctctgggcgcttcgcccgccgagaggcgacggaggcagcaacgatggtggcgcggcggagatcctcccggatgggttcgagtcacgcgtcgccgcgcgaggcatcgtgtgcacgcagtgggtgccgcagctgcgcgtgctggcgcaccgtgcggttggcgggttcctgacgcactgtggctggggctccaccatcgagagcttccagttcggtcacccactcgtgatgcttcctttcattgttgaccagggcctaatcgcggaggcgatggcagcgagggggatcggtgtggaggttgcaaggaatgacgatgggttattccacagggacgatgttgcggcggccgtgcggcgggtgatggtggaagaggaggggaaggtattggcacgcaaggccaaggagttgagcgacattgttggagatagggagcagcaggagatgtacctggatgagcttgttggttacttgcagctctacaaatgaccaatcgctcatcatgcatgttctcgagtctgacacttcatcatgaatgattcctttcttgtgccagagtggtggaatgtttttattttttacattttaaattgcaacattactcaatcacgtgtcttcagctttactcccttgtgtaaaaagaaaagtggctataaatccaaacacatgttatgtcct

SEQ ID NO: 17867 - DNA, 1824 bp, Oryza sativa
  ref <308>: DATABASE ACCESSION NUMBER: AK068285
  ref <309>: DATABASE ENTRY DATE: 2001-12-06
gctctctcctcgtcgatcagctcgcttcccccccaaatctcgccggattccgccgccgctgccgcgcccgcttcctcccgaggggggtggtttggttttgatttcaggtgcagctctggccggggcacgcgcgcgcctccccggcggggggccgccgcagtcggtggactacggcggcggccaggcatccgacagcagcggaactgctgatgatcttcctccaccatatccaagcaataggggtattagaggcagtggacgtgtcagtggtaatggaagagctattgttcctgctggttcatacactagagcccatactgatatggcaacacaaatccatcatcttgaacaagaagcatattgctcggttcttcgtgcatttaaagcccagtctgacgccattacatgggagaaagaaggtctcataacagaacttcggaaagagctaagggtatctgatgtagaccacagggaactactaaatcgggtcaacagtgatgatattatccgtagcataagggaatggagatcagcaggagggcctcaagcaatgttacccaataatgctcagcctatgcatgatctagcgcctagccctaccacctcgggccgtaagaggcaaaagacatcgcaatcatttcctgccctgcctgcaccgcctcctgttatgcattcacagcagttggctttacaaggaccaccatcatcttcaacagctaaaaagggagcttcatcaggagctaaaggcaaaaagaccaaaccaggtcagaaggtgccagggggcccttcagtcaaggccatgacatcttcagctggtcctagcggaaggggaccacatatgaatagaaactttcctgttggccttgtttcttttgaaccttccgaagcactgcatattaatccattaattaatcgtaaagtcatgagccggtggcctgaagataacagtttttacgaagcaactattactgattataatccagaaacggatctgtatgcattggcttatgacataaatacagctaatgaatcatgggagtgggttgatcttaaacagatgggacctgaagatataagatggcaaggtgatgaccctgggatatatcagggagtccgaggtgctccaggtagtggaggcaagaagtcatctagccgaggtggtccaacaccaggtacaggaagggggaggggattaccaaagcatgtatcccggaaggattttccaccctcacaaaatggagttggcaagagaagttctgatgacattgatatacttcataccgagagcctcataaaagaggtggagagggtttttagtattaataatccagatcccctggaggtagagaaggcaaagaaagtgctgaaggagcaagagcaatcgttgattgatgccatcgcaaggcttgctgaggcatctgatggtgaaagtgatgagcacaatcgtgtgcgaaggaatgcaccatatgctgggagccagcatcaagcaaactatgcagacgctatggctgttgatggtggccacatgcttggaggcgctgatgccgtgtaaaacaattgctggaacatgaagacagaattccatcagaagcctgcatgttgtaaaatcttaccactgaaatttattctgaaattagctctaggtctagtatctttattttggagaatggaagtgctgttttgtagaaaaacttagcatcctgaccatgtaaaatatccagaagtggagctaactttcgtgatgctgcttttttatgttgctaagttaatggataatctcatgttttgcatgcgtgttggtcaacaaaaaagaaatttgctcct

SEQ ID NO: 17868 - DNA, 1478 bp, Oryza sativa
  ref <308>: DATABASE ACCESSION NUMBER: AK068286
  ref <309>: DATABASE ENTRY DATE: 2001-12-06
gacgcccaccagcacggcggcagcactcaaacgttcattcaccgcacaacaccacactcgcggactcgcccatatggccaccttctccggcaccgaccgcctccgcgacctccacgccttcgacgacaccaaggccggcgtcaagggcctcgtcgacgccggcgtcaccaccgtcccctacttcttccgccaccaccccgacccactccccgtcgccgcgccgtcggaggccgccgcggccatccctctcatcgacctcgccaaggccgacgtcgaccgtggccacgtcgtctcccaggtgaggtccgccgccgagtcggccgggcttttccaggtggtgaaccacggcgtcgccggggagctcatggacgcgatgctcgcggcggcgcggcggttcaacgagcagcccgcggaggcgaaggcgccctactacaccagggacctcggcagcaaggtccggttcttctgcaacttcgacctgttccagtcgccggcggcgcagtggcgcgacacgctgtacgtggagatggtgcccgacgcgccctcgccggaggagatcccgccgccgctcaggggcgtcgcggaggagttcgccgcggcggtgtggcggctcggcgagcgggtgaccgagctgctctcggaggcgctgggccttccccccgggtacctcgccgagcacgccgggtgcatggacggcatgagcatggtggcgcagtactacccgccgtgcccggagccggagaagacgatgggcacgacgcggcactccgacccgagcttcctcaccgtgctgctgcaggacgagtccggcgggctccaggcggtgctcccgcggcccccggaggagcggtgggtggacgtgcccccggtggccggcgcgctggtggtgaacgtcggcgacctcctccagctggtgtcgaacggccggctccggagcatggagcaccgggtgctgcccaccgccgccagcgcggcgcgggcccgcgtggcggtggcgtgcttcttccggctcgagtactcggcgtcgttgacgaggccgaggtcgtacggcccgatcgtggattccggcgaaggcggcgcgcggcgggcggcggcggtgtacaggagcacgacgccgagggatttcctggcgtacttcaacggcaaggggctcgacgggcggtcggcgctggagcatttcaggattccggaggcggctgcggcttcttccgccgtcgacgtcgtctcctcctccaccaccgccgccgcatccattccacggtagcaatcgtgtcggtgcgtgttgaggttgttgcttgctggtagctagtgtgtgttatccggaagggtcgtagcagtgtacgcgtggcgatttgttggttgccagtcaggttaggccaggtgttacgtcactgattaatttgtatgatcgtactatggatggcatgtaaaacttggtgatttttgtactgtaataaatgtcgatcttgacgtggttt

SEQ ID NO: 17869 - DNA, 815 bp, Oryza sativa
  ref <308>: DATABASE ACCESSION NUMBER: AK068287
  ref <309>: DATABASE ENTRY DATE: 2001-12-06
gagcggcacgccttctctctctcccagcgacggcagcgcgccatccactccctccctcccagatccgactggatgaggggagggcagcggcgtggaggcggcgctcccctccccttcctttctccccgctcctggatcaggctgtaggaggggagcgatggtggaggccgccaccgcaggcgacggaggtggcactcctccctccctagctccaagatccggctggaggagggagcaatagtggcggaggcggcgctccctcccctccctccctccctccctcccagatctggccggagggggagggcggcatcggccccagcgacggcggcgcgctttctccactctccaactcctcggcgagtagcaggtgcgacggtctcaccatggacgagcagcgggagcggcggcgtcctcgtcctccggcgagtagcgggagcggtagcgtcctcgtcctcagctagcaataggagtgatgccatccagtggcgtcggagcagcgggagcggtggagtcttcgtcctcgacgagcaaggagcagcgagagcggcgatggcctcggcctcgggcccggcggcagtggcggcgtccccgacgagcagtggcctcgacctctagcgagctcagcattctgttagtatttgcggtgattgatttcattgatgtagacatcgttctttgattttgattttgttttttttctcgtcaacttttttttttctggaaccgagtcggacccaacgaactatgcatacggtttgcacaaatcgctcaggacatggaaatatatgactaacaaaaatttatttggaagc

SEQ ID NO: 17870 - DNA, 1175 bp, Oryza sativa
  ref <308>: DATABASE ACCESSION NUMBER: AK099050
  ref <309>: DATABASE ENTRY DATE: 2002-08-28
gacccacatccgccgccgccgccgcagaatcggaagcaatccgccgcgagtcgcgaccatttcttgcgagtagtagtagaggggagagtgagtgaggggcgtgctgcaatggcgactgaggaggttgtccctgaggttccggtgaccgaggtggaggctgccgcggcggaggaggccgtcgaggagacgacggcggcggaggagaaggccgccaagccggcgaaggagaagaagaaggccggcaggccgccgaaggagaagaaggaggccaagccggcgaaggagaagaaggtgaaggaggccaaggccaagaagccccgcgtcgccgccgcccacccgccgtacgccgagatgatcatggaggcgatcgtggcgctgaaggagaggactggatcgagctcccaggccatcggcaagcacatccatgccaaccatggcgccaacctgccgcccaacttccgcaagctcctctccggcaacctcaagaagctcaccgccgccggcaagctggccaaggtcaagaactccttcaagctctcctccacccgccctgccgctccggccgccgccgacgccaagcccaaggccgcccccgccacgaagcccaaggtcaagaccaccaaggccgcgaagccggctgccaaggcgaaggctcctgctaccaccaaggccgcgaagccggcgaccaagaccaagatcaaggtcgccgccgcgccggcggcgaagcccaaggcgtctcccaaggcgaaggccaagaccgccacctcgccggtgaagccccgcggccgccctgccaagtccgccaagacctctgccaaggactcgcctgccaagaaggcggcgccggtggctgccaagaagaaggcggcggcgaccaagaagaaggcgtcggtggctgcggcgccggctgctcgcaagggtgcggcgaggaagagcatgaagtagaggtcgccggcgatgatgccacctggattggattgcccaccttttgatctccacaggcgacagcgccattagcatcatcatcagcaagtagtagcagaaattgtgttctgtaaatgcttgttcgtcttagttcgtttcacctccctctaggcggtatcatcatcttctcgcctgtaatgataggatcccatcatcctcaaaaaccataatacaaatatctatttcgtctt

SEQ ID NO: 17871 - DNA, 1634 bp, Oryza sativa
  ref <308>: DATABASE ACCESSION NUMBER: AK068288
  ref <309>: DATABASE ENTRY DATE: 2001-12-06
ggcgtgtctacaaccgcagccttctccgccgcctgcgcctccgccgccgacttctcgccggcggtttccgcagccgcgactgcgggcgcgagcgcgagcgcgagggggggaatcggccatgtcgaggtggcgcgcagccgccgcgcgcatctcggccgcggcggaatcgcggctgctctccagggccttctcgagggtggggacgcccgctccccagcccccgtgcagaggcttctccaaggcctccgccgccgccgccgcgtcgtcgcgcggccctgccgcagccgcagccaccaccaccgccactgccgctggggcgaggcccgaggtcagactgaattctatgttcctgtcaaagccctgctcgctggcattgcctcctgactcccctcttcgagtggaagatccaaagtttgagggcattaagcatttgatgctcacgcttttgctgttctacagtaagcaaagcaagtccattagaggagcaaatgttgtttatcatcgcatcacttctcaagttgacaagtctgatatctttgatgtttttcagttggagaaaacatttaaaacaacattttcattacttgttctccatatgtggcttattctacgtcgcttgaaagaagaagggaaggatggtgttaaatttggacagtacatctatgaaatttacaatcatgatgtggagcttagagtttcgaaagctggggttaacttgctcttgacaaaatggatgaaagaacttgagaagatattctatgggaacattgtgaaatatgactctgcaataagcccagaagcacgtcaggatgatcttgtaaatgtcatctggaggaatgtgtatgccgacgaaggttcagaggctatggatgcagcagctgtccctgctatccaggcattggcacggtacactcggagggaggcaacttgcctatcactgacagataaagaagctatgttctctggcaacttcaaatttacagccctgctgccgaattctcccagcccagcgaagcctgtgcggtgaaccatgacatggtaggttggtatcccatgcgaagattggtaaacaacatggacaaaaaatattctatcagcgtcataaaataacaggaatttccctacacttatttatcgtggaatccttgcgaatctgccccttttttatgactatatttcatcctagataggaatttgttttttctttgccttgagctcacggtagggacgttggttggatgttttcaatcttatcatttttgtcatggctgatttggacatgagcatcatttgtacgtgggactgggtaggcaagtatccgtacagatctgtctacatctctagtagggtttgatgatgtgggagaagaatgtagtcaaagcttctcgaatcagtttagtacattcccatcttatgaattggtacgccaattgctttattgactgtttatatcgtttaaggcagcaacagctttgacagggccatctagtagcaaggtatttggtacttcctccatcctagtaaaatatagcaatctatagtatttgattagacagctagtattagtacttgttgtatctaattcagaatgggacacttcctattacaatgaatctggacatgttggttatttc

SEQ ID NO: 17872 - DNA, 2163 bp, Oryza sativa
  ref <308>: DATABASE ACCESSION NUMBER: AK068289
  ref <309>: DATABASE ENTRY DATE: 2001-12-06
gagagcaccaatcaatccttcctcccagccaagatctttcttcctcctcctcgtcttcaggactcaattcgtcttctggtacgcccgaattctcctcatcgtagaaatcatctgtgttgggtgttgctgtgcgttttattattaattggccgaaagaaattggggatacagactgatgtggggaattgatctgagaaataatccatccattcattcatcagggatcatatatggcctggtgttcgtttgatcttgtaagcttgtttgttccggattttagtgctaccagagatccggaaaacatcgtagtttcggcttgtttcctggtgaaataatctggtagtatatgaatcaagttggcaaaacttctctaaaaagaaaatcaagctggcaaccattctctcgtgtgttgagatatgattagttattagttgtcacgcgttgaatgccttgtttctgttcaagtatttgcacgttagtcatgttctagagtcagaattttgcaacgaggattggtatggtaggtacaactacttttatatttcccagtaggatatggctaagatcggagctgtctttcggtactatatagatgcctccacgcctgttcattgcacaacatcaatggttggttttctgatgagagtggatcgtttcatgtattggaaatatcaaagatttatttcatgccatctcattccaatttcaagaattcagtttgctcataccatgatcatcctactttgtttcagatagcttagcttgattggggtgggtgacaatgggaggtggcaaggacaagcatgacgagagcgacaaggggctcttctctaacatgatgcacggcgttgccggcggccatgggtatcctcctcaccagggataccctcctcagggctacccgccgccgccgggagcgtacccgcctcctccgggggcttatccccctcctcctggggcttaccctccaccacctggggcataccctccacagcatgggtaccctcagcctggtggctaccctccacctggtggttacccccaacatggtggctaccctcctgcgggctaccccggatcatctgggcaccagggtatgtaattcttgttcacttatgtgctattaaggttctgttcttgtcatttttgtacaattcttgttgaacttttaagcaaattcagtattgagttgaattgtggtaattccctcctgttggaccatgcatgatatatgatgctgatcatgctgtatcacctatgccgtgatatgtgaagtttttatctttattgcaatcatttgcgctcatgatgccaactccattcttaccacttcgtcttagttgaatgcatgatgtttcttctccaattattagatgccattatgtgtgtttttaatctacatcgtactgcaattcctgctgaactcgagtaaacacctctgcattttgcacatattctgaattttaggattgatttggattactctagttcccttctgttgtaccataccacatacaactcttgatgcttcatctacactttagatgccatactatgcgtattttttgttaccatcattgaactgtttcagcaaaatggtgtgactctgttctcagcgttctatccttagagagtttctaatgtaatgttgcaggcggccatgggagtagcggtggaggacacatgggagcaatgctggctggaggcgccgctgcggctgctgcagcctatggggcacacaagatctcttctcatggccatggtggacacatgggctatggaggccatggaggctttggtggttacggccatggctacggcggtcaccacggcggcaagttcaagcatggcaagcacggccaccatggcaagttcaagcatggcaagcatgggcacggcatgttcggtggtggcaagttcaagaagtggaagtaatgcgcatgatctgatcatgctggaactctgtttaggctttaactgaagtgcttgcgcttggctggttaaaagcctaaaaaaagcctctcgaatgtatctaagcaggatggagctttgctcagttgctgctcccatccttcctctatgatttggtactctagtatgtggctcagtgacaatatggcttgctaataattaattaaataccttctgacgcttatgcacatc

SEQ ID NO: 17873 - DNA, 1454 bp, Oryza sativa
  ref <308>: DATABASE ACCESSION NUMBER: AK068290
  ref <309>: DATABASE ENTRY DATE: 2001-12-06
ggggcactcgcttctccactagggtttctcgccgccgccgccgccgctcgccgtcgccgtcgccgccggatcagagatgagcgcatccaggccggatcaccggcggcaccacccgccgtttctccgggacctctcgtcgccgatctcctcggccgtgcggctgcccccggcctccctccgccgcgagacgcaaggttccaccaccccgccgccgccgccgccgccgctgctgttcctcgacgacctctcccaccactccccctcgccgaggcccgccaccccacctcaggcggcggccatgagcccctcgcctccccctccccaccgcggcggcctcttctcctccaccccgctgcgctccaatgggtccccctccccggccgcgtggtggtcctcctcgagggaggagatggccagggagggctcgccggtcgatggtgtcgtgcagccgcagcagcagccgtctccgacgacggcgtctgggcagcagtcgcagcagcagaaggtgacgctcatcacgctgccgccacccagggaagttgcgcggccggagatgccgaaggattcgacaccttccgctggccgtgtcgacgaggaggagtgggtcaccgtttttggttttttacctggcgataccaacttggtactgagagaatttgagaagtgtggtatagtcttgagacatgtccctggtccaagggatgcgaactggatgcatatcctgtatcagagccggcatgatgcacaaaaagctctcaccaagcacggtcaacagttaaacagtgttcttatcatcggtgtgaagcaagtggacccatggcagcggcagtacctgaatgagaagacaaatgagaactttcaagttggtgcaacagatccatttccatcacagcatgtagcaccaagttcatttacaactagaaatgcactagcacctttgcctagcaattctatgccaaatggaatcggcaacgggagtggccgtggtgcttcgggggccattgcttcacccacaaaatcagtattgtccaaagttatggacctgatgttcggcctctaaatcctgttaccaagtactggctgttattcttttggctgttccaaggcaaatcgaggattactgatcataacatttcttattgttgggtttttcgcaccgaagtgacattattggtccacagaatctgtattgtaccgagcctaagatcatcagggtgtcatactggtatatcacccggtcggtctggagctagtgttgatggtgtttcgctcgtaagcattcagtggatcatccaataccaaaccatatggaaattatgtccatggaaatatcatcaagtatcatcctggttttatacatattgaaatgattctgacctgtatgtgaatgcatcttagtaaattgttttcgaatgatttgacatgagagcctatatatatgttgaatgcgtctt

SEQ ID NO: 17874 - DNA, 2363 bp, Oryza sativa
  ref <308>: DATABASE ACCESSION NUMBER: AK068291
  ref <309>: DATABASE ENTRY DATE: 2001-12-06
gatgcttgcgtgacagcgtgagtggagtaatcctgacagaggcctcctcgtcagtttgcccttgcccaccgctgccgcctccggctccggctccggcgatccccatccatcccgccgagcgagcagggggcgccgtcgttcgtccagctgcttccgccgcatccatcctgtgatggtgaacactgacggtgaaggtggctgtgaaggcgggggtggagatccgatgtgtgttgacgataatgctatcgtcgcagttgagacgggcgttggtgtagatcaaggaattgggtcgcagcatgacgatgctggtggcgacagggtcatggaaggacaaggggcggttactaactctggtgatgaaatggggatgagggcgtatggtgatgaagccgagactgaagaggcagcaacggttcatggcagcaaggagggcaccgaggaactactccgcaaggtagtgtacagcgaggaggcggcgtacaagctgtactgtgactatgggcaccgcatggggttcagtatccgaaaggggaagcagtcctactttactggcacgaaaaggatcaggaccaaggattacttctgctccaaggagggcctgaaggaaggggagaggcttactgatgcaaacttcaatgacccacatactaggacgaattgcaaggccatggttcgcttcagagtgaataaccacggggagtggaaggttatccggctggtctctgatcacaaccacaacttggcaagacctgaagaacgacatcttttacggtctgcaagatcacttatagcagggaggtcaagttctgtagagacgtcaaagcaagattcactctcatgctacattagtatggcaaggacacttgccatagggaatgcagatttgcagaaccttgtaagacaccttaagagcagggcaaatgaagatggtatgttctattgggatgttcaaatagaccgaggcggtcggatgactaattttttctggcgtgatggcaggagcaggattgactttgactgttttggtgatgttgttgtgtttgatgcaacttatcgcttaaacaaacataatttgatatgtgctccgtttgttggtgtgaaccaccattggcagaacaccatgtatggctgtgctctattagctgacgagtctatgtcatcttttgtgtggctatttaaatctttcttggaggcaatgggcaatcggcatcctcgctctatttttaccaatcaagatcaagttatgtcaaaggcaattgaggaagtatttccaaatacatgccatcgcatctctcgctggcacatacaaaagaatgctgcttctcgtcttggtacacttaatggttccaaagcatttaataagctgttcaccaagtgtatgcagggatgtgactcagaagctgagtttgaggaaacatgggctgggatgctcagagagtttaagttggaggataacaaacacacttttgatggtggggttgaatatgagccacaatgtgacagtctgagtaacatctttaactgcattgctgagaaatttacctctccgtctacaattgttgttgttgtggacaagttgactgaagattggcgtgaaaaagagatcgatgaagacacgcggtgcagccaaaagcctcctgcttgtattataaagcacagtgatattttgaatcatgcagcaaaagtttatacatacagaatctacaagttgtttgagacgtattttcttgatggatgtggagccacaaaattcaaggagcttcattgcgaagacaataacagatatcaatttgagatgacaatgcaagggcgaggatcaagagtctgcacagttcattttgatatgatgacaatgcaactcaattgcagctgtagtaagtttgaaacaatgggtttgctttgtccacatgctcttaaagctcttagcatcaagaatgtgtgcagtattccagaaacctatatactgaagaggtggaccaaaggtgctaagaagtgtgtttttaatccaaagcaatatgaatcatcctatcaagaatgtatggatgatgaagctgcatactgcagccatgttatgcgctatgcttatgaccttgttacaaaaagtcaaggaaacgaggaattgaggaaatcactttgggagactcttgagagtggagaaaaggaattggaaaaatatctagaaaatgttacccagtatgcactttcctatgccacttgaaagaagcatcgactaaccttttagacttactgctgacaatgagaaagatgtacttctgggttctttagaagatgtgcccgagtttccaccgactcagactcaaactgtactctaagaaatgaaaatataaacttttgaaacaagg

SEQ ID NO: 17875 - DNA, 1650 bp, Oryza sativa
  ref <308>: DATABASE ACCESSION NUMBER: AK068292
  ref <309>: DATABASE ENTRY DATE: 2001-12-06
gtgaagaactcgctcctcgtcctcatccagcacaactgcgtgcaggccttcaatgcccccagaggaaatggtgataagacggtaacgcactacctggccatcttcgacaacatcgtgcacagacagcgtttctcaaagttcctttctatcatccgtgcagacatcccagagtcagaagcgctgcttgaaggattgcttcagaatggtaggctaacatttggccaacttgtggagcgaacaatttctaaagtaccagaaggcagtatcacaccagcaagggaggaaatacgaatgaacttcaacaaacttgtatttgcacattatgtggagcgttgcccgaaacctgaacctttctttgatccacttgtagatgaacaatctacctcgtcaaggaaacgtgctccaaaaactgtcgagattgctctttcaattgataagaaagttgtcaatactgcagctctttctgatgcagaaagattttctgagatcccatacatcatggaagatgcatccaatgctaatgattctccacgttcttctatttctggtgctaagaggaaacataatgccttagaaggagatgcagagctcgattcaacaattgcagagaacgaagtactttggcgggcaaattttgagaaattcacattctgtctaaagaagaagttttgtgcagaccgaaagaaacctaagttgaaggttggcacacatcctatctgggaagcatttttcgaggccagtttaatggaaagggacaacaactctgtgacatctccaataaatggtattatggagaggctaggacagaaggaaggaggtacatcgatgacacttgatcatataacaagagttttggaggagttgaattgtagtccttcctcagaggacccagattcattcattttggatttaagcagaattgttgaagcatctcgaaatgaggagatagagtcgcttgtgagaaagaaatacgggcaagaagcttttacaatttttaggctattggtcagagaacgcggtccagttgagacagataaaattattgacacaacaattcttgacaagcagattgttcatggaactttgtataagctttggaaggacgactacatcgatacagagagaatcctttctggaacaggaacagggaacacacaatattttgtatggagagtgaaaaatacattccgggaacagttcatcgataatctatgtcatgctgctttaaacctgcggcaaatggtcaattacatagctgaactcctactcgagggctcaaaggatgacacaaagttgcggaatagaaaaaatattttgatcttagccctgactagacatgacgattctctcatgctgtttcaggatttttgaaacgctgtagcaggtgttccagcatctttcttccatacttaatcatacttcttttgagctagatggtggaatatcatagtttattttgcacccaggcttttattgggtcaactggcttaggattaaccaacgctttccctaggccaatcgaaccaacctttccttttggcatttcgtttcaaaccaaagttcggaaatgaaatcctttggtatattggacccttgtgaatttttgtctttttgtgactaattaaattttggtaacgtcacatttcgatt

SEQ ID NO: 17876 - DNA, 3797 bp, Oryza sativa
  ref <308>: DATABASE ACCESSION NUMBER: AK068293
  ref <309>: DATABASE ENTRY DATE: 2001-12-06
gctcgctctaatcttcttcccctcaacccgctccaaaattcccccgcctcccactccaaaacccaaaaaaatcccgcgcggccgcgtgaagccgtgaatctactcctcccttcctccgcgcccgcgcgtcgccatgaatccgcaggcggagggcgatgcggcggcggcggcggcggtgctgggggcggacccggcggggctgacggcgctgctgggggacctgacgtcgccggcgaacgaggcgaggtcgagggcggaggggatgttccacgcgctcagggcgtcccacccggacgcgctcgcgctccgcctcgcgcacctgctgctctccccggcgcacccctccgcgcccatggcggccgtgctcctgcgccgcctcatctccccggggtcgcaggcgttcgtctacccggggctctcccccgccacgcagtcctcgctccgcgcgctcctcctctccgcggcgtccgcgacggggctctccaagtccatctcgaagaagctctccgacgccgtcgccgagctcgcgtccttcctgctgccgtccaacgcgtggcccgacctcctcaccttcctctacaagtccatcgcctccccatcctcgcctccggcgctgcaggagtcggcgctcaacatcctagcccggctggcctcccatctcgccgcgggcttccccaacctccacgccctcctcctctccgcgctctcgcacccgtcgtccgcagatgtccgcgtcgcggggctcaacgccgctatcagcctcatacagtctctcccctctgccgccgaccgtgaccagtttcaggatctcctcccagccatgatgcgcgccctcgctgaatcgctcaactgtgggaacgagggctctgcacaggaggcgcttgagatgatgatcgagcttgcaggtgcagaaccacggtttctccgccgccagctgcctgacgtggttggttctatgttgcaaattgctgaagcccctggattagaggatggtacgcgacaccttgctgtcgagtttgttgttacccttgctgaggcaagggagcgcgcgcccgggatgatgagaaagctgccacggtatgtgggccggctatttgcggtgctcatgacaatgctgctcgatgtccaggatgaacctgcgtggcatgcagcggtgtcggaagaagaggatgctggggagactgggagctatgttttcgcacaggaatgtcttgatcggcttgcgattgctgttggtgggaatacgattttacctgtggcagctgagttgctcccatcattttttgcttctgaagagtggaagagacgacatgcggcactggttacgatagcgcagattgcagagggctgtgctagagtaatgattaagaatctggagcaggtagttggtatggtgctgaattccttccgggatccttatcctcgggtgagatgggcagctatcaatgcaattgggcagctttcgacggacctggggcctgagttgcaaaataaactgcaccatgttgtcctgcctgcattggcttcatccatggatgatttccagaacccgcgcgtacaggcacacgcagcttctgcgattctaaacttcagcgaaaactgcaggcctgatattttgacaccatacttggatgggatagttgggaaactactgtcattgcttcagactggaaaccaaatggtgcaagaaggtgctttaactgctttagcatcagctgcagattcttctcaggaacacttccaaaaatattatgatgcagtcatgccatatctcaagtctatactcatgaatgcaactgacaaatcaaatagaatgttgcgggccaaatcgatggaatgcattagcttagttggtatggctgttggaaagcaaaaatttaaggatgatgctaagcaggtgatggaagttttgatgacattgcaaggatctcagatggaggctgatgaccctataacaagttacatgctgcaagcatgggcgagattgtgtaaatgccttggtcaggacttcttaccatacatgaatgttgttatgcctcctctgctccagtctgctcagcttaaaccagatgtgagtgtcacatctgctgggccagaagatgaaaatggtgaatctgatgatgagggtgttgagactattacgctaggagacaagagaattggcatccgaaccagtctgctggaggaaaaagcaacggcatgtaatatgctatgttgttatgctgatgagctcaaggaagggtttttcccatggattgatcaggttgcaactactctggttcctctcctcaaattctattttcatgaagaagttaggaaggcagccgtttcagcaatgcctgagcttctacgttcagcgaagttggcaatagcgaagagccaatcgcaaggtcgggatgaatcttatcttaagcaactgtctgattacatagttccagctcttgtagaggctatacataaagaacctgacacacaaatatgtgcaagcatgctggaatcgctgaatgaatcaatacagttatctggaacacttcttgaggaaggccaggtcagatctatagtagatggaattaaagaagtaataactgcgagtgctctcagaaggagagaacgaacagacagggcaaaagctgaagattttgattcagaagaagaggatctactcagagaagaaaatgaacaggaggatgaaatcttcgatcaaattggtgattgtttgggcactcttgttaagacgttcaagacttatttccttccattctttgatgaactttccgtctatttgacacctatgttggccaaggacaaaacagtagaggaacgaaggattgccatatgcatttttgatgatgttgcagagcactgtcgcgaagcagctgtcagatattatgatacatatcttccttctttattagaagcctgcacaagtgaaaatccagatattagacaggctgcagtttatggtattggcatttgcgctgagtttggtggctctgcatttaggcctcacactggtgaggccctgtccagactatacaatgtaatcaaacatcccaatgcgttggacttggataatgcgatggcatatgacaatgctgtttctgctcttgggaaaatatgtcagtttcatcgtgatggcattgatgcatctcaggttgttcctgcttggttaagttgtttgccaataaaaaatgacttaatcgaggccaagatagttcatgaacaactctgtacgatgcttgagaagtcagatagggagcttttgggtcataacaaccagtatcttccaaagattgtctctatttttgcggagatattatgtgcgggtaaggatctggcaacagaacaaacttttagtaagatggttaatttgctaagacagcttcagactacattgcctccttcagtactggcgtcaacatggtcttctttgcagccgcagcaacagcttgccctacagtctgtgttgtcatcatagctgaacagtaacctcagcaatgttgagcatgtggccttcacatattgccttcttttttgggttttcatgtggttttgtgcttgggttcctggagtttgtgcagcatacaaatgccctgagcttttgtatgaagggcatggtttgcatcagaagtgtatactgtcacagaacatcatggatgtgtatggggctgagcaatctctgcttcacagcaagtgaagttgtaaagcaatatgttcattttactaggaattagttgggttgaagaaaatgtaaattaacaattttgatcgttgatgttttgatatcatattatttc

SEQ ID NO: 17877 - DNA, 1873 bp, Oryza sativa
  ref <308>: DATABASE ACCESSION NUMBER: AK068294
  ref <309>: DATABASE ENTRY DATE: 2001-12-06
gcgtgatcaaaacctcccctcctggctccataatccagcacggaaagaaggaaaaaaaaatcccgcgccgcgcggccgctagggtttccggcgagggggtcgaggggggcgggcgcggccatggcgcgcggcgggagcggaggcgggaggtggaggagactgaatgtgaggcccgacctggcgagcgaccaggagggcacgcggacgctcaacctcacggtgctgcgtcgcctcgaccccgccgtcgccgacatcctcatcatcgccgcgcacgtcgtcctctacagcttcgacgacaacatccaccaatgggaacacccaacccagattccagtttattgtcatgaatcgtaaaaatacagaaaatctgaccgaagatctcttggggggttttgaatatcaagtacaagtcccttacatcatgtaccacaatgctgcagacgaaatcacaggaatttggttctatgatcctcaggaatgtgaacaagttggatatcttttcagtaggatacagaaggcattttccagggtgtccccaaaggccaaggtttctgtaactgaaagtgagtatgaaaagccggaagtagtgcctgctgttccttcgaatgaggatactctaaaacagccaacgtcatctatcatgttgctggataatgcgaagtatgatttcttgtcggctttgctaaagggtgctgcatgtgttggtgctaccatggacgaagcaagtgcagtacagtcaaacaaatctgttgggatggttcattcatctactcatgcgtcacctcatgctattccaccacaatctcctgcaatacagtcaaataaatctttcgggatggttcattcatctactcaggcacctcttgctattccaccacaatctcctgcaatacggtcaaacaaatctgttgggatgattcattcatctactcatgcatcaccttttgatatcccaccacaatctcctgcagtacagtcaaataaatctgttgggatgattcattcacttactcatgcatcgcatcttgctattccaccacaatctcctgctttgcatggtctgcatccttctcaaatttcagcagttcctgtgatgccccatgatgctcatagatctagtagcacttctaccatccagcctacaagtctagcaaatccgttgttctttcctccgatgccatctttgcagacagcttctcatgctgcttcgtcattgtgttctgctgctcctcttcatcctcccattaccgttcagcagcttcaaagtgctcccttgcaccagcccttctccctaccgactgcatcgtccattcaaccaccatatggcatgccattactgcagccatttccaccgcccaacccttccccatttcttacctcgggagtgtcttatggccgcccagtgatcacaagagaccaactgaaggatgtgctactgagtctttgtcagaatgatgaattcatcgatatgatatatcgggagttcgtgaagagacagttaccttgaggagactgtcactaccacaggctttagtttgtgtaattgtgttttaggtaggccatttttttcaaagcctgtagactaacgtacgtgcatttgacataccaaaggttagcatagtttaggtccaactatcgactagttttgagcagtattctcggagcagaaaaagtcttgctccaaataccagaaaggcagaaaccttgcatttcgcctaataccaactggaatagtttttgcacgtttttgtaacggcctgtttttgggcagctagtaccattatttttggatattactccccccgtttcacaatgtaagactttctagcattgtccatatatatatatatagatgttatatatgtttagattc

SEQ ID NO: 17878 - DNA, 2773 bp, Oryza sativa
  ref <308>: DATABASE ACCESSION NUMBER: AK068295
  ref <309>: DATABASE ENTRY DATE: 2001-12-06
gacctgtcagttcctcccccaacctccagctccctagccgaaaccgccgtttcctccccacgtcgccaaatccacccacgtcgccgccgatcctaacccctcccgctcgcgccctcgcgcccaaaccgcatgaaatcggttcccctccacctcatctacactttccccacgtttcccccaaaaatcgggccgggatcgagctccacttcgcccatgatgccgcccacgccgccggcagttgccgccccaatccgccactccccggcttcgccgtcgctccctcggtctataaaaagcatccacgggctcccttctctcttttccccaattcccccgagctctcccgtgccacaaatcgcgcccgcaccacgagcccgtgcgccgccgctttccggcgaggtccggccgtcgctcctctccgccctagccaccgccgctagcatcgccacgccttgctctaccccggcctccactccgttctcccgttccgccaccagaaccacctccccaccgtgaccccgagccacttttgccattgtcaccttcagccgctcgcggcgggcaatggacgccacgtcgggccggctcgtctccaccttcagcttcgcaaggccgtgaggatgcccggccgccactccgccctcgccatccgctgccgagactccgttctccccgcgcgaggtcacggcgccccttggccgcccctctgttggcaccgcccgtcgccggagcgccgccgcctctctccgcccgagcttcgccggctgcctccaaccattgccgtgccctcgcgtgtagttctcgtcgtttcggaagtccgcggtcgcgaggaaaagagttcggaagatcaaagtgaagaagcaaggcaagtcacacattccccttgagcatgttgatcccaatttataaatgttttaccgtttgcaaataaacatgcatgtcttgctaattacatgggatcagggtttacctatctgctcgcttgtgccatgtttacttgatatctgtcctttgtcaatattgggtaataaatcgactagctcatgttacttatgtgacatagctagaactatatgcttagccatgcttaattaccactagctcagttgatgggataattacagtattagatatttttttagtatcaaaatgagctgcgtgctcgagacatctggccatgcttcattgtcgtaattacccaactaaaatgcgactgattggtgggttgtgggtgcatggttttgctagtcgcacccatgacaattaaggaccggttcacgggatgccctggaagaatttatcgtacttaccacaagccagcgtgggcaacggctgggcttgtagtatagctttcctctagccgacgtacccaggcgagggtgggcgtgatggagttgggtcggccggggtgtctggttgatcggcttccggattcaccgcggcacgaaaggggggctacccgttgcctgctgggggcgggggcgaaccctaaggtgtggtgcgatcggttagagggggttatgcgaagggtcctgtcacggcctctttccggtatgtcgtggtgacatgtcggcgcacggaaacgtgtcgtggggctgtgtcttgtgggtacagttgtacatctctgctcagagtaaaactattcgaatagccgtgcccgcggttatgggcggtcgaccagattcaccgtgattagtcccaccttaataaatcgactcaatgcactgtagttcaggtgggttggttgggcctgttcaacgtggtgtagcgttgatcagtggagatttaatgttactttaattactcaacagttttactgctttgctcaataaaatgttttacaaccgcctttatgcaaatagccacaaaccgtccttgtgttccccttgcacgtctgcatcgttggtgtggcttgctgagtacggtagttgtacttagtcttactattattcccccttttcagaagtgtagtgcttctgagctgaagacagagttagaagaccaaggctcagaccccagttaagttttgcctgtggagtggagctgaagccccgctaggattgcctttttccgctgctgccgttttctttcggtgtgaggactaagtgcctcttctgtaagtatttacgcttttatttatgtttggaactgtatattacttgtcgttttgtgtaccctggctggtcttggacagggatttaatgcacaaaatagtctggaaatttgggctaaatttctaggcgtgtgtacccgacgacaaaaaactgaaggatctgatactcaccgaagctcatcaaactcagtattcaattcatcccggcactaccaaaatgtaccaggacctcaaagagaaattctggtgggccagcatgagaagagaaatagccgaattcgtcgcactctgcgatgtttgtcaacgagtcaaagcagaacatcagcgacccgctggactgctctagccccttcagatcccggaatggaaatgggaagaaatcggaatgtttacccaacggatttcctagaaaacttccacaattttttttgcccccaaaactttcagatttgtaaccatcgaatcgtttcgagatttgtgcatgaagagaaaaaaattgctagataaagaaattttcacacatgccatgcgtaagatcccagggctatctaaccaaaccatcgttgaatgcaagttttaataagctatatcgtagttagtacagttacaatgtaattgtattttagttatactatagttgcatctaaaagcttttgaccc

SEQ ID NO: 17879 - DNA, 1919 bp, Oryza sativa
  ref <308>: DATABASE ACCESSION NUMBER: AK068296
  ref <309>: DATABASE ENTRY DATE: 2001-12-06
gaattctgcaatcatccacacaatcagccatcaactactctgaaaacagaagaaaatgacaaaaagtggataagcaagcaccgaacaaggcgagcagactacactacccttccgtgctgccggccgccggccggcgtgctcgacctcagccatggcgccctccgccgccgctcccgagatccaggagctcatccaccacccctacgacggccgcgtcacctccttcgtcgtcctctcctgcgtcaccgcctgcctcggcggcatcctcttcggctacgacatcggcgtctccggcggcgtcacgtcgatggacgccttcttggagcgcttcttcccggaggtgtaccgccggatgcacggcggcggcgagcgcgtcagcaactactgccgcttcgacagccagctgctcaccgccttcacgtcgtcgctctacgtctccggcctcgccaccacgttcctcgcctcgcacgtcaccgccaggcgcggccggcgcgcgtccatgctcgtggcgggggcggccatcgccgccggcgccacggtgggcgcctccgcggcgggcctcgccacggtgatcctcgggcgcgtcctgctcggcgtcggcgtcgggttcggcaaccaggccgtgccgctctacctgtcggagatggcgccgccgtcgcggcgcggcgcgttcagcaacgggttccagctctgcgtcagcgtcggggcgttcgtggcgcagctgatcaacttcggcgcggagaagatcgccggcgggtgggggtggcgggtgtcgctcgccgtcgcggccgtcccggccgcgttcctcgccgtcggcgcggtcttcctccccgagacgccaaacagcctcgtccagcaaggcgaggaccacggcaaggtgagagctctcctgagcaagatacgaggcagcgacggcgccggagtcgacgacgagcttgacgatatcgtcgccgccgacaggtgcaaggtgacagcgaggcgcgggctgacgctgatgctcacccaccgccgctaccggccgcagctggtcatggcggtgatgatccccttcttccagcagatgaccgggatcaacgccatcgcgttctacgcgccggtgctcctccgcaccgtcgggatgggcgagagcgcggcgctgctcgcggtggtcatcaagcaggtggtcggcatcggcgccacgctggcatccatgctcgccgtcgaccggttcggccgccgcacgctgttcctcgccggcggcgcccagatggtgatctcccagctactcatcggtgccatcatggcggcgcagctcggcgacgacggcgagctgagccaggcgagcgcgctgctgctgatcgtcctcgtcgccgtctacgtcgccggcttcgcgtggtcgtgggggccactgggatggctggtgccgagcgagatcttcccgctggaggtgaggtcggcggggcagagcatcgccgtggcggtgaacttcctgctcacgacggcggtggcgcagtcgttcttggccatgctttgccacatgaaggccggcatcttcttcttcttcgcggcgtggctggtcgccatgaccgccttcgtctacctcctcttgccggagaccaagggtttgcccatcgagcaggtcgggaagctgtgggcgcgccattggttttggaggaggttcgtcgtcaccgactccggcgtcgacggcgaggaggaaggcgaagccattgacgccgataagctctgaacagttaaccgtgcagatcactgactgactatctgattgtctgactgatccggccacggttgtttcagaacagaactggctatatccaacaacatgtgaagactagctagcagcacattttttagctggatttaagtatgtaacaatacatatttgattacacaaaccaatgcttaaacaagcatttagtagt

SEQ ID NO: 17880 - DNA, 1922 bp, Oryza sativa
  ref <308>: DATABASE ACCESSION NUMBER: AK068297
  ref <309>: DATABASE ENTRY DATE: 2001-12-06
aggctgcttcctcctgactcctctcctgcattctctcgcttctgacggcggcaactaagctttttgggattcgattcgaggaggaggtgatggcggaggaggaggtggcggcggtggtgggggagctgagggggagcttcaggtccgggaggacgagggcggcggagtggcgggcggcgcagctgcgggggatcgtgaggatggtggaggagagggagggggacatctccgactcgctccactccgacctcgccaagcctcgcatggagtcctacctccacgagatatcattggcaaaggcagcctgcacatttgccttgaaggggttgaagaattggatgaaacctgagaaggtacctgccgccctcactacattcccatcaactgcacaaattgtgtcagagcctcttggtgtcgtcctagtcatctcagcttggaactaccctttcttgctctccatcgacccagtcataggagcaattgctgctgggaatgccgttgtgctgaagccatcagaaattgcaccagccacctcagcattgttcgccaagctgctacctgaatacgttgatagctcttgcataaaagtggtggagggaggcgttccagaaacaaccgcactcttagaacaaaagtgggataagatcttctacacaggtagcggaaatgtgggccgcatagtgatggcagcagctgcaaagcatcttacccctgtggctctagagcttggtggaaaatgccctgcaattgttgattctaatactgatcttcatgttaccatgaagaggctagctgttggcaagtggggatgtaacaacgggcaggcatgcattgctccagactacgttataacaacaaaatcatttgctccagagctggttgactctttaaaaagagttttgaaaaggttctatggggaggatcctttgcaatcagaagacttgtcccgtattgtgaattctaaccatttccgtagattgacaaatttgatagaggataagaaagtcgcccaaaagattgtatatggtggccaaacagatgagaagcaactaaaaatagctcctactgtgttgttagatgttcctcttgatacaacactcatggcagaggaaatttttggtcccttacttcccattgtaacagttgacaagattgaagatagcatccagttcatcaactcaaggaccaagccacttgcagcctatcttttcaccaaggacaagaaactgcaagaggaatttgtgtccaatgtcccagcaggaggaatgcttgtaaatgatgttgccctgcatctcgccaatccgcacctgccatttggcggagtcggcgacagcgggatcggctcctaccatggcaaattcagcttcgattgtttcacccacaagaaggccgtcctgatccgcggcttcggaggggaggcaactgctaggtacccaccttacacgattgagaagcagaagatcctgagaggactgataaacggcagcttctttgcactgattcttgccctcctgggcttccccaaagagaggcgttagaaaactttcagtagtttcagtacagtacttgtgcatttgagtgagtgcaggccatgctgtcaatggaagccatttcctgcatgttgttttacacaggtgtacattatatttgtcggattttcttgtgtaacttattgaaaattctactacacagggttacataaataaacatgatttgtcagcaagctccccgcaaaaaaaaaaaaaaaaaaaaaaaaaaaaagaaggtagcagaagcaagctaagatagactgcgagaagatttgtactacaaccaacaatagggatatatatagaatggagcactgtgatgttagatgtgcaaagtagcttgaactagggactcatattaagctgcttctctccgatgaagcttgcaaaccc

SEQ ID NO: 17881 - DNA, 2202 bp, Oryza sativa
  ref <308>: DATABASE ACCESSION NUMBER: AK068298
  ref <309>: DATABASE ENTRY DATE: 2001-12-06
gcccgcttaggccctgtttttcccatccattaaaagatatctttaaatcctagctattcattctccctctttcatttaatcctaacccttcattcatttcccaatcccaatcccaacccccatttcccattatccaaacacaccctaagttcttggggattttcaaccggtagtttccctaatcgcatcgtctctactgctctgatctttcttgctgcgtctcgctctcgatttcccccattgcgatgccaatgttgttccagccatgcgtgtgctcactgttttttttgggtgttttttaccttccaggctgtgctcttggattggtgtctcttccacatcgcatcttgttttggggggagggaggggggcatctttgcctccctcagctactgctcactgaggtatataagatcagctggttttatcacggggatggacgttgagttcattacacgtgtggtgctatggtatatagataaactgagatggttatgtcactggatgtctgttcgcttgatttcctatatatggtgttcctctgtttttttttcgagacagtactttccctaatcgcatcatcccgtacgctctgatcttttcccgttgtgccttgctctaggttttcccattgtgatgtcgacgttcttccgaccatgtctatgctaactgaatttgtttttttgttttctaccttctaagttgcgcggccaacccttaccgagacgtggttttgctgcccgccgagccatccacattgctccttccacttctccgcatccgctcgtcgtcctcgtcctctccgcatccgcatctcttcccaatatttttgttcttcactgtagctgcacgtacagcgagcttgaatggcatcacatactccccatcccgtcctcagcatcggcgtcccacatggcatcgcaacgtcgccttcttcttcggcatcaggtcaactcggtggctcactgctagcacagatggcgggcggggagtggatctttcagttcttcctcagcgacttgcccgacggtgttgctagctgacgcagccatttccgcaatggcagaaatcggtgtacgatctacctattctcctccggtacagtctcccttctcttatctctcatctaacatagattcaagtggttctgaatttaggctaaatttatcagatgtttgtttgcgaagttcgtttcaagattcggatagaacccaatacatttccgaatattggtgcctcgagatttctctctatttttttaattttgccttctgataatttgaactctgagccaattcctctaccctctgatggaaagagagttgatgtgatgaggcaagacaggaactggtgagcttccctgaaacctgttgattccctggcaacatagatgttttattaggatgagttctcacattaataggttccttccattagggcttttaatgttctaaacttttgattggtgacagaagttacaattactctcatcctctcctgcgaatgagattctattcatttttctgttcctgtattttaagcatgtcagtatgccactactttgttgtccaaaactgaactccaaataaaggtcaaggtggccagcttaggattgaaacaagtttagcagaatctttttaaacaaattatttggtgtttttcagcatacaggtaaacagacggctagacttcatgataattcatgctaatgttgggaggggcaatccactatgctcagctcatggatcttcaggaatggagctgccagcatataaatgacaaacaaatacaaggaaaaatactccatgtgcagcaacgattaatgcttttgtatgagctgatcttagtctctgaagactgtgctgtggtcttcatctctgaaggctaagctgtgttaggttggagcactccgattcaactcttttgcccaccaaactaactaagccaattgagtgctgcaaagcgcaaacagtatggtctccatagcctgtgcagatatagctcttacattggtgttctgccaccataacactgccaaagctgtttccaagctaaaaatcatgctgcagtgatgattcaatcccacacttgaataattgttgtttcctgcactgatgtagtagttactgctttttctcacttgcataattgatgtacttcactcacttttttatatttcataatatcatatagattctcctc

SEQ ID NO: 17882 - DNA, 2346 bp, Oryza sativa
  ref <308>: DATABASE ACCESSION NUMBER: AK068299
  ref <309>: DATABASE ENTRY DATE: 2001-12-06
ggggagccctagcgccatgccccttcccctctcctctctcgcctccgccgcctcccctccctcgcctccgccgtcgctgccgccgtgatctcctcctcctccccatcaaatccctctcacgagctaagacccctccaccagctctcctccaggttattctccccactgccccccaaaccccattccctctcctgctccaggccacaagccccacgtgccaccaccaccgacggatcaggcgcgggggaccacgggagcgattccggaggaaatagcggcaagggcagcggcggcggcggcggtagcgacgatgacgactgtgaggaggccgagttcgggcccctgctcaggttcgatgaggtgctgcgcctagccatggcacgcggtgtctcgctcccggccgatatggaggcggccaaggatgctggcatctgggaagtcctgttgctccgctacttcgatctgcaggcagcaccatggcctctagccgcgatgatccgggcattctcgatgctccacaaccgaatgttagccgacccatcattcctcttcaaagttggaaccgaggttgtgattgactcgcgctgcgccacgtttgcggaggacttctgggcggaatttgagctgtacgatccatagacagatatgcatgctacagtttgctcgctggcccatgttccttcatcagttctacttcatggagtagatccctaatgcatgaagcactacttttgtgtgatctctgagactttgactaatactttggccaatcctttttttaaagcatatgctttaatttcgtctgatcactcaaagtttctttcacatcgttaggatgttttgttaccactgcgtgtagaaattaactttgcaccggctaattgaatttgtttgatttgctttgtagggattcatggatacagccatcacccccagtttccattctcttatcctgcacagttcatcggatgacatatttgtgattccaaaagagtaatggatggttagtgtttaggtgttccagcaattgatgcaaatgtcaaaatttatctgctttatctcttacttcaattctttcttttacatgtgaatattggttgcataaaatctatttttggttgtttacgagtttaccgacattctgaaattgtagactgaagggatttttcatttgttcttaccactgtgacttatcttatgcctttgtctcagccttttaggtctgaattaaacgcagagagttggaacagtcaagacagcaagcagattatcactacgtttcaaggtgttccagaaatcctgacacaagataaaatttataattctgattaaccactgtagcacatcatcaccattagttgtttggcacatcgtctatttcagcctctttagcaattctgtacgacaattgatgcagtttagtaagtctgaattcatcatgaattttgtctgcatactatttgagcataccctgtgattttgtccatgctagagcaatatgaagttctgttgaattgtttctcttaacttgaagaaagtaacactatcgttaatcgtatgcactgactgactattgttttagtttcttaagaaaggatttcttctaattgcaacccctacttatttgtcccatcaacagtgcatgtatccacgcccatgacccaaccttggatgctaccttgctccagtggatgccggatttcctttgttgcattgtccatcctccttcacactgaagctacgcaggacctgacaccagtccccacagtccaaattgacttcaggtttgcagttgttaccttctacagttctaccacaatgatcgattttacttttctcagttcattgttcgttactttatttctaattttgtatttgtagatatgtgtttccagtttaaattacagggtggaataaataagaaaaggatcgaagcgagctggacatttttatccttttgattttatcaggagtacatgattcagtttgcagatcatctgcttcaagcaagtgattgtatttgttaattagcactttcaaagttacaatccaataaagagcacctgagcaggacggtggttctcagcagttgtagccatgtcctacctgaatatttgaaaaaaaaaatgcaggccatcaaagatgaacggcaatgcaacatcgacagcagcgagctccagccaccagtctcctaaatacaaatttgttccttttctggcacaattgatttttataagaatgtgatcagtgagatgaacaggtcaaataccattgattgctttgacccacatgatccgattcagaaggtaaaatcaaaagtctgatataattacagttagtatgtcc

SEQ ID NO: 17883 - DNA, 1913 bp, Oryza sativa
  ref <308>: DATABASE ACCESSION NUMBER: AK068300
  ref <309>: DATABASE ENTRY DATE: 2001-12-06
gagggttttactagtactcttcatccgcttgccggtcgccgccggctcgtcgacggttgcggagcgttctgcggcggagcttggcggggcgatttgggggcgaggttttgcgggttcttcgacggttgcgggcgttgagcggcggagctgtgggacagccacatggagaaaagtcgggacaaggtcaacattaccccagatctgaacaaaggaaaagaaacggtgattccattgcatatcacccgattagatatgagggaggtggatcaatctagttatgtggctagactaaagctcaagaagccttctaatattccaccttccactttacctctgcacttgccagtgataggtttggatgtgaataaaccagataacctacactgtctgatgattatgcaaaatgttaagcacaggaacgttttgcaaatggaggcagtgaaacaaatagtaattggagaggcaaaaacaccagtactagctatgtttgttgaatcttttactgggcgtttgccagcactgcttcgaaaaatgaaactgggcggcatgtctgacattcttccttcggttgagcttgctgacgtagtcaggtaaaacttacttacttttctttaaaactgtgcctaatgctctcaatgtttgtaatgtaatttatgtgtatatgcactaaaatataaatcattgcaggcaaatcattgaggggtgggaggagcttcgagtaaatgggctttatcatggaaatatctgcttggaaaatgtatattattgcaaagataatgaaaagatcaccatcaaacttgcaaacttccaaagcaaaggtgcaatgagtaaagaggcagcacaattggaagatatcaatgcaattggtaggatgcttaagtctatttccgctctggcaaagataggcgtaccccatcaagcagaacgatacatgttagttgatcacctggcaatgaatttggagtttcttgcaaacacccagcaaataggaacaatcaaagacgtgattctagatcatgtttttttctgatttaaagaaaggaggaagagattcttcatctatgatatcccaaaggccttaaaagatgctgcattctgtaacaatgtccgcagaggacaaacatgtgttctggaatgggacaaaaagccacatcacggacttctaggctcaatgaacaggtataggaaaacaaatttgaatttgcctgcttatgatggaaatgacccaattcagaatgtgaaatttgtgagtggagcatacacgcatgaagaggaggtgcaggatgatcttacatttaatgggatgtcctcaactgttgatgaagctgttcaatctgagcaaccaatgttatgcctcaacctatacaaatgcctgtcacccgagtaagaagattgaaggaactcaggtgccgctcaggaacctcgagctggtgttggttaacaagtcctgtgtttagtggaaacgccagtatttttgttcagtaaaatagatgttggcagtggtcgcgaaaagacaatcagatgatgtaatcagtacatgccttccatgctggtctccccagcatgaacaccttttctgcgaaaaaggaaacgatatccttttttttgttttatcccttttttgactgccgtgtacggagtagtattactgttacacatgctccaaatccagtccacaatattatactagctgtctttttaggtttttcctttggacgtcgtgtcctagtgaagtgaaggaagaaatgagtagttatgaggtttatcgcttctttttttttgaaaaccaagcttttatattaactagaagcatagtacatgcttgataacacagtttgctcccttaaaattgttcttgagagctgaagcaaagcacattcgattgggataagcaaggtgagaaatgttttgcc

SEQ ID NO: 17884 - DNA, 2115 bp, Oryza sativa
  ref <308>: DATABASE ACCESSION NUMBER: AK068301
  ref <309>: DATABASE ENTRY DATE: 2001-12-06
ttggtgaggcagaacagaaatcagagaactgaggacagaaggcaagtaggaagaatctgagctgtctgaatggaagggaaaaacaactagggggagaaaaggaaaggattatccaagctttcgtgtatcatccgagtgtcccttgtatgcaatgggtttgatcaatagaggggtcttcttcaagatcttggccttcctctgcttcatcagatcatctcaaggaagaaatcattttaccacattggatctccctcccctactgaaggcaagcagtttctccagaatacagcatgaggcatatgactacatcattgttggaggtggcacagctggatgcccattggcagcaacgttgtcccagaagtacaaggtgctcttgctggaaagaggagggtctccttacggcaaccggaacatctcacatcttgagaacttccacatttgcttggcagatgactcgccaaattcaccatctcagggatttatctccactgatggtgtcatcaatgcccgggcaaaggttctaggtggtggaactagtgtcaatgctggtttctacagccgagctgacccaagctttgttcaagacgcaggctgggatgcagagttggtaaaccaatcgtacccttggatcgaagagaggattgtttattggcccaatattacaccgtggcaagctgcactgcgggacgggctgcttgaagcaggggtctcaccttacaatggatacagctatgatcatctctttggaacaaaggtcgggggaacaatctttgatgaggctgggtacaggcacactgctgctgacctccttgctgctggaaatcataacaacctcagggttctccttcatgctagtgtgaccagaataattttcaacacagaacaagagcacaggaagccaaggaccattggtgttgaattcaaggatgagaatggggggcagcagcatgccttccttacccgaaacagagacagcgagattatcatctctgctggtgcaattggcagtccccagctattgttgcttagtggaattggacccagaaaggaacttaaaaagcataacatttctgtagtccttcgcaacgaacatgtgggtaaagggatgtcagataatccaatgaattccatctttatacctaccaaggatgcccctaagcaatcactgattcagactgttggaataaccgacggcggggcgttcatagaagccagcagtggtttcagccagtcaccagatagtatccagtgccaccatggaatcatgtccgctgagattgggcagctgtcaacgattcccccaaagcaaagaaatctagatgcagtcaagaagtatgtacataaaaaatataacctacccaaagaagtattcagtgggggttttatactttcgaagattgatggtccattgtctactggtaatctagttcttgtggatactgacatcaatagcaaccccacggttaccttcaactacttccagcacccaaaggatctcagtcggtgtgtctatgggatcaagaccatagagagaatactgaagacaaaccatttcactaattttaccctcaatggtggtggatatccaatggaagtggtgctcaacatgagtgtaacagcaaacataaacttgatacccaagcacacaaatgacagcacatccatggagcagttttgcagagacacagtggtcaccatctggcattaccatggcggatgccatgtgggcaaggtggttgaccaacaataccgtgtgattggtgtctcaggccttcgtgtgatcgatgggtcgaccttatttaggtcaccaggaaccaacccgcaagccacagtcatgatgatgggcagatacatgggagtgaagattctaagaggaagattaggacgagctgctggagtataactgattcttggaccttattgattatgtaagaatgtgacttaggaaaagaaaagtatatagtaatttttgaagcaattcaatatcatatcaccacagaaagaaaattaggagttttcgtttgtgttctagatgtggaaatctatggcatgtaatatcatctattgacaccattgtttctgcattatgaacaagtaaattatattacattg

SEQ ID NO: 17885 - DNA, 1058 bp, Oryza sativa
  ref <308>: DATABASE ACCESSION NUMBER: AK068302
  ref <309>: DATABASE ENTRY DATE: 2001-12-06
gattaacaaagaatccgtccagccttgagaagcagagaagaggagagaaacaagagacagacagacagagatagagtaactgagtaaacgggttcttgcctgacatttgtcttgtccgggtggccattcatggccaccgtggggcagcctgatgccatgagaaggatcaccgttcactacgtgaatccgccgccgatcgccggcgccggagaagcacacgtcgatggcctcgacgacgaggttcttgattatgtgattggtgatgttcttcaggatcaggagggtctgtatcaatcgatattgtatggcaaatacggggatgacatgagaggggcaagaaacactgctcttgcccaatctgatggtttacattactactatcacggagagaacagcagtggtgaagcaacaacctcgagaaattcagaaatcgaccaacagattgagtatgacttggtgttcgctaggcagctgcaggcaatggataatctgacaattgagacacctgcagatgaagatgatgatataagctgcgtaccctctccatctgactctgaaaccgatgaaccggcagaaggcaacaacgaagaggctgccacacaggatgataacgatgatccagacaacatgacatacgagcaaaggcaggcacttgtggaatctgtaggaaatgagaacagaggtttatctgatctgcttatctcctacttggagacatggaagtacaaatcaggctttttcccaaggaaggcaaaccatgataactgtcctatatgtctatccgctttcagacgccgagaaacactcattacattggcttgcaagcatagttaccatgaaggttgtattgctagatggctcaagattgacaaggcctgcccagtttgcaaatatgaagtgtttggaccttcctagcgtgtgaggaggcgatcaacaaggctgaccaactatgactcgatgagacggcatatagtggttgcagcatctgctctgcagtattaattaaaaagggaaaccttaactcccaaaaaaaacagagaagggaagaaaaagaaagc

SEQ ID NO: 17886 - DNA, 2983 bp, Oryza sativa
  ref <308>: DATABASE ACCESSION NUMBER: AK068303
  ref <309>: DATABASE ENTRY DATE: 2001-12-06
gggcatcttgtgggccgcgtccatcgcactggtccactcgcctctcccctcccccctccattccgctccgatttaccgcctcgccggccgccgcagtaggcggcgctacggttatttcggttagggttccggcgaggccaacgcccaccccccacctccacctccacctcccccagagcgagccgccgccgcctgtggagggccagggagagatggttttcgtgtggctcaccgcgttcttcctcgtcgtggcgctcatcgtgctcgtcatctaccagctgatgtgcttggcagatctggagtttgactatatcaatccattcgattcatcctcccggataaataaagtggttattccagaattcgtattgcaagcagctctaagtgtattattcctcctatcggggcattgggcaatgttcttactttctgccccgatggtgtactataactatacgctgtaagtgctgctgtcttctatccgcctttcagtctttaaaacattttatagtgcaaaatggaccaaatgaaaagtccgggactgctgtcttctttgtcctaagttattattttgccatgactagtataaacagatgaactgaaagttagaaatggtacagtcattcatgtctattatgtgagaaccaaaacaataatttgaaaatggaaatgggtgttcaaggttgagataccttttataaagctgtttaggctgtttgttcagaaaattttagattaaaatggtcagtgaagttcttggtctccttcagaaaacaagttttgtactttacacataatatggtatatgacctacttttgcattgccctgatttctgacttttgatataccttaatactgcacacgtctggatctttattagtgtaacttactagacatccttctaatatcttactgtattttcttatctgcattcaggaagcactaagttctgatatgtgtgtcaggcatgcttgttttggaccatgattttactttatttgataactctgaatttctatgtagcttttttgtgcctcttgttgtactaagttttatagggtaagtggtcttatgatcgataatataggtgtataacttcttatatcttatatttgaacaaatgaagggataatgctggctcctgcatgcagtatctacaagaatgcctgaaaactgaaaagtagttcctacaaacatctgcaaaaccatcatatttcatagtcctatagaaagcacaatctatatacccttcctaactttgtgaatatcttttcttagccaacccttttcctctttgacgaaaaacagcaggagaggcagaggctcctactgtgctatatatattagattagataaaagaaagttatttacaaaaaaaaaaacaaagaagaagagggaatttacaaagcagatgctatgctaaattcttagacgacctgtatattgatgcttgggaccccatgtactagtatggtgagattattcagtctcgtgctgtttaatgtttgtcccagatgaattaattccttcccacccacccggacccatgttcgttgcatgttttccatgctatggtgttgcttgtggttgatgatgtagtgatgaaatcacgaaatttgactgttattggtgtgttcgtgataaaaaacaacaacatgggactgagagaactagggtggatctaatagcatacagtcagatttaaccatgtcagggagctactgagaaactaaatattgtaattttcctgtaagcatattggtgtagtatgtgacatcatggttaaagattcttgcctgattttaggttggttttgaattgaggtcttagaagttagaatcacttagaaggtaatgggtaaatatggttttagaaggcagcatattgctcaacttttgttgttaactattatttgattatccaggaatgcaaatctttaattccaaccaatcaacatatatgttatcatgttcaatatcggatgtaaacagcatgcgctattaatggaacagatgtgaacatgctggtgtcagagtatcagcactatagcgagatatggctgtatcacaaaagtgcaaatttcaagggcttgaactttgtcagtgtattgtatatttccattagaactgtagtcagatcatcccttgtcacttagttttttccttttgaagaaagaaacatgactgaaacatgagttaaggttcccagaactgtcaccattctatagagctaggtttagcagttttttttcagaaagaaacatgagtgataaacttgagctaaggttccctgaactgtcaccactctataggtctaggttttctgttgatgattttatacttgtctgctacttaaaagaaatcaaaaacagtttgtcgacttgactgggaacatttttatggtctttgcatgctgcaggtaccagcgacgacaacatcttgtagatgtaacagaaatatttaatcatcttggccgggagaagaaacgccgcctttttaagatagttggtctcattattctcctattcttgtccttgttttggatgatctggactgtattattggaggaggatgagtagaatgaaaaaaaaaacactatggtagctcatattggcgttccaagttccaaccattagttaggtattactacaacattatcctcattgcatgctgaacaccctgttgcagtcctattaatcgataccaaaattgttttcgtcaaatgcaggtcatctggagaagcaagacaagtgaaaaacattgtgccccaaaagtattgttggcttgtggagctgttttttctccgatttatagtgaagctcctattattgtcgcatgtaacatgtaaattaggagctactgggcatcagttctcgtgggggcaaagggattaacttcgtcgttgtgcgtgcgttgtcttgccttgcactgcagaacggccttgattttatgttgattttgtgtggtttgatttttgtttagc

SEQ ID NO: 17887 - DNA, 2225 bp, Oryza sativa
  ref <308>: DATABASE ACCESSION NUMBER: AK068304
  ref <309>: DATABASE ENTRY DATE: 2001-12-06
ttgggtacgagaggctatatgttgggcaccgtttgtgttcatcagcccatcactcttttctgtctatgtaggtcatggcggttgcaggtgcaatggtgatgtcaggtggcgtgctccttctcctcttggctttcacctgcgccgcctacaatgacgccggcgagctgccgccgatcagccggagaagcttccccaaggggttcatctttgggacgtcctcgtcgtcatatcagtttgagggtgccgcggcgaagggtggcagaggaccaagcatctgggacaccttcacacatcagtatccaggcatgctgactataaatggccagaaataaaaggtcattacattattttggattgacaattctctaatttggcagacaaaatcaccgacaagagcaacggggatggtgcttgcaatagctaccatctctacaaggtattggcaactagcattgactttagtactccctccattcctaaatgatcttcatatttcacctaagcagcaagaccaaggagcagttactatcccatctatccgtgcatgtcgcttcatcaattttgcatgccgcatgcaccagccaatcagctataatgcattaattccacgcatgcagcagctcccaacttaactctcacagagccaatgcatgcatgtagtgctgcttaatacgaagcaccattatcgtctacccatgatttctgctgcttcctaatgaaatacgaaggtcaaattgaaactttttacttttggtaatgcgaagatcatttaggaatggagggagtaagggttttaattaaatatacactccatgtttgccagtcttcctctgccacaatctcttaaaactttaattctcttctttaaaatgactaatttagtactcatcctgaggcctgagggcctgatcaccaaaaaaaattgcaggaagatgtgcgcattatgaaggagatgggaatggatgcatacaggttttccatctcgtggtcaagaattcttccaagtacatgactatatcttttagaaataaaatgataatacatccgtcccaaaatataagggattttgcccatataaatcccaaatattttgggatggaggtagtagatacaatgcactgtcatagatttactaacagacagcttatttaaagacattttctcttttgttctcaagcacaatattctgcatttctttttcaatctccaaggtgatcccaccagggttaaaatctccctgtcatggcagatggaagtctcagcggtggagtcaacagagaaggcatcaactactacaacaatttgatcaatgaactattatcaaaagaggtccaaccatttgctaccctattccattttgatacacctcaggcactggaagataaatataaaggatttcttagccctaatatcataactgttgcagaaatgactataaggactatgctgaaatatgcttcaaagagtttggtgaccgggtgaaacattggatcaccttcaatgagccttggaacttctgctctatgggctatgcatctggcaccatggcaccaggccggtgttcatcctgggagaagggaaaatgcagagttggagattcaggaagggaaccttacactgcatgccatcaccaactacttgctcatgcagaaactgttcggctttataaagagaaatatcagttcactgaagaagctatcaggcagtcgccgttcatccgtgataataatttaaatcgaagatctgcaaagttaagttccataatccaaaattatttattgcttggcattcaatttcagctggggcctggtggtggtggtagagttttttcagtacagacattagcggatcttccattgttatttcttataattatctataatatagtaaaactcggaaaacgaaccccatagtcaatacggataaaagaggaatcctagaattctaacaagaaaagaaaaacatttggccattaatcactatgttaagtacagaggtcaaaataggtaagagagatatttatctgtttattatgcaagaccctctagcctcaagaaaaaaacagaaatcctatagactctcacatgaaaacagaaaatcatgtcttaatctcgatgcaccctgatacaaaggtctggatctgttgattaggtcaaagatatcagatatgttattttattatgtatatactaaaatacaatcaaaggcctttagagttgatatgg

SEQ ID NO: 17888 - DNA, 1885 bp, Oryza sativa
  ref <308>: DATABASE ACCESSION NUMBER: AK068305
  ref <309>: DATABASE ENTRY DATE: 2001-12-06
tcctcctgtcttcgcctttccccatccccaaatcaaatccctagcaatcgtcctggggttcctctctcacaagagcgaggatggactgcatcgacgagatgccagacctccgatcttggaatcctgacgatgaggaggaggaggaggagaaggaggagatgcccgccgtcgtcgattactccccgcaccaccgccgccggccgtccaccttcacccgctgcggcgtcatattcgatacggacctcatcgtccgcaagcccgtggaaggcgccgccaccggtggccgggccagccaccggacgagcacggggttccccttctccgtgtcgctgaacctcgccgtgccgccggcgctctcctccatctacctgcactgcgcggaggccgtgatgccccccaccctcgagcacgggtatttcggccggtcctcgctcgtcgccgcggacgccacccacctcctccttcttgtcgtcgtccccgtcaagattcaaggcatgtacgaccacgagtacccggaggagtacttcgtctacacggcgacattggcatcttgaaccacgccgccgccgcgggtgatggtttcagcttcgccgttgcatctttgcagacgttcatggagtggcaatctggtgaaggatccgcggccatcctgcacctccaggagatggccaagctctccgtgctccaatgttcagttggcagtgatctagatgaggacaacaccaagaacaacgacagcagatgggttgtcaagaacctggccatgccttttgactcgcaaggggattttgggccgcgccaatggaagagcaacatcgccttcgcctatgccggcaaattatattgggctgactacgacgttggccttatctactgtgatgtcctggaatcttcacccaagctccagttgatcaagttccctgttccggtgagaaaatttgagcttggtgtcagtggtccagatgacaactgcgggaactctgagtccttcaggacagccggtgtttctaatgggaagatcaagttcgtcgatgttgacaattgccgcgcccaatccttcgccgtcatcatcaggacatggacactgcaaatgccacagatggtatggaagttggatgatgtgctcaatgtcaaacaactgtgggggtcagcatccttcaagaaatacggtttgcatcagtgggtgccagagtatcctgtggtgagcttgctagacccacacattgtgcactttgtgctgcacaaacatatgtaccatgatcaggtctggatgatcgcagttgacatgagggccaagtcagttaaatcatgcaagaactatccaaagggtgagaaggaggatggatacaaggggctgtcgttcaacattgatttcatatgcagcatgctctcgaagtaattacaatcaggtcgtgatggtaggaaatatgttgaatgaagcaggagcatccaccgatgttacgcctgaccgatcgtccgtccattatcaacacaagattggcctcggtttatgatgttgtggactttggcggggtgtttttggtatagacataaggttttgcatatctttgtgttaaaatggagggtcgttagtttcttgtttgtttggagatgtcttaggtttactgctgattgtgccttctgcttcgataatcatcacaaagctaaacatgttcctagttgcttcgttctccagacaacgttttagaagaaaaattgggatgttgtggccgccgatattggaactagcattgcctgtgttttgagccctgtttgtttctttttctcttctgaacatctgacattgctttgacaagattcaatagctaaagaagggcgagtgggcgaccatcaacattcagaacgatttattgaacaaattcag

SEQ ID NO: 17889 - DNA, 1612 bp, Oryza sativa
  ref <308>: DATABASE ACCESSION NUMBER: AK068306
  ref <309>: DATABASE ENTRY DATE: 2001-12-06
ttgacggaagaaggaaaaaaaaaaaaaagctcccctctttccctctcctgctgacgcgccccgtcgccgccgctcgcttgccgcgcgcggccaaagcaagcaagctcgccgccggccatccatggcggcggtggagggcggaataggagagccgcccggattagccagggaaaggcgcctacggctccggcgatctgtggcggcgaccggcgacatggacggcgacggcgacgttggcggcggcggcggcggtggtggtggtggtggtgttaggtacgtcctcgcgctcccggccatggcgtcgctggccgtcctcatcgcccacctcgacgccgccgtgcccgtgccccgtaggcctcgcagctacctcccccgcgccgtgcccatggcgtggtgggccttccggctccccgtcttccgccccccgcctccgcctccgccaccgccggccaagaatccggtcaaggaggaggagggggtggcgcgcgtggtggtggtggtggcgccgccgccgcccgtcgatcccggcgaggaggaggcgggcaagagggcggcgaagagggcgaggaggtgcctgaactgcgacgcggtggagacgccacagtggaggtcgggcccgatggggaggagcacgctctgcaacgcctgcggcgtccgcctcagggcggtcggctcgctgcctgaacaccgcgcgccggcggcgaggacgacgacggccgcccccgcgtcgccgcccgatagcccgatctggacgcccggccacaagccgccctcgtcgtcgcccgacatctacctcgtcaggaggacaccgaagctgccggtgacgcggcctccccgtaccaagcaagctccgcccacagcgcccgcgcccgcgcctccgccgccgccgccgcagccggcgtcgccgaagacgaagacgaaggcgaaggcgaagaagccgaagaggaagagaagctgcgtgcactgcggctcgacggagacgccgcagtggcgggaggggccgacggggcgcggcacgctgtgcaacgcgtgcggcgtgcggtacaggcaagggaggctgctgccggagtaccgccccaaggggagccccaccttctcgccgtccgtgcacgccgccaaccaccgccaggtgctcgagctccgccgccagcagcggcagagcaccaacccctccactccaccgccgccgccggtgtccgccgccgagccaatccccgacgagcaaaaagaagaggtggtaagcgtgccagtcgccgccgccgcgcccgccaccgacggcggcgcggcgagctcgctggacgcgctgctgctcgacgggccgtcggcgccgctcatcgtggacggcgacgatttcttggttagttaggtagccagaaaaaaaaaaagaggaataatttcagctgagaatgagatgaggaataccaatttttcgtttgatttttcaggaaaaacagttttaccacctgacattgtgaatactcgtcgatcctggggaaaatctttgcgtgaaatttagctagttttgctgcccagatgaactagttctggtgcttggtagctgatgaagttgaaaccggttttaatggatcaagggggatggatgttcaatgcc

SEQ ID NO: 17890 - DNA, 2237 bp, Oryza sativa
  ref <308>: DATABASE ACCESSION NUMBER: AK068307
  ref <309>: DATABASE ENTRY DATE: 2001-12-06
ggcttcttcacatgaagctcgtcagcatctacctcctagtgctctgcgtggtcggagccaacgagcttctcgtcgtcgcagccagcggcaacgacggcggcggcggccggttcgtctactccggcttcgccggcgccaacctcaccctcgacggcacggccacggtcacgccagccggactcatcgagctgaccaacggcacgctccagctcaaaggccacgcgttccacccgacgccgctccgcttcggcttcggctccggcggcggcggcggtggcgatggggtggtggtgaggtccttctccgcctcgttcgtgttcggcatcctctccgcctacccggacatgagcgcccacggcatcgtcttcctcgtgtcacccaccaccgacttctccgccgcgctggccagccagtacctcggcctcgtcaacgtcaccagcaacggcgacgcccgcaaccgcatcttcgccgtcgagctcgacaccctgcagcaggacgagttccgcgacatcaacgacaaccacgtcggcgtcgacatcaacggcctcgtctccctccagtccaccagcgccggctactacgccgccgacatcaacggcggcggcttcaggaacctgacgctgataagccacgaggcgatgcgggtgtgggtcgactacgacgccggcgacgcccggatcgacgtcaccctggctccgctcgccgtcgccaagcccgtcaggccgctgatctccgccgcctacaacctgtcgtcggtgatcaccgacacggcgtacgtcggcttctcgtcggcgacgggctcgttcaactcacgacactacgttcttggctggagcttcgctgtggacggcggccccgctccggcgatcgacgtcgccaagctgcccaagctgccacgggagggccccaaggctcggtccaagttccttgagatcttcctcccaatagcatctgcggccgtcgtcctcgccatgggcattttggtcattctacttgtgcgtaggcggaagcggtacactgagctacgcgaagattgggaggttgagtttgggccgcatcggttcccctacaaggatctgcaccacgcaacacaaggattcgagagtaagtgcctgctcggcgtaggagggttcggaagagtgtacaagggcgtgcttccgaattctaacgtggagattgctgtcaagagggtgtcacatgactcgagccagggcgtgaaggaattcgtcgcggaggttgtcagcctaggccgtctccagcactgcaatctcgtgaggttacttggctactgcagacggaagggtgagcttatgttagtatacgagtatatgtcgaatgggagcctcgataaatatctgcatggccaagacaacaagccaactctaagttgggctcagaggtttcagatcatcaaagacatcgcatcgggtttgctctaccttcacgaggagtgcgacaaagtagtcatccatcgagacatcaaggcaagtaacgtgctcctcgacaacgagatgaacgcacggctaggtgatttcggtctcgccagattgtacgaccacggcgaagacccacagagcacgcatgtcgtcggcacaataggatacctggctccagagctgggacgaaccagcaaggcgactccacttaccgacgtattcgccttcgggaccttcatcctcgaggtcacatgtggacgaagacctatctaccatgactcccatggcacccaggttatgctggttgactgggtgttggatcattggcacaaacaatctcttgttgacacggttgatctgaagctccatggtgagttcgacgttggcgaggcttgcctggtgctcaagttggggctcttgtgctcacacccgttcatcaacgcgagaccagatatgcgacgagtgatgcagtatctgaagagagaggtggctctgcctgagctgatgccaaccagcatgagctttcacatgcttgcactgatgcagaacgacgggttcgactcgtatgttcagtcatatccttcttcaaattcaaagggaaacatcagcacagctacctctagcctcttggaagaaggataagagaaccatgcctgtttccatttggttaattaaatctttattatgttaaaaaaatgcaattgggattacaagttctaacgactagttaataattaggctgattgtgtatatgtaattttgtgatagaaaagtattttggatcctctcagttagatttgc

SEQ ID NO: 17891 - DNA, 950 bp, Oryza sativa
  ref <308>: DATABASE ACCESSION NUMBER: AK068308
  ref <309>: DATABASE ENTRY DATE: 2001-12-06
gtaagcaaagcatctcgcgccctagccaagccagccatggcgccgtcgtcgaggaaagagagggcggcggaggcgagggcgagcacctccaagccgtctcctgcgccggccccggcgccggcggtccaggtgcagcggcggccggtgggcgggggccggtggacgagccgccggatatcgttctacgcctcccgcgccttcttcctcctcatcatcctccagatcccgctcttcagggtcccttgtagagcaggcacatgcacaacgcccattcaagttacatcttcgcagttggtctcaaatgagatattcccaccatctgttgtgaaagcccttctcttccctggggctatagcaagcaaccttactaagagcatgacatttcctaggtggaatgacctgtttgatatttacaatttgacagatgccaagaccgcttcagcagtaattgatctccagcgtctagagattcttgctggaagctacttctgtgctgctggagcacttgttggtgtcataaaccctgggaggatgaccttgtttggtacccttttggttatctggggtctagtgaaagaagcgctctttgggaaaccggtgaacagtgatccaacacaatcagttcatgtttatccgaccattttaattgcactgatttgtgcattcttgtcaataacttacaatgtaaagaagacagtaagaaatagtcagtctgtttcaatcactaagcctctgcaaagttctgccaagtcgaaactgaagtagacacttcattgtctatttgccccttcatccttgtagttcatttccacaaatttattgttgaagactggcccaaaggataacactactgtggttcttgtgtaccactttgaatactgtaaccttcagttttcacctttgtatcaaagacttatatctataacttttattgcaagcatattcacttt

SEQ ID NO: 17892 - DNA, 2223 bp, Oryza sativa
  ref <308>: DATABASE ACCESSION NUMBER: AK068309
  ref <309>: DATABASE ENTRY DATE: 2001-12-06
gactccggccccacgcgacagagcaacggcgggagcgaagtgatggcgcttcgggcggcggagctccggcgactcgtcgtcctcctccgcggcgaggcggcccttccgctccccctcgcgtggcgcggccggccggtgagcaccgccgctcgcgacgacgagctcgccgggaagagcgcctatgaggtgctcggggtcggggagaccagctcctccgccgagatcaaggcctccttccaccgcctcgccaaggagacccaccccgacgtcgccgccgccgccgggtccagccgcttccttcagatcctcgctgcctacgagatcctatcggattcacagagaagggctcactatgatatctacctgcgatcgcagaagcgagttttgcagaagcatcctaggccatctcatcatgtatatccaaatccaagtggttcaggcattgtagtaacaagagaaagtaatgttgttgagtggctaaaatggtataggctcactattgatgacatagttacaaagaagagggttgcgacagggtcaggttactttgataagcttgaaagtgaactgtacacagcaatccatgctgcatactatggtccggatgttcggtctgtggatctccttcctgattgctttgaagctgaggagaggtctgtatatgagacccctgagctattgcaccttgtatcgggtcgtgatctgtttggtattgttagtctagctgatagagttcaacagctgccagatgcttttcaggagaagcagacgctacctggttttaaaacttacgggattagtcagcatgtttcaacaaacttggagaaaggcacagtacacgccagtcctgtatatattcacaagagagagattgacaagaatgatggtcctcattcagatgcctacaaggatattgaattgtggatctgtgggaaattagtagctactgcaacgaggagccctaagtgcaattgtattgataaatcagatgtggaagatcacatacatgtatttcttgtcccaaatgaagtggcttcatctgattttacacaagagcttcctatcctgggaactattactggcttggccaccactggggaggaaggatcttgctgtgtctatgatagccgtgggataaagacacatctaattgtcaagcacagaacattaatggtcaaacacatgcactggtatcaagttggagatgaaatttctccatgtgagtgtcgatgcagtagggctcggttgccacctagtagatattggctttttgagcctcgttgttatatgcatgacactggtggctggtacattgagacctttggaagggacaagaaagggaggaaaattctatcaccaagacaatgggatggttccaatgaacactctgaaaggaggttgcatccagcaatgtatctggcagctctagcttacagatctttggatattgaggatgctcaacgaaagaaatggagcattacgaccttcctggaactgcagtcatctcatatctgtcaattgtgcaaaaaaatcttcaatgggggaaaggaaagttcatgagaacaccatgagaaatgcacagcagtttcaagaatttgatctttgacaactctgatactatgatgccatgccttgttcacccgttgatcatatccttgagattttggtgtggctatgtagcatcatggcactgcactggaagatatatagtgcacctctagaataagcaaaattatctgaggctgttcattgtgctgattgttggatgtggcacccctggtcaatagcttttttgctgtgctgatgtcagaatttccacaccatttgctatgaaaggacagacattatggcttcagccatggccagttaacttgaagtctgtcttatgaccaacgggtgggaatatgggagaaagttaataattacttggcttctcgactggagtttaatctacttggcatattgattttatattaggcgagcaccctctaaatttggtgaaggtgagagatgaagcagccaccgagcttagcgtgaacattctaagaaaaggggaaagcactatgaaaaagcaccagcaagcagcaacagctctgcatggagagggatattgtattttcttagcctcttaggtgtcgactgagttgcgcatgctattgtgggcaagttgtttatgtttgagacaatgaattttgcttctatagttccacctgatggaagact

SEQ ID NO: 17893 - DNA, 3061 bp, Oryza sativa
  ref <308>: DATABASE ACCESSION NUMBER: AK068310
  ref <309>: DATABASE ENTRY DATE: 2001-12-06
gatggagaactaccgaatgaagtagatagagtagttcataccgctctcgttcgttcgcggctccttcctgctgcctgcctgcctgcctgcctgctgcgtttcgatcgatatcctctgcatgcaattctgaccgggtcgtcatcgtcgcgaatgatgctgctaggttccccttcgtccggcggctacggcggaaaattcgccggagcttcaccggccggtgggacgacgaccatggcgccgtcagcaaagcagccgagcagcagagctcctcctcctgggatcactggagggcgcaatgacctgcgaattctttcgccagcagcagcagcagcagctgttggaggtcttgagatgaagaagccggaagcagaggggattgcagagagcctgcaagcgacgcacaggaaagaactcgaggcaagtataaggaagcagctccaaggagtggaattatcaccatccccatatgacactgcatgggtagctatggtgccactccggggttcgtctcacaatccaagcttccctcaatgcgtcgactggatactagagaatcaatgggacgatggatcatggagtattgacgggtccatatccacagccaacaaagatgtcctatcatctacgctagcatgtgttctggcactcaacaaatggaatgttggtagggagcacatcaggagaggactaagtttcattggaagaaatttctcgattgcgatggatgatcaagcagttgctcctataggtttcggcatcactttcccagctatgctaacccttgccaatgggtccggcttggaagtccccgtcagacaaaacgatattgatagtcttaatcaccttcgggagatgaaaatacaaagagaggccgggaaccattctcgtggaagaaaggcctatatggcctatctggcagaaggatttgggaaccttctggagtgggatgaaatcatgatgttccagaggaagaacgggtcattgttcaactgtccttcttcaactgctggcgcattagccaattaccacgacgataaagctctccaatacttgcaatctctagtcaataaatttgacggtgtagtgccaacactgtatccactaaacatatattgtcagctttcaatggtggatgcgcttgaaaacatgggaatatctcagtattttgccagtgaaataaagagcatccttgacatgacatacagttcctggttagggaaagatgaggaaatcatgttagacgtaacaacgtgcgcaatggcatttcgccttttaagaatgaacggttacgatgtttcctcagatgagctatctcatgttgctggagcttcaggcttccgtgattcgcttcaagggtatctaaacgatagaaaatctgtactggaagtatacaagacctcgaaacacagtatatcagaaaatgatttgatcttagatagcataggctcttggtcaggcagcctattgaaggaaatgctgtgctctaatgggaaaggaactccaggccgtgaagagatcgagtttgctctgaagtatcccttctacagcacattggaacgtctagtccacaggaagaacattgtgcttttcgacgctaagggctcccagatgctgaaaacagagtgcatgcctgttcatgacagtcaagattttctagctttggctgtcgatgatttctgcatctctcaatctaattaccagaatgaactgaattatctcgaaagttgggtgaaagacaacagactcgaccagctacatttcgcacggcagaagataacatattgctatctctctggtgctgccaccacattccgtcctgaaatgggctacgctcgcacctcgtgggcaagaaccgcttggttgacggctgttatcgacgatctcttcgatgttggtggattagaacaagaacaagaaaacctcctagcattaatggagaagtgggaagagcctggtgaagatgagtactactctgaagatgtaaagatcgtgttccaggctctttataatacggtgaacgagattggcgcaaaggcttccgcgttacaaggccatgatgttaccaagtacctagtagacgtatggctacatgtggtgaggtgtatgaaggttgaggcagaatggcagaggagccagcatctgccaacgttcgaagaatacatggaaagtggcatggtgtcacttggacagggctgtacggtgatgtcggcattgtttctgatcggagaaaagctcccggagggtattgtcgaacttgaagaatacgatgagttgttcaggctgatgggcacttgcggccgtctcctgaatgacattcgaggcattgagagggaggagtcggacggcaaaatgacgaacggcgtctcgctgctcgttcacgctagcggcggctccatgtccgtagacgaggccaaaaccgaagtgatgaagcgcatcgacgcctaacggaggaagctgctgagcttggtcgtcagcgaacaggaaggccctatcccgaggccgtgcaagcagctgttctggaagatgtgcaagattcttcacctgttctactaccagaccgacggattcagttctcccaaagagatggtcagcgcagtggatgcagtcatcaacgagccacttcaactcagattattgtagattcatctctgtcactttttcttttttttttttggatactaaagtactaccagtgttgcatgtaaaagctgaggtaatcagaatgtggatgacttagttgggattacacagtttgatcgatggccgcactaatctggttcataattttcaccggtttgtggacagagtggaaccatatataagagagtagaggatggtcgtcgtccatactcaaatttgttaggatttgcgtcatgtatgttatatgaaagagcaaataaatacataggttaggtatgtgtaataaacagagatacgatgtaagtatccagagctggtggctaccagaacaacataatcgtacatctttggggtatgttgtcacgacctagcacaggatgtaaattgtacactccatcccaagaaaaaacctacttctgag

SEQ ID NO: 17894 - DNA, 1847 bp, Oryza sativa
  ref <308>: DATABASE ACCESSION NUMBER: AK068311
  ref <309>: DATABASE ENTRY DATE: 2001-12-06
gacaccctccgcttctccactcctccctcgccgccctctcggccgcgccgccgtcctcccgccgccgcagggccttcttccatcactcctgccgcccgctcccttcgtcggcggcggcggcggccaaggcgttgcgcgcgtcggctgcccccgccgtcgacgaggaggcccccgcatccccgcctccatcagatcttggcaagggagtggagaacttggtgatcataggctctggcccggcggggtacactgccgcgatttacgccgctcgggcgaacctcaagcccgtcgtgttcgaaggctaccaggttggtggcgttcctggtgagcagctgatgaccaccaccgaggtggagaatttccctgggtttccggatggcgtcactgggcctgatctcatggacaaaatgcggaagcaagcggagcggtggggtgctgagcttcaccaggaggatgttgagtttgtgaatgtgaagagcagaccgtttgttattcgtagcagtgatcgtgaggtgaaatgccatagtgtaatcattgctactggtgctgctgctaagcgccttcgattacctcgtgaagatgaattttggagtagaggtatcagtgcatgtgcaatatgtgatggagcatccccactatttaagggtcaagttcttgcagttgttggaggtggtgatacagctacagaggaagctatatatttgaccaaatatgcacgtcacgttcatttacttgttcgaaaggatcagctacgagcatccaaagctatgcaggaccggttgattatggcgaatgtttcagagtactcaacaatcccaacataacagtacatttcaatacagaagctgtggatgttgtcagcaatcccaaaggccagatgtctggtattcaactgaagagaaccgacacgggagaggaatcagttcttgaggtgaaaggtctattctatggcataggacacactccaaacagtcagttgttacaaggtcaaattgatcttgacgatgctggttatattttggttgaagaaggcacagcaaaaacatcagttgatggtgtatttgctgctggtgatgtgcaggatcatgaatggaggcaagccgttactgcagctggatccggatgtgtagccgctttgtcggtggaaagatacttagttgccaacgaccttcttgttgaatttcaccagcctgttcgcgaagaaaaggagaaggagattacagatagagatgtcgagatgggctttgacatttctcacacaaagcataggggacagtatgcactccgcaaagtatatcatgaaagtccaaggcttgtctgtgttctatatacttctccaacatgtggtccttgcagaaccttaaagccaattctaagcaaggttatagatgagtacaacgaacacgttcattttgtcgaaattgacatcgaggaggatcctgaaatagcagaagctgcaggcatcatgggaacaccatgtgttcaattttttaaaaataaagaaatgctcaggactgtctctggtgttaaaatgaagaaggaatatagggagtttatcgagtcaaacaaatgagctgaacccaacatacgattcaaattttaaagtgtaatagtcttcttttgcccatactgactatttctagctgccacggtggtggccaatttttggtcaaaaattttcagatgggccgggtgtagtgcggttcaagaggaaattagccggtcgctcctattgaattcaatcaatgtaacagaatatattcttttgctgtacaacaacgtattggtcgttgtcttgacaccgtgcaaactcctccctgacaatatatacgtcttaaagattttgg

SEQ ID NO: 17895 - DNA, 1657 bp, Oryza sativa
  ref <308>: DATABASE ACCESSION NUMBER: AK068312
  ref <309>: DATABASE ENTRY DATE: 2001-12-06
aacccaaacgacggagacccactactccgagccatcaagaacacacacacatccagaaagcctaatccaatccaaaagccctaatcacccagactccatctctgtgaggtttgagagaggtaggtgagccgtagatctgagcgagttcttgggtcttccagcaggtagatcacttcatctgaggatcaatcttttttttttcctttgtttttgagcttctgttggtgtacaggacagagagttccagagccttttagtttctggtgttctgatctgttcttggtgtaagattattggtctgatttggtagccaagagggttaattttttccacacctccttgtgctagttagcttagcttataccccccttgtaaagtgattagtagatctagaacttctcttttcgtctgccagttcttggattttggaaagaacaggtggtttgttattcagatttttaggttagaaaaaatccacaaaaaaaaagatattcgatggcagctgctatagaaggaaatctgatgcgggcgctgggagaggctccgtcgccgcagatgcagaagatcgcgccgccgccgtttcatcccggcttgccgccggcgccggcgaacttctcctcggccggagtccacgggttccactacatgggcccggcccagctcagcccggcccagatccagcgcgtccaggcccaactccacatgcagcggcaggcccagtcggggctcggcccgcgggcccagcccatgaagcccgcttcggcggctgctccggcggcggcggcggcgcgggcgcagaagctgtaccgcggcgtgcggcagcggcactggggcaagtgggtggcggagatccggctgccgcgcaaccgcaccaggctctggctcggcaccttcgacaccgccgaggaggcggcgctcacctacgaccaggccgcgtaccgcctccgcggcgacgcggcgcggctcaacttcccggacaacgccgcgtcgcggggcccgctcgacgccgccgtggacgccaagctccaggccatctgcgacaccatcgccgcgtccaagaacgcctcgtccaggtccaggggcggcgccggcagggccatgcccatcaacgcgcccctggtcgccgcggcgtcgtcgtcctccggctccgaccactccggcggcggcgacgacggcggctcggagacgtcgtcgtcgtctgcggcggcgtcgccgctggcggagatggagcagctggacttcagcgaggtgccgtgggacgaggcggaggggttcgcgctcaccaagtacccgtcgtacgagatcgactgggactcgctgctcaacaacaataactagctcttctcttccatagcccgccattgccggccggcgcagatgaggttttaggcattctgcgcggcggcgaggcgatggattatatgttcgttcttgtgtagatccttttctttttgtgttggttttttaggttccggaggctgctcgccggcgtcgtttttgtgtccggcgtctccgatgtctagtaagcagtgactcgttagtgtagtagttgtacaactctacaaatgtacaaatacttgtgcatgtaggttgttgtaatcaattgttggtaactacctgtaatagaactactgtgaattaactgtattaatgtgcg

SEQ ID NO: 17896 - DNA, 3482 bp, Oryza sativa
  ref <308>: DATABASE ACCESSION NUMBER: AK068313
  ref <309>: DATABASE ENTRY DATE: 2001-12-06
ggcgtgactcatcatccttcgggcgcgccgtcgtcgccgccgcggcggcggtgaggaagaagtccccgtcgcccccgccggcgacgagctagtccttgtggaggcagcgccgaaagcgtgaaggccgggagcggattgaagccgctgctgtcggcgaagagccggaggatgggggcgccagccgggtggagggcggggaagcggcggcggaactccgggctggaggagaccaccacgcggacgcggcgccacggaggggaggggaggggaggggaggcggagaaagatctcctcgatgtgctcgtcaccgagggcatcgatggtggtgttgctcggttcctttccttctccggcggcggctcgctgcgactgtccatggcggtggtggggaatggggattgccggattagggaactagggtttgatccaactcctcgacaatggctttattagtcgatcaccaacaaacaggccaaacaaggcaaatcctccaatattcatgcttgcatcggccatcaggacaattctttgcaaggggataaccacaaagacctgggttgccgatgtacatcaaagatggatcatctgcattgagtgtgtccagttgatgtccccgaggaatccttcccgataaattgttgtaagacaagttcagatagctcaagaatgtcaaatttgataggcttgaagggatttctccagaaaattgattatatgataggtcaagggaggttaattggtgcagctcaccaatctgatccggaatgtttcctgctaactggttccaggacagattcaaatttaccaattcgacaagagaaccaatctcctttggaatatggccagacaatttgttgctagaaaaatcaaggcccaccaagtacacaagtcccttgctgtattcaagttgttgaccttgcagaacacatgatatgctataatggaacaggccgaatacatcgaaagctccgaatccgttttccagtgcctctccaaataggaaccatgtttctaaattttctggttcgttgatcattcctttcaagcacggaagggattgtgggatagtaccagaaaaactattattagctatatccaaataccgcagatgatcaagtttggtaaaaccacctgggatatgaccagagaacttattagacctgatagcagaattactatggatggcaacttttcacctatccactccggcaactttccagaatatttgttccatgctagatcaagaatggtgatgctttggcacgattgcaatagcatagggaactctccagaaagctgatttttgcttagtaaaaggatatgaatgttcagacttgtggaatgtataaaactaccaccagtcgatggtttcagttctgtcggcaaacagtgaggaagttctcctaccagaaaattgtctgctaaatccaaggcacccaaattgtgcatcttgcaaagggactgtggaatgctgccattgatatggttggaaaagagaatgagtttaccaagatttgcgccaccaaaatgaaatggcagcggaccagacaataagtttctggaaatgtccaaataatagagattttcctgtaacgatggcaggcgaccagtcagctggttcgaagctagaatgagcttttcagttgacataccttgaaaactgtctggtaacttccctctgatctgattatgagatatatttacgtttgcaacgtcagaaactaaattccagaaccaattaggaagctcatcttttatgcctgaacttgaaacatcaattgagtaacaattattcaacgatttgatccacacaggaaattctggacccagttggcaagatgcaaaataaacatcgaacaatccaaagggagggctccaactttcgtccagcactacctttaaaggattataagacataatgattctctccaaactctcaaggcctgaaagatgctggtttgagatcacaccactgatattattgttatgtagaattagagttgtcaaattagccatttctctgattagcaagggcaaatgaccactgaatttgttccaagataggtaaaggcttgttaagctagtttggctccccagccaatccaggtttccagtaatgtcattataagacaaatcaagctcctccaatttattccaagtacagcttggaagcttatccatcagatctttgatttccacgccgatcaaattctcattgaggtataggaccctcagattgcaagtgttgtttaatgttgatggcagcgtcccttcgaagctattacttccatggtagctatcacctccaaggttaaggccttccaacaaagttaagttgcctaatccatcaggaaatgaaccagacaactggcatgaggccaggttaagcatcttaaccgtcttcatgctccacacccagttgggaattaccgtgccaaacaaagtgttctcagagaggtcaagtgtttcaaggcttgtcagattggtgagtcctgttgatgatgaactcatgatccaacaccctgtaaggcgtagaacctcaagacgggaaagcatattcactggacggacccaatcaaccactgagcttagattcacataactcatatcaagatacttcaatgaaggaaggcgtgccaaccatgagatgtcagctgtgtgcataggaggatggtcataaatttcagatgttatgtcaagaaactgcaaattagacagattaccaagctgatgaggtactctgccgtaaaaacccatacgtgctaggttgagatgggtcaaactttgaaaggagcccaagaactctggcatactttctccaaggacgttcccactaagatctaggcgtttcagttgtcgtagacttaccaaagacgaacttatgtacccatacagcggaaatcaacatgggcgcacttgtaataatgcggatcatcataatataagtaagtgttgctgaggttgaggatgataacatgccccgtcctgttgctacacctcacaccgctccactggcagcaattctcacctagccatgagctgaggcgtttcttggggtctcttgtgatgccagccttgaacgagagcagggcatccctctcggctgcaatgcagccattggtggatgccggagctttgggagatgcagctgcggtggtgatggcgtctcggaagaggactagcaaaaggtaagtgaatgcagctacaatcgaggacgatcgtggatgaactggagttctagccattctagccattgtgtgttagtgatagtccacgctacgcaatgcaatgcaaccctcgttgagaactagtgcagtatatgtttggaagagattcctcgaacatgtcagtattacagactgcaatatgtgtcaatatcaactttagctactctgaatctccctctgttgcacgtcaaagaaaatttttaaggctgtcactgttttattttgataatggaagagtaaactccagggtatgcc

SEQ ID NO: 17897 - DNA, 1436 bp, Oryza sativa
  ref <308>: DATABASE ACCESSION NUMBER: AK068314
  ref <309>: DATABASE ENTRY DATE: 2001-12-06
ggcgggcagcagcagcagcaaagtcagcggcaaccagcaaccgcttctgtaggagaggcagcgccgcgggcagccggccggagatggccggcgccggcgccggcgagagcctggacctccccgtggtggacctagcgtcctccgacctcgccgccgccgccaaatccgtccgaaaggcttgcgtggagtacggattcttctacgtggtcaaccatggagccgagggattggcggagaaggtgttcggggagagcagcaagtttttcgagcagccgctgggggagaagatggcgctgctgaggaacagaaactacctggggtacaccccgcttggcgccgataagctcgacgcctcgtccaaattcaaaggagatctcaatgaaaattactgtatcggacctatcagaaaagaaggttatcagaatgatgctaaccaatggccttctgaagagaatttcccatgttggaaggagacaatgaagctataccatgaaactgcacttgctactggtaaaaggatactctctctaattgctctgagtttgaatctcgacgttgaattctttgactgcccagtggcctttcttcggttattgcactacccaggtgaagctaacgagtccgatgatggcaattatggtgcatcagctcactcagactatggagtactaacacttgtagcaacagatggcactcctgggctgcagatatgcagggagaaggataggtgcccccagctttgggaagacgttcatcacattgaaggggccctgattgttaatatcggcgatttgctacaaaggtggactaattgtgttttcaggtctacactgcatcgcgttgttgcagttggtaaagagcgatactctgtggctttctttcttcacacaaaccctgatttagtggttcaatgcttggaaagctgctgcagtgaggcatgcccaccgaggttcccacctataaggagcggcgactatttggaagaccgattgagggctagatacaaataatcctacgttggctgcgtacatccatgttggatgtaaaggccaggttttaatccattttctgaaaaacacaaataatcctacgtttttaaatgtgtaaagcttaagattagtgaacttcagtgagcagctattccgttgagatggacggaaacatcttgatcttatatgtagcccatctgctgttgctgatttctcgcgtgtgttaatactagctttacttatgagcaatcatgtcagcatctggtgaaatttgtaaccgccttcgagtgtcaacatatatttttgctcttcactgttttcaggaagactggacataacctccactgtattttctgttgccaaaacattggtatagagttttttgtataaagattcttatgatgctttcacgattaaggaagacacaaataaagtaactttgctccc

SEQ ID NO: 17898 - DNA, 2365 bp, Oryza sativa
  ref <308>: DATABASE ACCESSION NUMBER: AK068315
  ref <309>: DATABASE ENTRY DATE: 2001-12-06
gtggggagatctttgaccagcacccccgtcttctcctaccttcctcctcccctcctccgcggcctcgtcgttggctttaccactggcggattcccacacgccccccagccgccgccacggctgaccccgtctccccaccgaatccaccccacctcccaatttaaccccctcctcctcctcctcccccctctcgcctccttctcctccctcccccaacgcgtcacgccgccatttcttggcctcccactcgccgcagatctttgattcgcggggggttcttgcgtcgcgcggatcttggctgaagcgagatgggcaactgctgcgtgacgccggagggcagcggccgcgggaggaagaaacagcagcaggagcagaagcagaagcagaaggagccgaagcagcagcagcagcagcagaagaaggggaagaagccgaacccgttctcgatcgagtacaaccggtcgtcggcgccgtcggggcacaggctggtggtgctgcgcgagccgacggggcgggacatcgccgcgcggtacgagctgggcggggagctcgggcgcggcgagttcggggtcacctacctctgcacggagcgggagacgggggacgcctacgcgtgcaagtccatctccaagaagaagctccgcaccgccgtggacatcgaggacgtgcgccgggaggtggacatcatgcgccacctccccaagcaccccaacatcgtcacgctccgggacacctacgaggacgacaatgccgtccacctcgtcatggagctctgcgagggcggggagctcttcgaccggatcgtcgcccggggccactacaccgagcgcgccgccgcgctggtcacccgcaccatcgtcgaggtcgtgcagatgtgccataagcatggagtgatgcaccgggacctcaaaccagagaatttcttgtttgcaaacaagaaggaaactgcagctctgaaggcaattgattttggcctgtctgtttttttcaccccaggtgaacggttcactgagattgtcggaagcccttattacatggctcctgaggtgctaaagagaaattatggccctgaggttgatgtttggagtgcaggagtgatcctttgcattcttctttgtggagtccctccattttgggcagaaactgaacagggtgttgctcaggcaattatccgttctgtcattgacttcaagagagacccatggccaagggtctcagataatgcaaaggatcttgtcaagggaatgctcaatccagaccctaggcggcggctaaatgctcaacaagtgcttgatcatccttggttacagaacattaagaaggctccaaatgtaaatttaggcgaaactgttaaggccagacttcaacaattctctgtgatgaacaagttcaagaagcatgcacttagggtcatagctgagcatctttcagtagaagaggttgctggtataaaggacatgtttgagaagatggatctcaacaaagataatatgattaattttgatgagctgaagcttggcctgcataaacttgggcaccaaatggctgatgcagatgtccaaatactaatggatgctgcggatgtcgatggaaatggatctttagactacggggagtttgttgctctatctgttcacctgagaaagattggcaacgatgagcatctgcacaaggcatttgcatactttgatcggaaccagagtggatatattgaaatcgatgagctccgtgaatcattggctgatgacctgggagcaaatcatgaagaggttatcaatgccatcatccgtgatgtagacactgataaggatggcaagataagctatgatgagtttgcggcaatgatgaaggccggaacagattggaggaaagcctcaagacaatattcaagagaacggttcactagcctcagcctaaaacttcagaaagatggatcattgcagttaacaactacccaatagatagatgacggaataggcaagttgtgaattccccagatgaaaaccttgtgtagctttcctggttctttgttgacgactattttcttccgttctcatttctcgagatttccactgctctatttttcattttggtgccccgtatgaagcattaggtgattgttggaaggtttgtttgtttgtttgtatttagattatattgatccatgccccacgggtggccaaacatttggcgaaatgtactgtacaagagaaaggaaaaggaagtaggtggtttttgtgcattcctaaccttgttctgttttattactcctttttcctaagaatgcttggtttatactctgaaactgaaagtcagagactgaacttacaacacacgcaatggatggtccaaaatctgttggctc

SEQ ID NO: 17899 - DNA, 1022 bp, Oryza sativa
  ref <308>: DATABASE ACCESSION NUMBER: AK068316
  ref <309>: DATABASE ENTRY DATE: 2001-12-06
gtcctcccccccgctagttcccaaccagcagctgcggcggcgcgagcacacgaagaggaggcggagcagccggagccacctccgccgccgccgccaccatgggtatctcgcgtgactccatgcacaagcgccgggccaccggtgggaagcagaaagcgtggaggaagaagcgaaagtatgagcttggtcgccagccggcaaacaccaagttgtcgagcaacaagacagtgaggagggtccgtgttcgtggaggaaatctgaagtggagggctcttcgcctggatactggtaactattcttggggaagtgaggctgtcactcgcaagacccgtatccttgatgtggtctacaatgcgtcaaacaatgagcttgtgaggacccagacccttgtgaagagtgccattgtgcaagttgatgctgccccattcaagcagtggtatctcactcactatggtgtcgatatcggtaggaagaagaaagctcctgctgctaagaaggatgctgctgagggacaagagggtgaggctgccacggaggaagcaaaaaagagcaaccatgttgtgaggaagcttgaaaagcgtcagcaaactcgcactctggactcgcacattgaagagcaatttggcagcggaaggctcttggcctgcatctcctcccggcctgggcaatgtggcagagctgatgggtacatcctggagggcaaagagcttgagttctacatgaagaagctccagaggaagaagggcaagggtgctgcagcttagagcgttctctcgagtgtgttttacgctggaaggcccgcctattttattcagtggattttgttagtcatgtttgcgtctatgtcgtgcctacagaccctactgaacaccaattttctgaaagaatgatgaatcaactcttagcttggaagaactgattgtgagaattttcacatgctatggttgtattctcgtggtatttaggttccatgtgtactcagctacagcattctgttatgttttatgcccttccaaggtttt

SEQ ID NO: 17900 - DNA, 2188 bp, Oryza sativa
  ref <308>: DATABASE ACCESSION NUMBER: AK068317
  ref <309>: DATABASE ENTRY DATE: 2001-12-06
gaattggggagcggttccggtagggccggtggcctccccgtcggcgatcgccgctcgcgtcgccgccgacgacaccaggagctccgcctgcccgccgcgcgcaggaggaggcgaggttggaaggcggtcactctggcgtggtacgtactgagctcgtctggtctttctcgtgcctccggctccgcttcgttcgtcaactagggtttccatgttcatcgcttcgacgcttcctgtaacttcagtgtgggcttctctttgttagacgtttcactgcaatggagtacagagaggtcaggaggagcatttgatgaatcaagtaaaggtgtacagaaaaataagcctactggttcggaacttttcatctctatttccattaagaggtcaggaggaggctgggtggtgaggttgtacaattttctttatctttttttttcccatttcaatcgcacgctaataattatttgggtttaaatcatatattccagtcactatcaactaattagaattaaaaacaattctagtgctacatttctaatctgggcatgttttgatggtatagaaccgaaatgtccgtcgtctttaatcaatgccgtttagatcattgggaacaattgagctggtgaagcagggaattaaccattatgggggttagaattgctatagtacctagactatgtgaaaatcgctgatagagcaatctttcatttgttttagctaagaatatgagattgacaatgcaaaagctaaataagtttactggggtaaacatggccagtattgtgatttaaagaattatcagtaggaaacatggtgatagtaacatgtatgctagttactactattcatttacacttgaagttggttttccttcataactttttgcaaggtttgattggttttaatttatgtgcttgcccacccaaattcaaggtaaaccatcagtttcaatgattatatgggcaccagtccttgccacagtccaaatctccttgcttacctcggtccatgcttagtcatcttgtctgttcatctcatcatgttttcctgatgaccatgtgacatgtcacacaaatgtacagaattcaatagaagtcagtttttgagtactcatatccgtggtctgtcagtgaattgtgaaaaggtaaatatgtccatgtttcttagctccggtttgctccattcaattaatttctccaggccttatgtcttctcagaggcatacattgcatacagatatgtattgaaaacattcctttgcctgcattcacagtcacatttacatgggtgcagacaaagtgtgggaatttggatgcgaagcaaccatgtttattgtgcgatcagcgttcggcaggtcagtctgataatgcagcgtatctgtaccaccgctgtgtgcatgtggatggccgctctgaggcgtgacatgtcgtagtcacctatgcaggtggatcctgctgcagtttacatcggcatgtagcaatttggttcgatgatactgctctgatgtccttgacgaggagggaaataagggtattctttatgaccgttttgtctgtaattgcaccagtaaagaatggagaactctatatctgaacattttgggctttagttttacctcttctgaaacttctgatgacaatttcttctgcattttttcatgttccagaacaagttaagaaagcaagcagttgtgccaaacaagggagtacaaagcagttgggtcataaaaattcaggacaggatctgttcctctgtgcgtgcactctgaaacatatgccatcatagtgttcataaccactggcccattcaagggatgagcttatttaagagagccacagaagaacttctgaaatgaccagggaaaagatgcaaaagccgtgatattgtggtagtagtacacaaagacattccttcgtcattgatctccaacgggagcagtgtctgattacacagtaaccgacctactcaagcaatcatgcgtgttcgttgcttaaaggatggcttttctttgctttgcaagtcttgatcccttcctgttcctccaatggcaagcaaaagctatggcttacccagcacttttgagttaggactatggctattatgtgaagagccatcagtttacttgtacggaaaataaaagcgaagctggcatagtgatgtaataatggtatgtatgtcactaacaatctcc

SEQ ID NO: 17901 - DNA, 617 bp, Oryza sativa
  ref <308>: DATABASE ACCESSION NUMBER: AK068318
  ref <309>: DATABASE ENTRY DATE: 2001-12-06
gaggccgacctcgccgcggggctcttcgccgtggaggacatcgcggaggcggccagcctgctgctgccgcagcggccggaggatctcaggcggctggtcgggctcaccttttgccgcccgccgcggttcatgccgtcctgcttcatcagagactacatcagggttatgtgcactgagaatgtcaaggaaaagactgagttattacatgctttgatcaatggtaagaagctttcagaccttccaaaaattaaccagcaaaccttgataatttggggagagcaagatcgggtctttccattggaacttggcctacggcttaagagacatttgggggatacatccgagctagtcattgtcaagaacgctggacatgccataaaccgcgaaaagccagctgagctatgtagacttataaagaactgtatcgctgatccgtctgtcaagtatcgagatggtcacaaggggtcctggaagagtgcgataaaaaggtttgctgggtcgagtctgaggaaggtagactctacccgaccactgttataatgcatatactgaccaataccatgtaagaaatttgacatcatataagtttataaccacgataagcaaactttctccct

SEQ ID NO: 17902 - DNA, 1776 bp, Oryza sativa
  ref <308>: DATABASE ACCESSION NUMBER: AK068319
  ref <309>: DATABASE ENTRY DATE: 2001-12-06
gtgtctttctctctcctccacctggacgccattggactccaccaccacccaagggaggcagagcgcgcgcgcggcgcgacgcggcgcggcgcggcgagggcgagagcgagatcaagctagttcagtggttcggccgaccgattcgatggggaggcggtcgagcgcgtcgtctgcggcggcgggggagccgctgctgccggcggcggcgtcggcgaaggggggtgggggagggggaggtcgggcgtcgatgctgcagcggtgcgtgtcgcgggcggacgacgagctgcagtggttccggtcgtgcctccggtgggtgtgcatggaccactcgggcccctggggcgccgcgctgtcgtggctgcttttcctcctcctcgccgtcgccgtccccgccgcggcgcacttcctcctcgcgttccgggcgtcccgcaggccgttctccgccgtcgtgcaggtctcgctatcggcggcgtccgcggcggggttcctctgcctctcctcctccttccgccgcatcggcctccgccgcctcctctacctcgacaagctccgcaccaagagcgaccgcgtcaggctcaactacaccgcgcgcctctccttctccttccgcctcctcgcctccctcgtcgcgccgtgcttcgccgcggaggccgcctacaaggtgtggtggtacgccacctccggcgaccgcgtccccttcttcggcaacgacgtgctcagcaacgcggtcgcctgctccgtcgagatggcggcgtggatgtaccgcagcgccatctacctcctcacctgcgtcctcttccgcctcatctgccaccttcaggggctccgcctcgaggacttcgccgggacgctgctcgtcgaggtggaggaagggagggccggcgtcgagcgcgtgctccgggagcacctcgacatccgcaagcagctcaaggtcatcagccaccgcttccgcaagttcatcgtcgcctccctcctcatcgccaccgccagccagttcgcctccctcctcctcaccacccgccacgactccgtcgacgatctcctcaacaccagcgagctcgcgctgtgttcagtggtgctcatgtcagggctgatcataatcctgagcagcgcggcgaagatcacgcaccaggcgcaggcgctgaccgggcagacgacgaaatggcacgcctgctgtaccatcgagccggtgccggacgaggaggcggagcccgggtcgaaccacagctcgatgctcgaggtggagcccgtcagcgacagcgacggcgagtccagcgaggagaccggcgacgaggacctgctcgagaacaccaagatcatgctgccccaagcacacgtcatctccttccagaaaagacaggctctagtgacctatctggagaacaacagagcggggatcacggtgttcgggttcacgctggacaggtcctacctgcacacgatattcatgctcgagtggacgctcttcctgtggctgctgggcaagacgatcggtttctcgtgaaagcgaggtaaaaaaaaaagttttcctgcatacaacaagttcaggttgttctggaacacatgtatgtttggttggttggtgggttgcaattttgcggatgcgtggctgtgcagttggatcctcgtgagtggagtcatttttgggtgctcacgatagtagcgtgcgcatgtatgtgtatacgcatgtatgtgtatacgtacgtatgtattgatgtttgtataaaaactggtgttagcggtgtacagattttgagtccattgcttcgttcgcgc

SEQ ID NO: 17903 - DNA, 1210 bp, Oryza sativa
  ref <308>: DATABASE ACCESSION NUMBER: AK068320
  ref <309>: DATABASE ENTRY DATE: 2001-12-06
ggatgtcctcctccgctccggccccctcatcgatcgagctcgcagccgccgtgttccccgccggggaaggtcgtccttgccgttgggtggtgttcccggcgctggattgacgccatgaggaagaagctggacacccgcttccccgcgcctcggattaagaaaatcatgcaagcagatgaagatgttggcaagattgctttagctgtacctgttctagtgtcaaaagcattggaattatttctgcaagacttgtgtaataggacatatgacattacagtgcaaagaggggtcaagactctgagttcttcccatttgaaacagtgcatacatagttataatgtttacgatttcttgagggatgtcgtcagtaaagttccagacatgggtacatctgatgctggtgttgatgataaacttggcaaaaggaggaaaactgctgaagatgacagtgaagaggaatcaaagcggacaagaaatgaggcagcaagccagacaagcactggtagagggcgtgggaggggtcggggaagaggccgacgtggtgggcgtgtgtctgagagggagattatttccgcttacgaaaaatttgaggagaaccatgagtttcctccaggtcaatttagcaagccttctcagctgaaggtagatgtttcagttgatggtacagatgcaattgaaacaaaggaggctaccccattaagcaacgcaagagcttctctaaggaacattgacttaaacatagagcttactgactatgatgatgagggttcagctccactggaggtccagcctccagctccggcagcaggtgtggttacaacctcttcaggaccacttgtttcggaggtgaacgaagaggcgaagaccaaagactttctaggatggcaattgcctgagctgaccaagatggccatggaccctgttcagtttgccttgtcttcaaaccataggttagaggaggatgaggattatgacaacgaagaatgataacttgccccttttaggttaagaagctgatagatagacatgacttttgtcttttgtacatccttgtagcccagcttaactctgtagctgatcttgtataatgtgtgtacctgctgaagctgcagtagtttaggatgttacagaggtttatcgatcgatagctagcaactatgttgacagacagattcatcagttgtacatcctatctgatctccagtttatg

SEQ ID NO: 17904 - DNA, 3968 bp, Oryza sativa
  ref <308>: DATABASE ACCESSION NUMBER: AK068321
  ref <309>: DATABASE ENTRY DATE: 2001-12-06
gatgtcagttagaacccaagaggagagctcgtcgatcgattcccccgcgaaacagaaatctcgctctcgccgccgccgccgccccgcttctcctcctcctcctccctggccggcggcgtgaatttgaactactccgtccggccagcctccgccgctccatgccatattcatcccctcctccttaaatcctagcaccctgacacctccagtcgccttccctagccctatcaacccttgtgtttgtgaatggttggatggattccatctcggtgaatgatctcgcgggatttttttttgggcacaattgcgatccgatccgggtatcccaccgatcgaccgaagccgggagggcacgggcgatcaactggtccgaaacaatgtgcttgctgatgtcacaatgtatataggattggcaacatgatcagaggctatgagcatggttatgtgctgaaaataacctctgttggtgatgtcgcagatatcagtattctggaaaatggcataaaatgtgggcatccagttctgttaattgctggtaatattgatcaggacactgtttcaatccagtccttgtggccaataagattggaagtgtatcggagtatggagactgcaagaaaacctggatgatatcactttccaattggaggctgaaagtgagctcaaaggagaagaaattttgggtggaagatgctttgaatgcaatggaagtgttatggttggtacccactatagtccatatcagaaggatgcagtggagaaagctattgctgttgctggtgtctatactcttttgaggctggcatctaaagttgacttcatcatagaatctcgagaatgattagcagaaggttgaggttgaaattgtaaggaaggccttcagtataatccctgaaaagagagttacttttgcaaaaggaacataataggcggtgagttgaggtgtcgcttggagcattctgcattggtggcaaattaagacattcctggcttgagagttgagacgtggttgtcgacgccatagagagcgagaacgtacacctggtcttctgcaacctgcaaaccaatggcagctagctctggtaatctctgcacctgatcccatgcacgcctttgactgtgctatcttgcaaatctagcatagggataccacgttgcagaatatggattctgattgagcaacggcacttggcttttctgtgaaactgtggcaactaaatcttttgcttacatacagataggacggctgcacttagcaacactacacccgtagctaagtgaagtgatttcatgaatgggtgtagcgttttctttaaccttcagtaaaagaatacttgatgccaaataggagtagttttcaacttaacatagggatagaaagtaaagtaaaatgggggtgaggggttcattggatactcaagagaagtctgtgattatgtaaggcccggaattttaaacaggtgcgtgcgcatttggcttgtcacacacacataggatgcccccctctgcttggctgcgtgttcgcttgtttctgcgtgcgcctgcacagctgcaaattttcaccagtgccagcagttgggaggtagcagtagcagtggtaaactagcaaaggcaaattcacagtggggggcctggctatccatccatctccttgaccttttttacctggagcatggaaggaaattccaaaaaccctcttgagctctttcgtgcttagacaaaaagaaaataccgtttgctccaagtccaaaccattgtacttttactgtaaggcaacccaagcacacatatagatactgctacattatgtctgcgtatgcatatagtgaccgttgttttgggtctttgtggttggtaaccactccttgcactgacagtatgactctacttattagacctgtgctgccgtgcattagatgtagtagtagtataacgttactgctagtagtattttgtttgtgaaggttagtaaaataattgatggattgtaaacaaagtctaccactatagtagcagtagtaatacaagaatagtaaaaaaacacaagatccgggtcggccggcctaggggtggaaggtggccgtccacgctccgtgcaaatgtgatcttcttcttcatcctagagaagaggagaggccaacggccggccattaatattccctcttcgatgcctgcataaaaagctgtgtactgtactactacccctctctctctctctctctgcctcactggcacctgtagtttagcgccgttgcacgctgcctctgtgtgtgtgacctggctggctggggctgtatgactttgcctatttggtgcctcgctgtactcttgggcccggggtctacttgcgaaaaaattttttaaccaaacaagatggaggaaaaagggcaaggattgaggaatatctctgtggtggagatgggtgattatacttgaatttgctggtgttttttttctcattacttttgcacctccaatctttgcaactttcctaccttttggggaagaattaaatgtctgttcaagtctacaggggaatttaggccctgtttagttcacaccaaactttccccaaacttccaactttccattacatcacatccaaaactttcctactcacataaactcccaacttttttttccaaactaccaactttccccaaacttctctccaatttcagaaactaaacacacagttagtttttttttctatgcacagagttgaatagaaatttcagttaccccaagatatactattttaccagccatgatttttgaatcagtagtgcattagacatatcccaccaacaaatgaatgtagttgtagattatcccccaactaataatgtgcgtgtgcaatgattctgtcatttgcaaattgcaattgccgcctcaaaacgcaaatgccaatatgtgacacctgtgaagtgaaaatggtgttggcatcataaaatatttaaccaaccccaaagcatgggtaccttctaagttagccacacaactaatttaacagtgtactgctatcacacagctgtacaactggcatatcattgctatacaccagtacaaagtgctcgtgcccaccgttttatgctgtaatctctctcaacaactgaatagaaaatcaaccacaaaactccagctggtcaattcttagggatattcttgatgcggcgaaaatctctgaaagccaatctttggtgccacctgggtattgtgcactttgtactttgagctggaacgaacggcttgtgtcagttttggccgttggtaagggacaaacaatactggagaagagtattcatttccctcctgcaatatcttctcacagtgtagtagtatggtctaatgcgatccatacggaattgtacacaggagtacatccacatacatagaattgggtggtggccccaaaagtactctccatctacttgtagtagcctagtataatactggaatgtgatgttttactaactttgtaagcaaatcatgcatgtagccatgtaacttaggctcctttggcacatggtaattttcagaaagttgttacattcatccattcatgtaaaatccatgcatttctagtatcttcaaaaggaatatataggagtatatttcacaccattgatgtgtttatcttgtgtcttacaatactcctacctaaactagttcagttggttccagcgggggatgttaatacatgccgcatgagctatcagtcatgattgcagccaacatgtaattgtaatgcttctccaactgaaattgtcgagttgggaggtgaccctgacctgcacaaaaaggtgaaaaaaaagaaaaacaatcttgcagagaaagttctgcaatattatccatcgagcaaaccaaagcacaggtaggagaaaaactcccacatgtacattacctactcactaccggccagatatacatatatacagagtagtgtgtagcctggctaatcaattacc

SEQ ID NO: 17905 - DNA, 3259 bp, Oryza sativa
  ref <308>: DATABASE ACCESSION NUMBER: AK068322
  ref <309>: DATABASE ENTRY DATE: 2001-12-06
ggtccactaaaaccctagcctccccgctgctcctctcctccccccgtcccccggcaatggcgaagacgaagcccacggcggcggcggcggcgtcggggagcaacaaccccttcgaggccatctggtcccgccgcaagttcgacgtgctgggcaagaagcgcaagggggaggagcgccgcatcggccgcgcccgctctgaggccatccacaagagggagaacactctgctcaaggagttcgagcagagcgccaagtcgtccgtgttccaggaccggcggatcggggagagggacgagacgctgcccgagttcgacaaagttatcctccgccagcagcgtgagcacatggcaaagctgaaacgagaaagcaaatacaatctatctgatgatgaggaagatgaggttgatgttcacctgcctcactctctctcgggaaaagatgattttgatgaagaagtgcctcttgatgattatagtgatgaagaaggtcacatgatcctctcgaagaaccgcatacctctccaaagtggtgatgttccttcagaaattggtcttcctgaaggaactaatgttcacaagagcaagaaggaagttatgtcagagatcattttaaagagcaaattttacaaggcccaaaaggccaaggagagggaagaggatgaacatcttgtagacaagttggatagtgactttgcaatgttagcccacacaggcgatgttgtccttgactcgatcagctagaatggatgcaaataaatataattcaagtacagtccagaaagattcatttggtttgactgccaaggagatttttaataaggaaaaaccagatgcatatgataaattagtgaaagaaatggttatggatcaacgtgctcgtccatcagacaggacaaaaacaccagaagaaatagctcaggaggaaaaagaacgtcttgagaagttggagaaagagcgtcagaaacgaatgcttggaactgctgagtcctctgatgaagatgatgatgatgacgaggagggtgaccgcagcacgaagctagacagctcaaaacctatatctggtgatgatcttggtgattccttttctactgatgagccagcaagaaaggaaaagggctgggtcgatgaaatttatgaaagagagggtaaaaagattggtgaagatgctgaagggtcagacaatgaagaatctgatgatgatggtgatgacgatgatgatgatgctgaggatggtgatgatgatgctgaggatgaagatgaagaagaggatttaagtgataatgactttggtaatatgtctgttagagactgggagcaaagtgacgatgatgaggttaccgtggaagaagatgaaatggaaggtctcaaacaaaaggaacagaagatcagtggcaaagtggtgaaaaaagatctacaaaattcaaagaaagagtctaatgcagaatcgcaagtcaaggatgacaatcttccttttgtgatagaagcaccaagtaacttgaaagatctatgctccttgctagatggttggtcagaaactgaaataattgagattattagtcgaattcgtacatgcaattcaataaggcttgcagctgaaaatagaaagaagatgcaagttttctatggtgttctcctgcagtactttgcagtattagctactcagagtccagtgagattcaaactaattgacacccttgttaagcctttaattgagatgagtggggagactccatattttgctgccatctgtgcgaggcagcgacttatccacacacgtactcgtctatgtgaagatataaaggtttcaggaaagagctgctggccaagtttgaaaacattacttcttctgcggttatggtctcttatatttccctgctctgacttccgccatgtggtagcaactccaatgcttttgcttatgtgtgaatatttgatgcgatgccccatacaatctggtcgagatgtagccgttggttctttcttgtgttccatggtgcttgtggctactaaagagtctaagaaattctgccctgaagctgtcgtttttctgcaatctcttttggtaacatctctgggaggaaacctgggatctgacctacgaaaaaagatcaatgatcaatttttggagctcaagacaatggaaccatggcttcatatccatgaaaaagtgcacgaggtgaatccagcgaatatcctggaagtcatatgcatggattctgatgctccttatttctcctctgataatttcaaggctagtgtacttctatctgtggctgaatgtttaaggggatttgttattatacacgaagaactatgttcgttccccgaaattttcctgccaatctcttctttgatgcaagaaattatggataaatcagacttgcctggattgttacaatacattttacatgaagtcattgggttgattaaaaacagaagtgatgaagtccatgcatcaaggcagccactccaaatgcgaaagcagaagcctgaaccaatcaggcagttgaatccgaaatttgaagagaattacattaaaggccttgattatgaccctgatcgggaaagggcacaaatgaagaaaatgaagaaacgccttaagagtgagaagaagggtgcaatgcgcgaactgcgtaaagataattatttcctgtctgctgtgaaagagaaggagaggataaaacaagagcaagagagagctgaaaagtatggaaaagccatggctttccttcaggagcaggaacatgcttttaaatctggacagctagggaagggcagaaaaaggaggcggtaacattttctccatatttagtgtgtgtaaatatattgattatattccccatgctgttcagttcaccatctttcttgggtactggagatttagacacagcgaatggcctttgcatgctccattttaactgcctgttgtaacttctagcttgtggacacaccgaaatacaaaagtagatggtcagaactcccttgttagcaatatggagacggagcgtcacttgcatgaaagctacttggaagaatgtttttgcaatctccccaacaaagcaccaacatggcaatggtttttttatttctcttgtatcgggaaatggattgctctactgtgttatactcctgcaatagcaattttgatgtatcacagccaagagtttttgatgtgttccctttcctttttgcactcgtcagatgtactggaatgtaaaccaatgaaatccttaatgtaacattacttccattttatagcc

SEQ ID NO: 17906 - DNA, 2518 bp, Oryza sativa
  ref <308>: DATABASE ACCESSION NUMBER: AK068323
  ref <309>: DATABASE ENTRY DATE: 2001-12-06
tgaattcccaaattccctaacctaaccctagctttgcaaggagacgggcggcggggggcgctgcgtgcggcgtgcggtgcggcggcgggcgcggtgtacggcggcggcgagccggcgaccgcggggcagccagccaggcaggggcggctgccggctggacgcactggcgcagcatctcctagggtggcggcggagcgggcgcacggccgtggaggcgtcgacgcaggaagaggaccactcggcttggcgccagggcgcggggcagcggctgactcgtgaggcagcggcgcggcgcggcctgcggcgacagcggcattgcggcgcgacgcgcggcctgctgcgacagcggcagtgcggccatggacgacaagctctacccgcctcgaggcccagcgcgaagaaatcaagtcccgagccccgagcgagcaagattaatcccaaggtgcgggtgcagattatcttccaaacatgtttggggctctactgggactccatggcacatgttaagtgctctggattgcttgctattttctgctcctcaatcgtgctcattggctcacacatggacggcttcagttatgcacaaccgtcttgtaggtggctgtttcagcagtttgtcagcagcagtagcatcggctattcgtgtacctgttgcaagctatgggacttctgcagcacaaagcacatcaaaggaccagcatggcagcaacatcaacagtgcgctaaaagttttgaatcttgtaccaagaaaggctgactatgacaaagtgggaggtccatgccatcaccgactaatccatgactgcatgaatgacatcttgggggttcaatcaaatcatactatacacaagggaaatggtgtcacttttaactcatgcagcaatcctgcacaggctaaatttgatagctttgtttcaaataatggctcggctttgtgttccaggactagattcataaaggaggacatgtttatgctgataatggagctgcacaggaaaggagaaaccagtactgatcaatctattttggcagctgccatgagttcctgtgctgataggcaaatgttcacccaagacacacagcttcatggtctattggttaaagttggctgtgattcaactgtctttattggcagttcactcatcaccttatattcgaggtgtagccagttggaaagttcgtacttggttttccagaccatgccaaccaaaaacacagtgtcatggacagcaatgatttctggttttgcgcttcataatcgggttgagccatgtctccatttgtttgcatcaatgatgctttcaagttgcaagccaaatgacatcacatttgccactctttttagtgtgtgcactaaacatgcacttctagcacttggtagaagtgtccatgctttacaaatgagaatgggtttccattcgtatgtgcatgtttccaatgccctgctgtcaatgtatgcaaagtgtgggtgtattgatgaagcccagttcatatttggctgcattgcctgtaaggaccttgtttcgtggaatgccattatctttggatgttcgcagtatggtcttgctaagcattgccttgacttgctgaaagaaatggagaggcaacacatagtacctgatgctctctccttccttggtgtcctttcttcatgccggcatgcacgccttgtggaggaaggccgacactgcttcaagacaatgattgaacatggaataaaaccagggctcgatcactactcatgtatggtcgaccttcttgggcgcgcaggattgcttgaagaagcgtgggatttgatccaaacaatgtctatccctccaaatgccgtcatatggggctctctgctgggttcctgtagggtgcatgggaacatttcgatcggcatccaggctgcagagcaccgtcttaaacttgagccaggttgtgctgcaactcatatacaactagcaaatctgtatgccacaattggttgctggagtgatgtggccagagtgaggatggcaatgaaggcgagaggcctaaagacgaacattgggtgtagctggatagaagtcggtgataaggtttattccttcacggcagagaacagatcaaagagccaccaagtaaacaatgtcctggctgttcttgattgcttgcaagctcacatggaatgcaagtatgatatgcttacagaaagcctggaatagtggagtgtgatggctgtgaacatgtcaagacgactataaacactgtatatattaagaggaatcctacagaaaatggaagcatcactcgctaaagattaagaagatccattgatgccgttataacacctaaacattatgtgtatggactgattggtataaagatctgtatggattgacaagactcacgaccaacaagacatgcaggtactgtattttccaagtctcttccagttttgttcctttcaatttgttcctcatttgcctggcgaaatttgttcctcgtttgtctaagaagtgtggggaataaagtattcttacactctgccacc

SEQ ID NO: 17907 - DNA, 1597 bp, Oryza sativa
  ref <308>: DATABASE ACCESSION NUMBER: AK068324
  ref <309>: DATABASE ENTRY DATE: 2001-12-06
gatggaccagcgcggcggcgccggcggcgccgccgagacccaccgcgtgcagctgccggacacggccacgctctccgacgtcaaggccttcctcgccaccaagctgtccgcggcgcagcccgtgcccgccgagtcggtgcgcctcaccctcaaccgctccgaggagctcctcacccccgacccctccgctaccctcccggccctcgggctcgcgtccggtgatctcctctacttcacgctctcccccctcccgtcgccctcgcctccgccgcagccgcagccacaggcccaacccctgccccgtaaccctaaccctgatgtcccctcgatcgcgggagctgctgacccgaccaaatctcctgtggagtctggtagctcctcgtcgatgccgcaagctttgtgcacgaatcctggcttacctgtcgcatccgatccgcatcatcctccaccggatgtggtgatggcggaggccttcgccgtgatcaagagcaagtcgagtctcgtcgtcggggatacgaagagagagatggagaatgtcggtggtgcggatggaaccgtcatctgtcgccttgtcgtggcgctgcatgcggccttgctcgatgccggcttcctctatgcaaacccggtggggtcttgccttcagctgccacagaattgggcgtcaggttcttttgtccccgtatcgatgaagtacaccctgccagagcttgtagaagcgttacctgtggttgaggaggggatggtggcagtgctgaactactccttgatggggaattttatgatggtgtatgggcatgtgcctggggcaacatcgggggtgcgaaggttgtgcttggagctgccggagcttgcgcctttgttgtacttggatagtgatgaggtgagcacagcagaggagagggaaattcatgagctgtggagggtcctgaaggatgagatgtgcttgcctctgatgatatcgttgtgtcaactgaacaatttgagcttgccaccgtgcttgatggcgctgccaggtgatgtcaaggcaaaggtcctggagtttgttcctggggtggatcttgcaagggttcaatgcacgtgcaaggaattgagggatcttgctgcagatgataatctttggaagaagaagtgtgagatggagttcaatactcaaggtgagagttctcaggtgggcaggaactggaaggaaaggtttggagcagcctggaaggtttctaacaataagggccagaagaggcccagtcctttttttaactatggctggggtaatccttatagtccacatggctttccggtgattggtggggattcagacatgctcccgtttatcgggcatcccaatctccttgggcgcagctttggaaatcagcgcaggaacatctcacccagctgcagttttggtggacaccatcgcaactttcttggttaagtcatttcgtgggttttgctagtatgttaagaatatttcatctgaaaagctacatataacatattgtacatattttatagttggcactttatgcatgttcagttgttaactgtattactgtactcgtaatcttttctttctttgttgatatatcctatattttcttgt

SEQ ID NO: 17908 - DNA, 2418 bp, Oryza sativa
  ref <308>: DATABASE ACCESSION NUMBER: AK068325
  ref <309>: DATABASE ENTRY DATE: 2001-12-06
ggggttgaccagccaggcaggctcgactcaagcccgaccccgccggccgccgcaatgccgcgagccccacctccgcggccgtcggaggacgcgcgcctcgccgcctacaagcccggcgtcgacgtcgcccgctcgcgccgccgccgcgaggaccgcctcctcgccgtccgccgcagcaaccgcgatgccggcctcttcaagcgccgccgagacgaacccactcccactcccatcccgcccgcgagggccgcgaccccctcatctcaggccgatgatgtgcccaccaccaccaccgccacctctcccccttcctctgcaccctcttcgcccccgtcctcacctcccgccgaatccgttcctccgactgccgccgactctgagctagcttgaaggcctatcagaaatggtggagaaggtctggtcagatgataccactagtcagttagaagccacgatccaattcaggagactcctttcagatgagaagaacccaaccgtgataaaaatcatcagagcagatgtcctgccaaggttttctgatttcctctcaagacatgagcatcctcagctacaaatggaggcggcatgggttcttaccaacatagctgcatctgactatacattgctagttgcagaatgtggtgctgttccaaggttggtcgagctcttagaatctgcaaatgctaatatcaggcatcaggctatctgggctcttggaaatatagctgcagacgtgcctacctgcagagagatcgtccttgatcatggtgctgtgacaccattacttgcccaatttagagaaggcatgaaagttccagttctgaggactgccacttgggcgttgtcaaacctttgttttggaaaattaccagctgaagtgcaagtgaagccaatactggatataatcagccagcttattcattcagtcgacgaaaagatactgggtgatgcatgctgggctctttgttatatatgtgacggtgtatctgacggaattcaacatgtgctagatgcgggtgcttgccctcaacttgtaaatcttttgatgcatgcatcagctaatatcctgcttcctgtcattacggtacttgcgagaatctcttctggagatgatgctcaagtgcaggtcctagtagaaaatgacattcttaattatttggccccgttgctagcacgaaattacccaaagagcatcaagaagcaagcttgtctaattgtttctaatatctccactggcagcaaggataatattcaggcagtaattgatgcagatgttataagccctctcattttcctattaaagacctccgagaaggatatcaaggaggaagctgcttgggctatatcaaatgctgcgtctggtggttcaaatgatcaaattcaatatttggtgagtcgaggatgtttggagccactctgcaatgttctcacttaccaagatgctgacctagtatatgcgtgcctggaaggtcttcaaaacatacttcaggcgggtgcagtggggaagcaggggcagggttccacggtgaacccgtatgcacagtttattttagaatgtgggggtttggataaactggaagatctgcaggaagtcgacaatgatgccatttacaagttagtcatgaagttgctggagggttactgggacgaggaagtaagtgatgatgacccaaatttaccaacttcaaatgactctgcagagaccgtggagacggcatctgaagatgctgcgcagccaacagagccatcggccagcccaaatgaaagcgaatgacttgaatttgatcttaatttcccttgtccggtgaaaagagaatgaaggcatgactgttttttggggcaagattttctcgctgtaaacagtgtgagactaaacagtggatgaaaagacctgagatactctcatctctactactaccaagagtccaagaccaacacaaccatatcagggtactgtacttacctgcacaattgtcgtcagcagaggctagtggcacaatctagttttggttcgtgttgcatgcatcatggcaagttgccaacctcatggctaagcaagatatgatcaacttatgacttgttaggagcgatacgtttcgctcaaaaaccatcaattccgttcatacactacgtgttggcttccatcaatcgctatccaagatatctgagtttgtacgaccgtaatcagtaaacctgcatctctctcgatccaagtcaattgaagcgatcgaagtcaattgaagcaaatatagtaggcacacaaaaatatacagcctcaatcatgtttgtttaatttaccgacgtggtcgatattaatgtatgtaaattctaagtgtgtatctgaattttttaagtgtcaccttcaacaacactgggttgatggaagctaaccaaaccgaaagctaagctcgtcgttct

SEQ ID NO: 17909 - DNA, 559 bp, Oryza sativa
  ref <308>: DATABASE ACCESSION NUMBER: AK068326
  ref <309>: DATABASE ENTRY DATE: 2001-12-06
gtccaagagagagaagcacaccacactccaaagagttgaatagagccatcgaccagtgaaggctgtggccatgccggtgatggagctaggcatactgctcatcccactgaccctcgtcttcgtgccttgccggcggatcgtcctcttcctcaagaggctccaggagttccaccggagcatcacccacccgagcttcacctccgccgacatgctcagccgcttctccagcttcaactccatggccctgatgctgtgaaggacttggaggcagcaggtactccctgcagagctgaactgattcttaactgttctggaggcagcaggtactcctgcagagctgaactgattcttaactgttctgaagaactcgtctgttcgtgaaaattgttctctcttttgactattcggctgttcatccttccttttttgtacaataagaacagtatagtagtttgagactttgagatgtagtagacttacttcagaacttgctgaaagttgtatatattggtgttatgagagagataaaatttcaggctgcatctgacagaatttcctg

SEQ ID NO: 17910 - DNA, 1796 bp, Oryza sativa
  ref <308>: DATABASE ACCESSION NUMBER: AK068327
  ref <309>: DATABASE ENTRY DATE: 2001-12-06
gtgttatggtctatatatgaaactaacatctgaaaaggttggctgcactggagaaaacaaagtgagaactattcttcttgagaaccctggtttgcttgttctcgatgaagggcacacacctaggaatgagcgcagtgttatttggaagacactaggaaaagttaaaaccgagaagcgtataattctatctggaactcctttccaaaataattttcttgagctttacaatattctctgtttggtgaggcctaggtttggtgaaatgtttttgactaaaacaagagtgggtcgaaggcactgtgtctcaaagaagcaacgggataaattttctgataaatatgagaaaggagtttgggcttccttaactagtaatgtaactgatgataatgcagaaaaggtaagatcaatactgaaaccatttgttcatatccataatgggactattcttcgaactcttccggggctcagagagtgtgtgatagttctgaaacctctaccgcttcaaaagagtatcattagaaaggtagaaaatgttggatctggtaacaattttgaacatgagtatgttatttctttagcctccacacatccttcacttgtaaacgcaattaacatgacggaagaagaagcttcccttattgataaacctatgcttgaaagattaaggtctaatccttatgaaggagtaaaaacaaggtttgtaatggaagttgttcgtttgtgtgaagcattgaaagaaaaggtattgatttttagtcaatttattcagccattagaattgataaaggaacatcttcgtaagattttcaaatggagagaaggaaaagagattctccaaatggatgggaagatcctcccgagatatcgtcaaaattcaattgaggttttcaataatccggatagtgacgcgagggtgttacttgcatctacaagagcttgttgtgaagggattagcctaacaggggcttctagagttgttcttctagatgttgtctggaatccagctgttggaaggcaagctatcagcagagcatttaggataggacagaagaaatttgtatatacatacaatttaataacttatggaacaggtgaaggtgacaaatatgataggcaagcagaaaaggaccacttgtccaagttggtcttctctacagaagacgagttcagtaatgttaggaacatgctttcaaaagctgaaatggagcactgttctaagttgatatccgaggataaggttctggaggaaatgacttcccatgaccagctgaaaggcatgtttttaaagattcattatccaccaactgagtcaaacattgtttttacttacaaccagattgctcctgagttaagttaataatgactggcatcagatggattcattctttaagatgatgattcattaattataaggtgaacccttgtgtaatcgcactggaagaacatactattgctatggcatccgtggtccagagttaaatagttctagttgactggcatgcactgagaaattcctgatgcagcaggctgtggtatccctatactctatcaaataatggatcttgggttgcattatgtcacgcatgatcaaataggactagtcagttcttacataatgggtgcaaagcatcaaccaatctagaatcggcacaaggtcgccggctgaaaaatcttcttgtgtataataatgaatctccagatgcgatgtataataatgctattggttcatttctggtggtccaatatttgttgaactaaacacaatcttaatatgaataagcggactagtttcagcc

SEQ ID NO: 17911 - DNA, 796 bp, Oryza sativa
  ref <308>: DATABASE ACCESSION NUMBER: AK068328
  ref <309>: DATABASE ENTRY DATE: 2001-12-06
gaaggtagagccaagctgcgctactattccccctcttcctttttctacggaagacgcagtcacacgctcaggcaacgcaggtaaagaaaaagagaagaaaaggcaaggtcttgaccattccaagcacaacttgggataagacgaagtagtgccaaattatggattgtgggattgaattgaagggctgcatttgtcggatcaacaactgcgctgttgaactcttctcaatggaggaggacttggtgattgatgatgaggactcgtgggaccttcttgcgagggatcttcggttgaaggctacattcttgtacattgacctcggccgtgtgatttgctcctgtgagattgatgaacacaagaagatgctcaccggtttagcgaacaagtttttctacttcatggatgagttgacgaatgcagtgagcagcagaagcatccccctcatgcaggtgtgctacagtgatacgactcttcttctccgcgaggtgctctccgcccttgtgccctcccagtaatttgggcctaattcaagattagatgccccctgcaaggctagtattcgctctgcttctgcagcatcgcaatgtatggagcaggcgagggtaagatctgagagcctcacattttcttggaagcaagaaacacccagaagaggatggataaggaaaatgtgagaagaatgaggtgcagaatcaccctcacctatgtacatatctttaatcagcttcagagttggaacttggaagcactttaatggattagcatccggtttgcaccaatgagatgcacttctctg

SEQ ID NO: 17912 - DNA, 1005 bp, Oryza sativa
  ref <308>: DATABASE ACCESSION NUMBER: AK068329
  ref <309>: DATABASE ENTRY DATE: 2001-12-06
gaaccgcacgcacccgagccccactgcaatcccacctccccaactccgccgcacgcatccccgcacccgccaccatggctcgccggagcggcctaatgctactactcctcgccgccgccgctgtcgcctccgcggccgtgccgccgtcgtgcgagcgcatcgagtgcccgtcgtacgaggtggtggacagcgccaacgggttcgagatccggcggtacagcgacgccatgtgggcttccaccgcccccatcgaggacatctccttcgtcgccgccacccgcaccggcttcctccagttgttcaactacatccaggggaagaacgcgtacaacgagacgatcgagatgacggcgccggtgctgacgcaggtggcgccgagcgacgggccgttctgcgtctcctccttcgtggtcagcttctacgtgccggcgaagaaccagccggacccgccgccggcggaggggctgcacgtgcagaggtgggccggggccaggtacgccgctgtgcgccgcttcggcggcttcgtggccgactccgacgtcggcgagcaggccgcgctgctcgacgccagcctgcaggggaccaggtgggccgccgccgtgtccgacgggcgcagggccgacccgacgtcgtcgtacacggtggcgcagtacaactcgccgttcgagttcagcggcagggtcaacgagatatggatgctcttcgacgcgaaggatgcatccgacatgtaacgcgatgagcgcgcggcaattccaaatcttcaaatgttcaccggagtagtagactcgatcgcacagctagtgtaatcttcaagctcctggtcggaagaataatggcatcttaaagccctaaactgctcgagtgaactgtttttttgcactgtaaagtatgtagttgagttgtgactcgtgcgtatcgagattaacaacaataaaagttctgtttagtcaactattttaacgcatgatttaacggggaacatcaatatatataccttttcagccc

SEQ ID NO: 17913 - DNA, 1864 bp, Oryza sativa
  ref <308>: DATABASE ACCESSION NUMBER: AK068330
  ref <309>: DATABASE ENTRY DATE: 2001-12-06
gaggcgggcgagaagagaggagacgtcacggacggaagagtcgagtagtagtaggaggaggaggaagaagaagaagaagaagaagatgtccatgtccttactatcggttggtaggtaagccgaggcacacgcggtcatctctccacacacgcgccccctcgcttcccccacatgtatatatacccctctctctctcccaacactgactccacctcaccactcgatcgatcgcaagaacacgataaggattcagggatcgatcgattcatctctcctcgtcgttggtcacaggacggagagagatcaccatcagcagctagcagcaggatgacgaggaagaaggagaggtcagggtgggggagcctgttcaggggatgcctgagcggaggaggcgcggcggggagccggaaggtgcgaccggggccgaggacggcggcggcggcggcggcgaagcacggcggaggagcatcatcggcggcggcgcagcggctgtcgttcacggacgtgatgagcacggcgtcggagcaggagctgtcggtgtcgctggtggggtcgaacctgcacgtgttcacggtgggggagctgaaggcggcgacgcaggggttcctcgacggcaacttcctcggcgagggcggcttcggccccgtctacaagggcaacgtcgccgacaaggccaagccgggcctcaaggcccagcccatcgccgtcaagctctgggaccccgagggcgcccagggtcacaaagaatggctgtcggaggtgatcttccttgggcagctcaggcaccccaacctggtgaagctcatcggctactgctgcgaggacgagcaccgcctgctcgtctacgagtacatggccaagggcagcctcgagaaccacctcttcaagaagtttccttcgatgctgtcgtggtcaacccggttgaacatcgcggttggcgccgccaagggcctcgtcttccttcacgacgccgagaagcccgtcatctaccgcgacttcaagacctccaacatcctactcgacccggagtacaaggcgaagctgtcggactttgggctggccaaagatgggccggagggcgacgacacccacgtctccacacgcgtcatgggcacccacggctacgccgcaccggagtacatcctcaccggtcaccttacagcaaagagcgacgtatacagctttggtgtcgttctgctagagatcctatccgggcgacgggctgtggacaagacacgacctagcagggagcagcatctagtcgaacacatgcgctcctggctcaaggatccacagaagttaagccgagtcatggacccggccctggagggccagtacttcgctaccgcggctcataaggcggccctggtggcgtataagtgcctgagcggtaaccccaaaaatagaccggacatgtgtcaagtcgtgaaagacctagagcccctcctcaatgtcaccgatgatgtctctgatgagtcggtggcacccatagccccggtaagggaggataatgctgtgagaaaggaaagaacagcaaggagaaggcccggtgagagggatggtggaaaacttaggcaaagtaaaatgcgttcaccccagaaggtcgttaggagacgtccaggccaaagcgaggagttttgggtgtggcatatgcctggagaagtaaaatgctaaatatcaagtgtaatatatatatatccgtaacccgcaatgtaatgtttttgtgtagtgactgatgatgaggatgtaaaatgtagatggtggtgcagccggtggtcactggccaggaaggattgcaccccctgtaattccttgtttcttttctcttggtttgaaatttattggtcttggcctctttgtaccc

SEQ ID NO: 17914 - DNA, 1738 bp, Oryza sativa
  ref <308>: DATABASE ACCESSION NUMBER: AK068331
  ref <309>: DATABASE ENTRY DATE: 2001-12-06
ggagcgaaaaaaccgtacgaatctttcccattttcacacgaatttcaaaccaaagtctcctccgacgacgccgcgacatttcaaatctcaaccaaatcctcccccaattcgttcgaatctctcccccccttccccccacccgcttgcttccgtgttctacccccctttcttcccaattcgatctgcgaatatcgctgcctcgattcccaggctagggctcgcgcggcggccccggatcgagctgccccggtgagttctccccccccctcgccggcgaggctagggtttgggcggcggcggcggcggtggagcgcgtgctgttccgtttctctggatcctagggtttgctgcgctggatcgagcttgttcgttgtgatggtggtgaggggaggaggaggaggtgagtgacggtttgattggcgtgttgaggggtcgccggccatggtgcggcttctcgggctgcggagcctgagcttcgggccggaggagtcgccgcgggagatcacggtggcggggggcggcggcggcgacgcggcggcgcaccccgtggggagcagcggctggctcgttcgcttcttcgactccgccttcttctgcgagtggatcgccgtcagctacctctacaagcatgaccaccagggggtgcgcgactacctctgcaaccgcatgtacacgctgccgctgccggggctcgaggcctacctcttccaggtctgctacatgatggtgcacaagcccagcccgtcgctcgaccgcttcgtgatcgacacctgctccaagtcgctgcgcatcgccctcaaggtgcactggctgctagccgccgagctcgagctcgaggacaccgacgatttggatgggatcgacagggtgcaggagcagtgccaggctgcggcgaccgttcagggagagtggccacccctcgtccggcctgcgccgccgtcgccaattgccagcccacgcgggaaccccatgcttagcaggatacgctcatcgaagcagcgccttctgtcccttgcatcatcaccctcactcggcttgagtccccccgcaggtgcgagcaatgcagctgctgcagaggatgttgggggcagtggagtgaagcagccagcgacaccctcgtcagaggataacaagctactcaagagactaagcattggacctaaggtgcgtgatgcagcatcgttctttaggcgatccgtggagaaggatgatgagcaggacaaggaagggttctttaaaaggctgcttagagacagcaaggacaaggaggaagaggatggtgataaggaaggatttttcaagaggctgcttagtaaggagaaagagaacgaggaggaagaaggagatagagatggtttcctccgcaggttgcttagggacagcaaggacgaggacatggaattgacaccaagctcagagggtttattgaagcgactgttccgtgataaggaagataggcagggtgatgatgaagaaaaggaaggctttttccgcaggatatttaaggataagaatgaggagaggagagagagcctgcatggaaggcatggggatgaggaaagagtgggcaagagcttagaggatgatgataaagaagggttcttccgcaaaattttcaaagataaaaatgaggagaggaaagacggagggcatagtaagcaacaagatgataaggaaaagactgctgggaacatcgaagatgacaagagggatggttttttccggcaacttttcaagg

SEQ ID NO: 17915 - DNA, 1458 bp, Oryza sativa
  ref <308>: DATABASE ACCESSION NUMBER: AK068332
  ref <309>: DATABASE ENTRY DATE: 2001-12-06
gcctcctctctctctcactcatctccctgggcaggctggccggcggcggggaggaggctgccgggacgaggaggtccgacggccgaccggcggtgcggcgtgcggcccgcaatagcagcgcccctgctgccgaacttcgccgcgcggatgacgctctcaggcgtgcgcggcggcggcgggtgatgtccatctcttggtcggtccactcgccggtgtcgtccaccgcttcgctgccatttgccacggtcgtcgctgcagccgcagccgccgcgtgtcgcggcgatggaggcgtgatcggatttgagggcttcgggagtggcgggttcaagctcgagctgtggtgcctaccgtggcgggaggtgggggcgggatccgggacgggttcctcgaagagccccgcggcgaccccaccatcttgccggcgacgcacaacaccacgaacaactccagcgcctcggtgatgagtgaggcgttgagggcgatgcggccaagctcggaattgaggaggtcgagctcggcgaggacgtcggcaacggcgtcgggttgccacagctgctccttgacttcctatgcggcttcagcactgacgtcgcatgccccacgagcaccgtcaggtggagcacgatcagcgacatcggcgcgtcgcgcgatgagcccgactcctcgatcaggttcaacagcggcgccgcgtggtcctcactgaacaggcacgccatcacgcgcagctccgcgttgggccgccatccctccatcgtccgccgcttcgcccgcccgaacctccccgacaggtcgtacaacagctttatcagcggcgtcgccaccgccgtgatcaccaccatcgacagcgccagcgtcgagccgtcgagtagtgctccgccgtcgccttcatcgtgtccccccagttgttgatggcggccaccttcacgatgccccggatgttgagcatcagcgccagcatggtggcctccctgaacggcatggagaagaagagccccacggcgatgcacccccaccatcttttcgacaatgcacagcgcacagcgcccgcgcccagctccgccccgccggccgagccctactccgctccccgacggccgcgcgccagctcctcccctggcggcggcagcggtgtgggagggcgggcgcaagaggccatgcggcgccgtcgccacctcgtcgccggccaccggactcccgcctcccctaccgggcggctgccctgcccactgccgaactgaggaggaaagggagagaaaagaagaggagagagaggaagagaggggagggaaagaaggggctgacatgtgggacccacgctgagtcagctgccacgtcggataaaatcggagtcaaaatcgccgtaggatctagtttacaccggttttataagttgggggacgcgttgtatccggttttacggtaggggaacgattttgtaattcgatgacaagttgaggg

SEQ ID NO: 17916 - DNA, 1696 bp, Oryza sativa
  ref <308>: DATABASE ACCESSION NUMBER: AK068333
  ref <309>: DATABASE ENTRY DATE: 2001-12-06
gacgtttcgccttctccgcgccgcccgctcgatcgatcgccatggaggagaaggggatggggaagcagcggtgggagaaggtgctcctccaggccgccttcgacggcaaccttcgcctcctcaggaagatggcgcgcgggctggtcacgacggggcgcggccgcggcgaggcggacgtcctggcggccgtggcggacggcggcagcgggagccgcgcgctgcacctggcggccaccgaggggaggatggacgtcctcacgtacctcgtcgaggacctccgcctcgacgtcaaccaaaccaacgacagaggtgaaactccactattcctttctgcgttttttgggagaactgcatctacaagatatctgcttgatcatggtgctgatccaatgattgttggtaaatcaggatcacctcttcatgcggctgccgggaaaggacactgtgaaatagtagaattgctgctgtcaagagggattggtattgtttttgattctctctatgggaccccgttgcatacggctgctgctcatggtcaatgtagcaccatgaagatattattggaccatcatgcagatcctgataaggttttcaatcttgatgatgccccattgaatatggctatatcttctaaatcattggaatgcgtcaaactgctcatccaagctggggctgatgtgaactttagagactccaatggtgctacttatgttatgatggcagcaaattatggtttttctggcatcatgaaatgcctattagatgctggtgctaatcctaatattccggaccaatttggtgtttttccaattgaagttgctgctctccaagtccatagggaaattgttgagatgttatttcctttgacttcaccaatttcaacggtgccagattggagtattgatggaatctttgcccatgcaaaaaactttggttcgaagccattgcctgaagatctttgtgtaaagaaaatagctcaaatgaaagtagaaggtaaagaggctttcaagagaaaggattatttacttgcggcacaactctatacaagtgcactgggacttggacctagtcctgatgattctgcaactctgctggcaaataggagtctctgctggttgcgcttggaaaatggaaaacaagctcttgctgatgctaatatgtgcagaatgttccggcctcattggataaaagcctgctatcggcaaggagcagctttcatgcttcttaaggaatatggtaatgcttgtgatgccttttcagatggcttgaagctggacccagcaaatgttgatattgagaatgctctaagggcagcgcttcaggccgtgaagaatgaccggtgcgttaagaataatcagtgacttggcttatattgtcagtagaagttgagcttctgctctgttgctagttccagtacatctttttgccacgaaaactcttgtgcttttgtgaactaaagttggcacggaaactggagtgttatttacccattttaatattttttacgcctatccacttgtagcttagtttgtaagtgtggcagcttagttggggtggtagtcattgttcttcctgcctgcttaaatagctctgcgtgacatgcccacatcatctgatggatttgtggccgtccttgctgtaaattggacatgcaaatcctgtttataaggggctctaactcactgattctaactcc

SEQ ID NO: 17917 - DNA, 4074 bp, Oryza sativa
  ref <308>: DATABASE ACCESSION NUMBER: AK068334
  ref <309>: DATABASE ENTRY DATE: 2001-12-06
gaggtaaatcaactccgccgccgccgccgccgcgtccaaaacccttctccggccggtgtgtcgcgtcgtcggccatgaagcggaagcagaagcccgccgccgccgacgccgccgccgaagtcgacgccgacgagccctcccaagccccgctccctctcgaggccttctcgggtgacgtctgcgccgccctcaccgcgcgctacggccgctccaccgccccgcagcaccgccacctcctcgcctccgccgccgccatacgctccattctcgtcgacgacggcctccccgtgacgccagcatcctacctccccgccgccatctcggccctccaagccgccggctcggctgaccccgccgccgcttccgcccttgcctccctcctcgtcatcctcctgcccaatatcccctcgtccccatcgtctctcccgccagcgtccgcctccgaatctgcctcagcgctcgccgtcttcctctcctcgcccgatgcatcccagctacccaccggcaccgtgcgctcggtggtcaagtcccttggccatttggttttccatgtcgacgctgcagccgattggggctctgtggcctctcctctggaggctctccttgctgcttccgtcgaccagcgggccaaggttcgaaggtgtgcacaggagagtgtggagaagctatttgcgcacttgaaacaatgtggttgtgggaagaaagttagtaatgctgcaattggcatgtttgataagcacattgcatctgtgaaaaatcatgtcaatttgaattcagatgcttctgagggtaaggagatggaggctgcaaatatgctaagtgcaatggttgttgtagttccatacctatcaaagaaggcaatgaggactgtgttttcagaagtttatcagctgttaaccccttgttttagtccacttacaaggcatgtcttgaagcttatggagaccttgttggaccatctgaaggctgagaatgttgagtcagacttggtgaatcttatcccattgttgttggcatacctgaattatgatgaaaagaagcctgatgataccattgtcgcagcattgaagctgatgaaaaattgcttggcgaaactagttggtcgaccaaatttgtggatggaggttcttccatctgcatttgaggcagtttcaggatacctgattctggacagaaaatgttctgaagatatagcaggactgctacaagactgtattgattctcatattgaccggaatattattttgactggatcacagttatgcgatcgtgattatgagagcttaagtgatgcggctgctgttaaatcaatctgttcatcgattaataacatgctttgcgcatgtgcttctcctcccaatagtatcttaacaacggccttggttttgtttctgaaacttggggagagttcgtatgcctttatgaaaaatataatacttacattgtcacaaatcgctgcgaaaacagacaaagaatcagagcggaagaatgttgaagagtgcattggggcagctgtcattgctttggggccagataaaatcctttcactaattccaataggttttgatgaggaccggctaacatgctcaaatacttggcttctgcccattttagataagtatatctatggggcctcaccacaacaattcctagagcgcattgtacctctagcagaatctgtacaacaagcttctaacatggccaagtcagcacggaaatgtgaagacttgaaatcatgttccaatcagctgtggaatttgcttcctgccttctgccgctacccagttgatatatgtcagaatttcggttctctatccaagttgctactagagatattgaaatgtgacaagtatctgtacaaatccgctgttaaagccctgcagcaacttgtagatggaactagaagattaagtagcagtgagcaaaacagagaaatatatgtggagctttctactttgttctcctcgaaaattattaacttaagctgcccaagctttgagaggtgctctaaaaaagatgctcgtaagaacatgaaagttctggcatcacattctgtgtatcttctttctactgtcacagattattttctagattcttcaccagagaagcgttctcatttgaaggatgcattgagatgtttggctcaactttctggtagcacgaacatttgcaaccttttcctttcactggttaaaagatttggtttagaagatactcagtcagagcaagagaatattgaatgccaaactaatgaggtagacaagaaggatgaagagggtactgatgtagatgaggagaaaaataaaaagaggtctcttgtaatggaacttatttcgacattcgctgaagctgctgacgaggatctgcttgatttgctttttggatttgtcaaatcttctttactgaacaacaagcaaccttgtgagggcaaagctctatttgctctaagcataattttgaaggaacacaatgaatattctttggctcggttggatgaaataatgatgcttcttcatggaataaaggcagacttggataatgaagttttagaaggccaattattatgctaccagtatttgttggttcacatgattaaggctaatgaagagaacacgagcaagaaggcgttcctgattctaaacgagttaatagtcgcgttgaagtccaagaaggaaagtagaagattggcatatgatgtactcctggctattagtaatagcttgagaagctctgagtcaaacagtgaagattcagatcttcaacgactattcacaatggtgatgggatatctttcaagtccagctccacacatagtgagtggggcaatagctgcactatcgctgcttatatacaatgatgctaacttttgcttggaagttccaaatctgataccatcagttttagttttgctgaagcataaagctattgaagtaatcaaggcatctttgggctttgtaaaggtgttggtaacatcattgcattcagaaaaactgttggaattgcaagcagatatcatgagcggcatattaccatggtcgtctgttacaaaacaccatttcaaaggaaaggttgtgttaataatggaaatactgattaggaaatgtggctttgatgctatcgacttagttacacctgaaaagtacaaggcttttgttagaagcgttgaagagggccgcaagggaaatcataatccagcagatggcgcagagtctgaggcacaacaacctacgcaacatgctgctaagagaagaaaacggtctgattctgatgttggaactggacaagagggaacacacactcgggcgccatcgaggagtttgccagctggaaagaaggaattcttcgttaaaggggccaggaatgctcgctctcctggtgtgaaaagccaacgaagcaaaccatcaggccgcaatggtgatagaactaatttcaaatccaaatctgaaccacggccaggaaatggccaaaataccaagggcgacaaacctcaaggtttcaacaaaagaaacagaactggtaagttcgacaagacacaaaatcgtgggggtaaagcatctgatcgctcttctagattcaagaagcctagaactgcagcaacaacatgaaagccaaggctgtcatttgcaccatccagctatcaagctgcataaacgcttcttgttagcctcatatctttcaccggcaaggtcaggtcctttagttgagtccatgccgggaccttgaaatttgcatgcaccttgattcctttaggacttttgagaactgcgatagagaaggtagctggctaaaaggagcaattcttcagggaatctgcgtcagttaaaaggagcaaatcttcacttcagggaatgcgcactgtctgcgttagtaaaagagagcagtggtgtcgattgagaatccacctagttgtacattaaaattttgacttgtgggtggattgaatcatacgaaactattgatctagggggcatcccttcagtgttgtattacaatttatacgcaggtgaaattttgacttgtttgtttcagtcatccacaagccggacaatatgctgtcatttggctggcgttgtc

SEQ ID NO: 17918 - DNA, 1177 bp, Oryza sativa
  ref <308>: DATABASE ACCESSION NUMBER: AK099051
  ref <309>: DATABASE ENTRY DATE: 2002-08-28
ggcggtcgcctcgctttctccctcgccaactcgcctaccctccccacccccgcgtcggcggcggcggcagcggcagcggcagcgacggagcctcgccggcggcaagcgtactcacccgacaaaacaatgaggaggtatagtccaccttatcgcagtccaccaaggaggggatatggtggcagaggaagaagtccccctaggaggggatatggaggacggaaggaacagggttctggcagtctcctggtccgcaacatccctttaagctgcagagcggaggatcttagagttccttttgaaaggtttggacctgttcgagatgtttacctgccaaaggattattataccggggaaccgcgagggtttgcattcgtggagtttgttgacccttatgatgcttctgaggcccaatatcatatgaatcgtcaggtggtttttggccgggagataactgttgttcttgctgctgagtcacggaaaaggccagaagagatgcgcagtagagccagagtcagagggtactctgaccatgaaggccgtcgttcatcccattacgggaggtctcgttcacgttcgcgttcccgctctccccgttatcgtggtcgtccacggtcaaggtcatactctcctgctccaagacgacgagatgactattccgcatccccacagagaaaagacacacatcgtgcaaaatctcctaggcgtcagccaaaagaacatgaagtagacaagaagcggagatcctattctcctgccaataaagatggggaccggcgtgatgctgataatggttatgaaaagaggtcgccgccagctgacagcgatggatcccctccgcaccggaggtcccccaggcaatcctcaggatcgcctccaggatcccgctccaggtctgccgacgggtctcctgcccgcagtgactaacagaagaacactgcgcacgctgtgctacatcctctctagcttcttgttggtcagaccggaccagtttaagtaaaaacccttttgggcttgttgtaaaacttgtaatgctagcatctgtcgtggtttggtagcggaggacttggatcgtcaccattgtgtgtgctcgcttctcagtggatggagacattttgagtcgtgtgtgatgaaaccttagacttgctgcatggcattgtattgtgttaaacttatccgc

SEQ ID NO: 17919 - DNA, 1353 bp, Oryza sativa
  ref <308>: DATABASE ACCESSION NUMBER: AK068335
  ref <309>: DATABASE ENTRY DATE: 2001-12-06
gtgcgcacgctagtggagcagctgctgcagcggttggccaccgcctccatcgccgtcgccgactcgccgccatcgtcgttgccgtcgtcgccgtcggcggagtaggcaggcggccatggcggggaagcacggccgcaacggcttcgaggacgacgacgtcaatcccttcgcgggaggaagtgttcctcctgccaacaattctcgactcccacctctctcccatgagccagctgatttttacaatgtggacattcctcttgactcgtctaaggatttgaagaaaaaggagaaagaactccaggcaatggaagctgaactaaacaaaagagaaagggaactgaaaaggaaggaagaggctgcagcccaagctggcattgtcattgaagataaaaattggccaccctttttccctctcattcaccataatatttcaaatgagatacctattcatctacaaagaatgcagtaccttgcattttcatcgtttttgggattggcagcctgcctattttggaatcatagcaaccacaaccgcatgggtaaaaggggaaggtgttattatctggttgcttgctattatctacttcatatctggtgtacctggtgcttatgtgttatggtaccgccctctttataatgcaatgagaactgagagtgctttgaagtttgggtggttttttctgttttacctgattcatataatcttctgtgtgtgggcagctgtggctcctccttttcctttcaaaggaaaatctttggctgggattttgcctgccattgatgtcataggcaggagtgctatagtggggatattttactttgtcgggtttggattattctgccttgagtcactgctgagcattggtgtcattcagcaagtatacatgtacttccgtggaagtggaaaagccgcagagatgaaacgtgaggcggcacgtggtgctctgagctccgcattctgatgaaacatgccttgagcaaaactgtagccagatgatatgagtgggaggaaacacgaaacatgagttgccaatctagcattcgcatagtgtacatccctgacggctgaacagcgtgcggatttggaatcaccgaaagcacccagccattattatcttttttgctcttctgtaatatataagcagcgttcttgtatggacgcgttcaggtgtttgtttccatttgttgacaaagattttagatgtggacgtgtgttgatagggaatagacatacatacgcgtgcgcgagtgggatcacctgttttttattacttcctttgcagcatagttgcagcacgttgtgtttatctgttgacacgattttcgtgagttataagatgattgatgtcctcc

SEQ ID NO: 17920 - DNA, 1219 bp, Oryza sativa
  ref <308>: DATABASE ACCESSION NUMBER: AK068336
  ref <309>: DATABASE ENTRY DATE: 2001-12-06
tccctggcctccctcccatgccggcctcccacttcatcgacaatcggcccgaggagccgcctgagagtgaagtgtacaaggccgtgatggatttggttcgcaggtacactaataaatgctccaatggcttcctcgtgaacactgtagactcgctggaggcacgggtggtgaacacgctcaggcacgcacgccgtcaaggcggccgggcgttgccgccgttctactgcgtcgggccgttggtcaacaaggccggcgaaaggggagagcgacccgagaggcacgagtgcctcgcatggctcgaccggcaaccggaccgcaccgtcgtgttcctctgctttggtagcaccggcattggcaaccactccacggagcagctcagggagatcgccgtcggcctggagaaatccggccaccgtttcctgtgggtggtgcgcgcccccgtcgtcagcgacgatcccgacaggccggacctcgacgcgctcctcccggcggggttcttggagcgaaccagtggccaaggcgccgtcgtcaagcaatgggcgccgcaggtggacgtgctccatcaccgggccaccggcgcgttcgtgacacactgtggatggaactcggtgttggaggggatcaccgcgggcgtgccaatgctgtgctggccgctccactcggagcagaagatgaacaaggttctcatggtggaggagatgggcatcgccgtggagatggtcgggtggcagcagggccttgtcacggccgaggaggtggaggccaaggtgaggctggtcatggagtccgaggcaggcgtcgagctcagggcgcgcgtcacggcgcacaaggaagccgcggccgtggcttggaccgacgttggctcgtcgcgcgctgcgttcacagagtttttatctaacgcagacagccgacagacatcgtgagttcgtggccgtatcgtgaactccggacatgggtggaggcataagtctaacgggtgaccgttcgagcgcagcccggacacgctagcgcattcggcccagtccacatgcattaggccaatcatgatatgctattccaagaaaaagtcaacggcgtcatctattaaaaaacggagggagtataaattttgttgtatatgtaaaatttatatatacttggtacttgctgaatacccataatttaccaaaaataaaaatatattataatattgtctaaaagaaatacagataagattcct

SEQ ID NO: 17921 - DNA, 1343 bp, Oryza sativa
  ref <308>: DATABASE ACCESSION NUMBER: AK068337
  ref <309>: DATABASE ENTRY DATE: 2001-12-06
gaagtgtttgtacttggctttgctggcctgtttctgttttgattactcgagctccagagcacagcagcagagagacgcgagctgttcgtggtcgtcgtcgtcgtcgatggacgcggcgtggcgcggcggcgttggctgctcgccggtctgcctcgacctctgcgtcgggctgtcgccggtgcgggagccgtcggcggcgaggcacgagctgcttgaccggccggccggctgccgcggcggtggggattccaagtcgatgaccaatgacgaggcgaagatcgtcgaggcgaaggtcactcagatgagcgaggagaatcggcggctgaccgaggtgatcgcccgcctgtacggcggccaaatcccgcggctcggcctcgacggctcggcctcgccgccgcggccggtgtcgccgttatcgggcaagaagaggagcagggagagcatggagacggcgaattcctgcgacgccaacagcaacaggcatcagggcggcgacgccgaccacgccgagagcttcgccgccgacgatggcacctgccggaggatcaaggtcagccgggtgtgcaggcggatcgacccgtcggacacctccctggtggtcaaggacgggtaccaatggcggaagtacgggcagaaggtgacgcgcgacaacccgtcgccgagggcctacttccggtgcgccttcgcgccatcgtgcccggtgaagaagaaggtgcagcggagcgcggaggacagctcgctgctggtggcgacgtacgagggcgagcacaaccacccgcacccgtctccgcgcgccggcgagctcccggcggcggcggggggggccggtggctcgctgccgtgctccatctccatcaactcctccggcccgaccatcacgctcgacctcaccaagaacgggggagccgtgcaggtggtcgaggcggcgcatccgccgccgccgccggacctcaaggaggtgtgccgggaggtcgcgtcgccggagttccggaccgcgctggtggagcagatggccagcgcgctcactagcgaccccaagttcaccggcgcgctcgccgcggcgatcctccagaagctgcccgaattctagcttcctttacaattctccaattcttcttacaggaaaaaacatagaggcgcatttcaatagagattagagcttaatctccccccaaatttgaaaattttatacagggtaagaattccgaatgcttttctgctgcttttaggatgtgaattgtactctctcataataacctgttggtccttgggccgtcggaagaagattgcgggcttctatcgggcctcacgatcctgagcccaattgcgaggctccttgagcc

SEQ ID NO: 17922 - DNA, 1722 bp, Oryza sativa
  ref <308>: DATABASE ACCESSION NUMBER: AK068338
  ref <309>: DATABASE ENTRY DATE: 2001-12-06
tggtgccgactcctcatcgatgcgccaccggccgctcgactctccatcgacgcaacgctagccactcgactccccatcgacgcgccgccgacccctggacttggcgccaccatccctgtcgtctgcccgccgtggctccaccgccgccgtcctggcgacgccgcttgtagcgtggccgcaaccggccactgactgcgccttcgccgtgggcgtcctggcgcttccatcctctccgcggcaaccacctccaccagcgtcaccgcgaccagccgctgcattctatcgaacaccttgggcgtgtgctacatcttcttctttgctccaccaccgcgacatcgcactttatcattcctccatctctcggtaatacctcactcctatgactcctcctattccactaggaactaactccccatcaatttcgtctagtatggccctaacaatgccaacccgagctccaaagctctgctcatggaggtcactgtggacatgccatcccgggggctctcctttctatcttactggaaaaaggaacccccgtacgccatagatgctcacgccctcgtcaatttggccgaagttctcgcctatcgccctagcatcttgcaacaggacctcaaccatggcgtgcagtgccgagccacacgcctttgctccgtcttgttctgccgtcgccggtggagggtcgctggagctcctcggcacctccctcggccaccgccgagccacctgtgccccgtcttggccgtatcccgctgtactgtgcatcctgctgttgcctggctggaggtagaagaagataggagagagaaatagagataacagctagggcccacctatcatttggggcaaataggtctttttacagcgctaacggatgccaactggactgtgatggcacacaatgaaggttaaagaaaacacgatggtatattattgaacttggcaaaatcggtggtagattatagaagtgcgataaactcagtggcactaagtggattatctcttggtagaaatacagtttttatgggataaaggttcaaaggtagaaattcaatatttatgggacggaggtagtattgaatatcacatatgaccccctaaatttgttttttttccctaactatgctaaacccctcgaaatcagttgggcattaaacccctgtaaatcaagtgtgcttggattgacattgagttatggagctgcttctgacacttgcaacccacgcaaggaaaacatatgtattccaaagtctagttagacttgtgacctgagcaatcgttagaaaaccttccagcccaatattatactagatgggaataagggaccacatgttcttctaaagttggatatttcaaaggttgttgattccatcttggccgtttcttggaggtcttagatcagttgggttttggttatcggtgctgcaacctcatatgctgttactctctacttttgtctactcgagttttagtcaatagagagagccatgagaggttatttatcatcatgatggtctccggcaaggcgacctgttacctcctttgttgttaattttggtcatgaatgttcttaactcgcttgtgagtcgtgcatctcaagagggatggctgcagccccttgctgtgcatgcagaaaacacaatattgaggtgctcgttttttatgcagatgatacggttatgttcctatatatggccaatatctaatgacctttcagtt

SEQ ID NO: 17923 - DNA, 808 bp, Oryza sativa
  ref <308>: DATABASE ACCESSION NUMBER: AK068339
  ref <309>: DATABASE ENTRY DATE: 2001-12-06
gatacacttcactcggtagtatactccaagctaagcttagcacaaacatggcgaaactcatcttcctcctcgcaatggtggcatttgcatccaccctcctcgtatccatcgccggcgcagccgacaactcgacctcgccgtcgtcgccgtcggccgacccgacggcgtacgacatgctgcagaggttcgggttccccgtcggcatcctcccgcagggcgtgcaggggtacaagctcggcgacgacgggtcctccttcgaggtgtacctcgccggcgactgcgagttccgggcggcgaagaagtacgtgctccactacagcagccgcgtcgccggccagatcgccaccggctccatcacctccctggagggggtgaaggtgaaggaggcgttcgcgtggttccgcatctcggaggtcgacgtcgacggcgaccagatcaagctccacgtcggcctctacaccgccaccgtcgccgccgaccagctcgccgtcagcccccagtgcaactgacggccgccggcgatcgattgattcatcatttctcttaattaatttgttgcagtgttgtttatttgatgtgttcaagtaagagtaatcaattacgtcattttgttactgtcacgggaggtactgcgaggtaccaacgagattaattcacgatacatacgtcgtggtacctccttaggaattgtcagaagaagattgtaatgggttatgttgagagctgcgataatttgagagagacgatggaaatgggtggtgatgttttataagaactttaatacatggggagagaaaattttgtgtgc

SEQ ID NO: 17924 - DNA, 1753 bp, Oryza sativa
  ref <308>: DATABASE ACCESSION NUMBER: AK068340
  ref <309>: DATABASE ENTRY DATE: 2001-12-06
ggtggccaaaacgagacgtgcagagagagacaccaatctcgtacgtagcatatctacatcgcaggaacacccaaatcactcgtgcgtaggtatggttctgacgcacgtcgaggcggtggaggagggcagcgaggcggcggccgccgtgttcgcgtcgaggtacgtgcaggacccggtgccgaggtacgagctcggcgagaggtcgatatccaaggacgccgcgtaccagatcgtccacgacgagctcctcctggacagcagcccgcgcctgaacctggcgtccttcgtcaccacctggatggagcccgagtgcgacaggctcatcctcgaggccatcaacaagaactacgccgacatggacgagtaccccgtcaccaccgagctccagaaccggtgcgtgaacatcatagcgaggctgttcaatgcgccggtgggcgacggcgagaaggcggtcggggtgggcacggtggggtcgtcggaggccataatgctggccgggctggcgttcaagcggcggtggcagaaccggcggaaggcggcggggaagccccacgacaagcccaacatcgtgacgggggccaacgtgcaggtgtgctgggagaagttcgcgcgctacttcgaggtggagctcaaggaggtgaagctgaccgaaggctgctacgtgatggaccccgtcaaggccgtggacatggtcgacgagaacaccatctgcgtcgccgccatcctcggctccaccctcaccggcgagttcgaggacgtcaggcgcctcaacgacctcctcgccgccaagaacaagcggacgggttgggacacgccgatccacgtcgacgcggcgagcggcgggttcatcgcgccgttcatctacccggagctggagtgggacttccggctgtcgctggtgaagagcatcaacgtcagcggccacaagtacgggctcgtctacgccggcgtcgggtgggtcatctggcgcaacaaggaggacctccccgaggagctcatcttccacatcaactacctcggcgccgaccagccaaccttcacgctcaacttctccaaagggtccagtcagattattgcgcaatattaccagtttcttcgactcggatttgaggggtacaagagcgtgatgaagaactgcatggagagcgcgaggacgctccgggagggcctggagaagacggggcggttcaccatcatctccaaggaggagggcgtgccgctggtggccttcacgttcaaggacggcgccggcgcgcaggccttcaggctgtcgtcgggcctgcgccggtacgggtggatcgtgccggcgtacacgatgccggcggcgctggagcacatgacggtgctccgcgtcgtcgtccgggaagacttcggccggccgctcgccgagcggttcctgtcccacgtcaggatggccctggacgagatggacctcgccgccagggcccccgtgcccagggtgcagctcaccatcgagctcggccccgcccggaccgccggcgaggaggcctcgatcagggtggtcaagagcgaggccgtgcccgtgcgcaagagcgtcccgctcgtcgccggcaaaaccaagggcgtttgctagaccgggttaaatttttttttaaaatactggtgggaacacgaccaaaataaaatttcaaaatgggagcgtactaaaccttctttatgctacagtaactatgtagtacaagcatgccgaaagttaatcatcgtgtgtaatcgtattagagtttgcaacagc

SEQ ID NO: 17925 - DNA, 2132 bp, Oryza sativa
  ref <308>: DATABASE ACCESSION NUMBER: AK068341
  ref <309>: DATABASE ENTRY DATE: 2001-12-06
gacacgtctcttcacgccaccacggggcacctcgccgccgccgccgacgtcgccatcgccgagttcctccacgcaacaatccgcttcccccgcaaggaagcagcgccgcgcggccgtctccgacctgcgaatccgccattaaatccgcgcggcagggggggtgccctgcgtcgccggtgggcgcgcgtaaccttttctctcccctccccccctccccgtctcccgatctgcagggctgccggccggccggcgacctgagtttgggagggtttgacgcgcggctcgcctccatctccgtcggaaacgagctcaaagaaaatggtaatcctctgtgctagccacattggcatcagtactacccgttcccgattctggtcaggatggttgtcgcagaatggctgtcccagaatgtgttatcatatccctgtaaatataaggaaactcagaaagcaaaacagacgtcagcgggtgatcacgttgtctaaaagttctgcattacaagatcctgtttcctctgtgaagccttcacgccttctgcaaacagatgaactacgtatatttcacaacagtgtacctgaagagataatttcaacagtcagattggaagaatctgatgcattctatatgctagaacttagcacgagcagagaatttagctcgtctttgctagataagaacgctgccatcttaatctgtataattgatgccaatggtgattccctgttacaaagagtaccagcagcctattgtaatcattctgcacaaggcagagaggccgagaaattgcttcccttccaaagcggttcagttgatgttgtcacctttagaggctctaagctgcaaagaattaaagaaatctgggttggtcttgagtcaggctcatggagaatagataatttaagcttgaaagttatccatggacagttgaatacacctccagatctggaggaaacacctgaactcaagttcaatggtctgcagtacacatttgacaaactcagcatgctgcttggagaggatggagcttcagttgtggaagcaagacctgtggctgtcactgatctcacgggaataagcctttctgatctccaagaggggcaattatcctcagcaagcacagcttcaagcatccttgaaatgaaagaggatggcttgaaagagtatgctgacctcaagcagtcgctgctgctctacgatcttgctattgtgataacaggtttctctgccttcaccttggcttcaaatgacagtgctgccctctcgttccttgttggaggcattggaggatttctctatctgttgctgctccaaaaatctgtagacgggttgccggcgcttaattcaccatcagaagctggcagtgcccagccctctgtgaaaggtttcagtggcataaggaggccatggttaatattgtcactgttaatggtcgctggagctgttgcattgaaatatggagcgggtggtgacaaacttgaaatgacgccagtcgagctctttgttggcactgcagggttcctggcgaacaaggttgccattgttctcgcggcattcaaacccttgcagagtaatttgaaggctgaagaccgatctggagactgaacatagtcaggctgccttgaatatactaacatttatatagcggctatacagtatcatgatctgaatgttaattatcgaagtgcctagttcaagtttccagagggaacttgagccttatctctagctcacaagcacagctgccgatcacaaatgctcttcttgaatcgtaagcatttctttaagggttcaactcggatatgaatttttcatctgaagtataccgaaacttcactgatttcacatcacaggcatggagattggcagtgtggcctatatcaacattccagacatttgaacagatccaaatgataatctaggtgacatagtatagatgtatagtcacatgatagtgtcataggcttatagcagaacaatatattcttcagtgtatgtaaatctggtatactaatggttacaattttaatgattatgtagcagtaataccgctgcttctagcagaatatattatattattggtgtatataaatccggtactaatgattcaaatgtaataattacaatgtatgaat

SEQ ID NO: 17926 - DNA, 3522 bp, Oryza sativa
  ref <308>: DATABASE ACCESSION NUMBER: AK068342
  ref <309>: DATABASE ENTRY DATE: 2001-12-06
gggagtttttccccctttcttctcactccaactgatgagtggacgaagcagacgactctctccctcatcggagacctcatctgctcgcgggagtcggatctgttgtgctggagtcgaagagctcgccagcggtcaaatccatggtgcggattcaggggcagcgtgagcaagccaggctagctccctggtaggcccccgtccctctcgcctcactctctcttcctccgtcctagcctaaattgggcgcaagtgatgcggattgagtgcagccgcacccaacgggcctttcacctcatttgaagaaaacatagcgatttttatcttggttggatcagttcctatttatttttgattccgtgagattatatttgattacgcatcttctatgacttgatttcttttaatcttattcttggattcgatttcagttaccataaacatgtttctaggtccgatttatttacaagataggattattttgagggaatttgggttgcatctgtttgtttttgtgttcatgctttcaagtgacttttgaggtgagacggcattgagacacgtgcggagcatttgagacaggtgtgaagggcaacaacgtgccaacgtgagggaagcggaggctcacaccgtgacggaggaaagcggactatcacggacgaaggcgtaatgtgaagatcagaaacatatgaattttttaattagttaagactagaaaaaaatacccgtgcattgcaacgggtgaaggttattttattcttattatattatacggtttagttaagatgaaattcactttgggaattcgctttaatatataactttttagaaaatcgtgaactacaattaagagtccgatcgtctcaagttagcgtgcgagtttttttttataagagatttcttatacgactccttttgtattttcaaaagcgaacgaacttaaaaaccgactcatacacagatgacgtaccaaagtactagcaaaaaatatttttaatttttataatagtagagattagataaagatatttgtaaatttctactctacgggcctatttggttctctaccctacctatttattggtagtgccaaaatctaggcaaattttggcactgccaattttttggtagggaaaagttaattagactacttttggtttaataccaatatggagccaaattttaatagtatggtgaagaatattctagaatatgtccaaattgagtatgggcactatcaattgtttggcttcaaaccaaactagcatatttactatttaaattaccaaaattttggtagggcacagttttggcttcaatccaaaacggtcctacattcggtctcaaaactgacataagtggcgacgtctgggcgtaatttgaatggaaatttgaactaatatggcccatatacttacatggatgggccagaatttcagcccaacccaaacgagacgttgctggcctccgttcagcatggagtagttgccgcctccttatgctcggtttgttgtttaaactttaaatttgaattctgcggaaaccaagaacaccatttcagccatcttcttccttcgagagacgttgaaatcgaagaatggaggttggaggttactgagacctagttcgacgaggaggtgaaggcaacctgttcgacggaatgcgccgggggaaagccgctctctggcggccgcgccatggcgagggcgagacgtcccggcgtggaggcgacggcgatggagaagcggccgaccgcctcagcgccctcccggacggggtgctgcaccacgtgatgtcgttcctcaaggcgtgggaggtggtgcgcacctgcgtgctctcccggcggtggcgcaacctctgggcgtccgcgccctgcgtcgacctccgcatccggtacttccgcctcgacagcgagccgccggaggagccgcgcgatttcgtgaaccgcctcttccgccgccgggaggcgtcggcgccggtggacacgctccgcctgcagttgagcgacccggacaatttgtttgacaacgacgatgccaatgcgtggatccggactgccatcaagcgcaatgctcgattcattcatctcactgggcaccgcaaagagatcggggtgttaaagcacagggccttggtctctacccacctcaagatcttgaagctgtcctatgtcctgatcgatgacaagatcctcaagcagctttcttcagggtgcaaatctttggaagaactggatcttaaggactgcgtgatgaccggccatcagatctcctctgcttctttgaagactttgaagatggataggtgcaagatcaatgtggacctctctatcactgctccaaaccttgtttttctgaacatagtcacaccttacatccgagttccatcgttcaagaacttggagtcgctggtgacatgctctatcatacttgatgaccttttcttgggtgatgattatcagcacattagtgatgaagatgacattgatgaaaccactgatgatgatgattttggttatcagaagaatgataaggcagggtataggattaattacgctaaaaaaggatttgtgtttggtggaaacgaggatggttatggctatggtagtgatattgagagtgatgacaacacctatgaatatagtgagattgcaaatgagtgtggtgagcttcagtatggtaacaatggtgatggtcataattccagtaaagatggcgaatatgacaatgctgaaacatttggtggccaaaatgtgattcacagcctttcaaatgttagaagtttggaactcttagctggtgctggagaggtggttctttctagggaattgaaaagctgcccaatttttatcaacttgaagaccctgtcccttggtgaatggtgtatggatgctgaattcgatgcattagttttcttgctacagcgttcacctaatttggagaggctttttcttgaacctcagttgaacttcaatactaggaaggcattggaaagtggtgttaaacctacgggaagatcatttacttgtaaagacctgcaaatggtgaagatcagatgctcgaaggacgatgcgagagtccatatgctggcacatttgttcagggctaatggcataccctttgataagatttatgtccatcggtctgggagctctcgtctccgcagcgagaaggtgatgagagatctagccaagcaagaactggagttctgggggtcagatgagttctggggttcagattatgagtactgtggtccagatccggagttcggggattcggatttggaattctgatgcaacgtcagatcatctatcgttcatcatatcttctatcgtatttagttcttatgttcggattgcaatcgtcttctatatgtacttagaaagaatctgacggcacgacgcattaagcacgcatagcagggccgtgacagatcggttattcctctttggggtaatattgaatgaactatgtatggctatccaaatactgaaatgctcttatccagtggaatgagttaacattc

SEQ ID NO: 17927 - DNA, 1927 bp, Oryza sativa
  ref <308>: DATABASE ACCESSION NUMBER: AK068343
  ref <309>: DATABASE ENTRY DATE: 2001-12-06
gatgtcggcatccgccaacccctcctcgccttcttcttctccagtaataaatccacgcaaaagcctcgccgcgcaccaccacccagctctctccactccactctcgcgttcttgtggagtcgtgctccactccgggaaggaaggagtgggtgggtaggtgagtggagttggtcgatggcgattggggcgttcgtggagagcggcggcggcggcggcgggggagggggaggagggtacggcgggcgggtgacggcgtacgtggtgctgacctgcgtcgtcgccggcagcggcgggatcctcttcggctacgacctcggcatctccggtggtgtgacctcaatggactcgtttctgaagagattcttcccggatgtgtaccagaagaagcaggacaccagagtgagccactactgcgcgttcgacagcgagctcctcaccgtgttcacctcgtcactctacatcgccggcctcgtcgcgaccctcttcgcgtcgtccgtcacaaggaggtatggccgccggacgtccatgctgatcggcggcaccgtcttcatcgccggctcggtgttcggcggcgccgccgtcaatgtgttcatgctgctcatcaaccggatcctactgggaataggtctcgggttcactaatcagtcaatcccactgtacctgtcagaaatggcgcctccacgataccgtggggcgatcaataacggcttcgagctctgcatcagcctcggcattctcttcgcaaatgttcttaactattgcgttgtgaaaatcacagctggatggggctggaggatatccctatccatggctgcagttcctgctgcattcctaaccatcggtgcggtcttcctcccagagacaccgagcttcataatcgaacgcgatggcgacactgacaaggcaaggatcctactccagagacttcgtggcaccacttcagtccagaaagagcttgatgacttagttgctgctagcaacctctccaggacagttcagtatccgttcaggaatatattcaagaggaaatacaggccacagcttgtcatagcactcctggtccctttcttcaaccagcttactggaatcaatgtgatgaacttctatgcaccggttatgttcaggacgattggtctgaaggagagcgcgtctctcctatcctcagtggtcaatcgactctgcgcaactttcgccaatatcatggcgatgatcgttgtcgacaggtttgggcgtagaaagctcttccttgtaggtggtattcagatgatcctttcccagcttgctgtgggtgcaatcctggctgcagagttcaaggactatggatccatggacagagagtatgcttaccttgtgttgatcaccatgtgtgtgtttgttgctggctttgcatggtcatgggggccattgacattcttggtcccaactgagatatgtccacttgagatcagatcagcagggcagagtattgttgttgcagtggtcttcctgatgacatttgtgattggacagacattccttgcagttctatgccgcatcaagtcagggacattcttcttctttgcaggatggatctgcttgatgacagtgtttgtttatttcttcctgccggagacaaagaagctgcccatggagcagatggagcaggtctggaggaagcattggttctggaagaagattgtaggggaggaggaggaaaaacaagcagagaaaacagctctccctagcatgtaaagccctatgaattggaatgtatttgaccatacaaaaaccatacaaagtgtagggttctaattagcaaatgtaagtttgtaattcttctgtctaaatgtagtgtgttgaggtggtcagttgccgtgactggctctttcagatggtaattacaaagaaatgtaacattaatgttgtaacaagggtgccattttgtttc

SEQ ID NO: 17928 - DNA, 1354 bp, Oryza sativa
  ref <308>: DATABASE ACCESSION NUMBER: AK068344
  ref <309>: DATABASE ENTRY DATE: 2001-12-06
gccctcgccccaagccacacacacacgcagtcagggagtcccttccgctcagctcgcccccatggcgacctcgtcgtcgccgcgcctgctctcctccttcctcggcgaccgcctcctctccgccagcgccaggccgctcctccgcggggccgctccaggaagcaggcgggccgcgtatcaggcgacgagaacgctctgcaacctggtggatatcctcttcaacagaggtcagagtgacaaaccggaagataaccctagacgcctacggcctgggaaagtatctcctcgtctaagcgttcccaaacatatacagcggccaccatatgtcaatgctcgtcaaagacctggattgcacaatggacctgaaatacatgatgagagagggatcgaatgcatgagggcttctggaaagcttgctgcacaagttttgaagtttgccgggactcttgtagagccaggcataacaactgatgagattgataaagcggtgcaccaaatgatagtagataatggagcatacccttcgccacttggttattgcggttttccaaggagtgtctgcacctcagtgaatgagtgcatctgtcatggtatacctgattctcgtcctcttgaagatggtgacattatcaacattgatgttactgtttatctcaatagagtgtttctatgcatctcctccttatatttgcataaatgtcaaagtatgacaatggtggctggacagctgggttaccacggtgatacatctgctacatttctatgtggtaatgttgatgacaaagctaagaaattagttcaggtaacaagagaatgtctcgacaaggctatatcaatctgcgcccctggggtggagatcaaacgtattggtcgaactatacaggaccatgcagataaattcaagtttggtgtagttcgacagttcgtcggtcatggggttggacaagtgtttcatgctgaacctgtggtgcttcatttccgaaacaatgaatggggccgtatgacattgaaccaaacatttactatagagcccatgctaaccgtggggagcgtaaatccagttatatggtccgatgactggacagcggtgactgaagacggcagcttgtcagcacagtttgagcacacaatactgattacagaggatggcgcggagatactgacgcagtgttaagggcggacgaggattagaggcgagtaatgacagtgattctatttctataagtggctggctggagatggaatcctacatttttttggacaaatgatccaacttgaagttccaaaccctaatgtaaactcatattactaagataacctacaaaaattttgagtaaaattggttttagaagtc

SEQ ID NO: 17929 - DNA, 1837 bp, Oryza sativa
  ref <308>: DATABASE ACCESSION NUMBER: AK068345
  ref <309>: DATABASE ENTRY DATE: 2001-12-06
gattttccaaatatttcgatccgcagcgtaatctctctcgcgtgcgccggtgcgcgatcccctccctccctcctcctcaatcccccagatcgcgtgcgccgcgggctctccccgcgttgactctccagcatctagatccgcgcctgcgctcccgacgaggtcggccggtctacggtcaccctcgtggtttccattgacttgtttttctcttctttttctttttttcccctcttctccccaacctcgcaacaaaatcggcggctatcctcgtgtttcttcttcgctccgtggccgcagaatccccccaccgctgttcttgcggcgccggtgttcgtttgaaagcagttggctgcgctgtcctgggaggcctcagcagcagcagcagcgagctttgctcttgtgagcgcttcgtgtgcttgcagctgcgttttattattgcgtcttggagctgtcacgacgtggttgttgagaggaatctatcatcccttcacagttgcgaggaaagcttcctgtgatgtctaatctatcagagccctcaaaagaagctgcatcagctgatgattcaagtgctgtccagaaaactggagcatggagtaacacgttgaacattcttctgcaacaagcttcagtctatggtgtggctgctggttattgcctgtcagcatccctgctctccattatcaacaaatgggcagtcatgaaatttccataccctggagcattgacagctttacagtacttcactagtgttgttggagttctcttatgtggacaactaaagcttattgagcatgatggccttaatttgaggaccatgtggaagttcttgcctgctgcggtgatgttctacatctccatcttcacaaacagtgaacttctactccatgccaatgtggacactttcatcgtgtttcgctcagctgtgccaatttttgtggccattggagagaccctttatcttcaccaaccatggccatcactcaagacatggctttcactttcaactatacttggtggaagtgtgatctatgttttcacagacaaccagttcactgtgactgcttacacctgggcagtggcatatcttgcaagcatgtccattgactttgtctacatcaagcacgttgtcatgaccattggcctgaacacatggggccttgtgctttacaacaatctggaggctttgatgctcttccctcttgagatgcttctaatgggggagcttaatcagatgaagggcgacagcgctaaagtgacaaactggctttcatctgatgtcattcttcctgttgctctgtcttgcttgttcgggctatctatatccttcttcgggttctcctgcagacgggctatctcggcaactggatttaccgtgctcggtatagtgaacaagctcctgactgttgtgattaatctccttatctgggacaagcatgcctcctttgtgggaacaattgggctcttgatctgcatgtccggtggtgttctctaccagcaatccaccacaaaaccaaaggcccccaaggctgagccaaaagaggagaatgatgaggagcagcagaaattgctggagatgcagcaagggctcgaaagtagctcaactcagaagcaagcgtcatcttaagcctggtaggaaatttggcgtcgatatcttactctcaacctcaagacggcttccctgtatcatattatgggatgctaaagaagaatcatttggccaaaggatgtttgttcgtcatgctagaatcctgtaatgctgttggcatgaaaaatctcagagaaaacttaatgtcactttaaaattctttgtttagtggtataccgtaattcatttgtt

SEQ ID NO: 17930 - DNA, 2405 bp, Oryza sativa
  ref <308>: DATABASE ACCESSION NUMBER: AK068346
  ref <309>: DATABASE ENTRY DATE: 2001-12-06
gatgagcggcgatgacgtcgagggttctcgtctcctcctcctcctcctcctcctccgccgccgccgccgcattcctgccgcgaattccgaacccctgcgcgaaccctagccaccgcggcgcgcctccttgcggggcggcgctctggcggcaccattctggccgtgcggtcaccacggccgcggccgccgccgccaccggcgaccactggggcgctgagtaccacggcggcggaggcgggcgcggcgggaagagcgccgcgggccccggcgtgcagtgcgacgtggacgtggtgtcgtggcgcgagcggcgggtgttcgcgtccgtggcggtggccgccgacgtcgacaccgtgtggcgcgtcatcaccgactacgagcggctcgccgaattcatccccaacctcgttcacagtgggaggattccatgcccgcatcagggccgagtatggctcgagcagagggggctgcagcaagcgctttactggcatatcgaggcacgcgtcgtgttggatctcaaggaggttccggatgctgttaatggacgagagctccacttctccatggttgatggtgactttaagaagttcgaagggaaatggtccatcagatctggtccaaggtcatctagtgcaattttgttgtatgaagttaatgtgattccaagatttaatttcccagcaatatttcttgagaggatcataaggtcggatcttcctgtgaatcttggagcgttggcctgtagagctgaaaacatatatttaggaaaccaaagacatggaactgcaaaatttagtggtgcaggctccaggtttcataacttccgtaatgcaaccactgagaatgatgccattgctcctagtaagttcaaagaaacacctccttctggtcttggtggtgtgcttgcttcacctccttctgagttgaacagcaaatggggagtatatggaaatgtctgcagacttgataggccgtgtgtggtagatgagatccatcttcgaagatttgatggtctcctggaacatgaaggggctcacaggtttgtgtttgctagtatcactgtgaaagcgccagtgcgagaagtatggaatattctcactgcatatgagaagttgcctgaatttgtgccgaatctggctatcagtaggattattcgtcgggataataacaaggttcgcatactgcaggagggttgcaagggtctactttatatggtgcttcatgcccgtgttgttatggatcttcgcgagaaacttgaacgtgagataagctttgagcagttgaaggtgatttctactcatttaaaggaaaatggcgcctagaacaacttggtgatcagcacaccttattgaagtatatggttgagactaagatgcataaagatacctttctctcagagtctatccttgaagaggtcatatatgaagatcttccatcaaacttatgtgcaatccgtgattatattgaaaaggcagaagctgagagcggtaactccacaagtagctctattgtagcatcaaatgcagatactattgctattgattatgcagaaggtaggcaatcagaacaagcatccacgtcatgttcttcgagtcctgtgaagcagagaccaaaagtcccaggccttcaaaaggacattgaggtcctcaaatctgaacttgagaaatttattgcaaaatatggtcaggatggcttcatgcctaagagaaaacaccttcgtttgcatggaagggtggatatcgagaaggcaataacacgcatgggtgggttcaggaagattgccagcataatgaatctttcactttcttataaaaaccggaaaccaagaggttattgggataatctggagaacttgcaagaagagatcaggcgattccagaagaattgggggatggaccctgcttatatgccaagtagaaagtcctttgagagagcaggacgttatgacattgctcgggcgttggaaaaatggggtggagtacacgaggtttctcgccttctttctcttgaactcagacgacctagaaggcgagccaactctgatgatgagagtaaggctggatcctcatatgccataacaaataaacacgcaagcaagccaaacaaaccaagcgtttctccggacaaacagaaatggctcctgaagctgaaggatctggatgctaattggattgagtactaactaggaggacttcactaatacggtccttcaaatttatcatctgacttcaatgaagaaggatctgataatcatgtacagataaaggtgggcaagtttcttgcctacaatactggattacaacactgtaagttttccacgcaaaactccccgctctgtaaagtattccacagcttttcttcgttatctgtcctttttcttcaaaagaaaatttgaagtgcttgggtct

SEQ ID NO: 17931 - DNA, 3414 bp, Oryza sativa
  ref <308>: DATABASE ACCESSION NUMBER: AK068347
  ref <309>: DATABASE ENTRY DATE: 2001-12-06
gatcgccgctgctcatctccttcctcccccaacgcgagtccaccgagacccacccctgcgacgccgccgcacaactcgagcggagcagtgcaggcgaaaccctactcgaagcccgcggcgagccaccgccacctccagatccgaccacaccgcgccgccgcagcgatggtgtacttcgattcgtgggacgagttcgtcagcaagtccgtcgagctcttccgcaaccaccccgacaccgtaagcccgccaccacgatcctctcctctcctcccctccgatcctccctcccggcttttcttcctgcccgatctaaccttccgcttcggtgtttgcatccaagacccgctacgttgtcaagtaccggcactgcgaagggaagctcgtgctcaaggtcaccgacaaccacgaggtactcggatcgaacttactttttttttttctggatttgtttcgtttaactaggccacgggcgcctcggcgaaaatttgggtgaaaattggcaagtaaacgcgaacggatggagcggaattgatcagatagagagaattctggatatgttgattctattcgttcatatatgtaacttcctatggattgatttcgttgtgttttgtgtagattatcgatttcgttgtgttttctgtagaatattcattggttgtgtgatctggttatcagcatgtgtaataccatccgccgtgagaacactgctttagcagggtcaatttgccaattacaatgcacctcctgaatatgctatggtagctcttgttatgaagtagagaatgtataataaacacttattgcatatgaaattggaacggctgctgtttgtctgagtgatgtatgattctgttaataagtgtgaaaagctaaagtaatttatgtattccattatagtttcccatatatgttcatgcttacctttccattctactttaagacaaataatttgtgtttaggaagtacacttgtgctcatcggtttctttttatacaacaatatgcaatatgacctactttatttgattaattaattattgaagggtgaatgtgagataggatatcaaacatattaattatacatctatttctctactagaaaaaaaatgcccatgcgttgcaacgggtgaatgttattttaatcttattattgttatacggtttagctaggatgaaattcaatgtgggaattcgcttggatatttttttttttagaaaattatgagctgcaattaggagtccgactttcatctcaagttagcatgcaaatttttctaaagagatttcttatacgactccttttgtatttccaaaagtaaacgaacctaaaatccgactcaaacacggatctatatttccaaaagcaaacgaacttaaaaaccaagtaaaatacggatgacgtatcaaaataccagcaaaaacatcttcaatttttataatagtagagaagagatagagatatattctagtccagatttgcaactgttctatgcttgtttgacccgtggtgtggctgaatttattcatcgttctatgctgcttgttgtctgctatatatgatgttcaacaagacaggattaacagtatataatggatgcctagctgttagttctgtgctcttctggtactactaggaaagctttgactgaaagaatgccacaataaataaatcactgtagtgtcttttaactgcacattgtgatgcatcagttttcatcagtttgtggttgaacaagaaggctaggattttgatatcaccatgatgaaccctctactctttactataattagtttaacccagtcaaatggaatgagaatattgccctgagtttctactgcaaacaaggagctgaaaatctgacagaatgttcttcagctgattgctctggcataattgacaactacttgttacttggtagtcctttctgtgtgtaaatgtttattgtgtgttgatgaatgccttgtcaattatattccacacaagacacaacccaataggtagcgcttaataacactgcgaaatcatttcttgcttacagagaatgttagagcttcttctgttgccatctatttggctggcaggtgtatattgcatgggaaagaaagtttttagctgtacctatgaacccccttggcaaatactgtgactcagaaggtgtggcgatactagatttaaaattacaatatactaaaccatggggatacgaggcaactgacataccattattttgacaactgctgcacattaggagcattattaatgttagcctcatattgtgcatgtgtgggaagtggtactctttttcttagcattttcacagcaatgtgtctatccaatgttaatgtcgtactcaactaaggaattgtgaagctacacagtgatcctctattatgctttgctggtgtacttttgatttctagggcaatggattgtcataaatggctttattttcctttgttagttgcacaaaagattagcacatgttttcttttaggaacaagagtagcaattacaagaaaagcagcgagaacaccgaagaggccagctaatggacaaagtaaagtctggacgagagtagcaattacccacgtggcatccaccgctgttgtttccaagtacaatttgtgtaattgataattcgaggagtattaggccatgatttgtgttgaaaattccagggcttcgtatttggcttaggatacagagaatacaattagttcctgttgttttctttttgtagcaagtttgtgttcgtgaactccaactggtaaaactctagaacaaatttggcccgtagctaatactactacttgcttgaaatactatttttatgttttattgcagttgtagatgttctgctggaatcttgcaatggatgcttatattatgttggttgcagcaaatttgttataacatgcgctctcctgtactactgtaactgttgtaatattccattgtatttgattaaagacattgtattctggtgtcaattgcgtatatgtatgatccaaataggaactactttgctgaccgaaatgtatactgcagtgcttgaagtttaagacagatcaagctcaggatgcaaagaagatggaaaaactgaacaccattttttttactctcatgacccatggacctgatgctgatataagtgatgtttcggggaaggaacaggcagaacaacagcaatcaaagaaaggccggggcaggaggcagtagtgtattgggtctgtcttgattttgttcaaagtaaatcataactgaagtggtggatggacattttggctctttgattgctctcgtaatgttctgaaggagatgtgagatattttgggattaattctcttgaaaagaactgagtaccttattacactgtggcctgatcagaaaaacaatcaaatcttcaacccc

SEQ ID NO: 17932 - DNA, 1694 bp, Oryza sativa
  ref <308>: DATABASE ACCESSION NUMBER: AK068348
  ref <309>: DATABASE ENTRY DATE: 2001-12-06
gagcgtcttgtgatctgtcctcctcgtcttccccgcctttcctccgccgcgtcgcctcctctatctctcatcccaacctagagagagaaagcagcagccgcggccgccgctgttcgccctgctcctctgccatggctgctgccgcggcaaggtgggccccggtcgtcggcctattgggcctcctgctgctcccgttcgcgcctgctccggcgggagccgcaacgcccgcgaggtcgccgccgtcgtcggcctcctccgccgtgttcctcctcagcggcgatgtctaccccaccgggcattactatgttactatgaacattggggacccagcgaagccgtacttcctggatgtcgacaccggcagcgacctcacctggctgcagtgtgacgctccctgccagagctgcaacaaggtgccacatccgttgtatcggccaacaaagaacaagctagtaccgtgtgcaaattcaatctgtactgcgttgcacagtggatctagccctaataagaagtgcaccacacaacaacaatgtgattatcaaattaagtacaccgacaaggcatcttctctcggtgtgcttgttatggacagtttctcactgcccctgaggaacaaatccaatgttcgtccgagcctcagttttggctgtggatatgaccaacaagtggggaaaaatggtgcagcaccagcaacaacagacggcttgcttgggcttggtaggggatcagttagcttgctctcacagctcaagcagcaagggatcaccaagaatgtactcggccattgtctcagcaccagcggagggggattcctcttctttggggatgatatggttcccacttcacgcgtaacttgggtatccatggtccggagcacgtctgggaattactactcacccggctcagcaacactgtactttgatagacgttcactgagcacgaagcccatggaggttgtatttgacagtggtagcacatatacatacttttctgcgcagccataccaagcaactatttctgcgatcaaaggtagtctcagcaagtcacttaaacaggtttcagatcctagtcttcctctgtgctggaaagggcagaaggcattcaaatctgtttctgatgttaagaaggacttcaagtcattgcaattcatctttggtaagaatgcggtcatggatatccctcctgaaaactacctcattatcactaaaaatgggaatgtgtgcttgggcatccttgatggatctgctgctaagctgagtttcagcataattggagacattacaatgcaggatcagatggtgatatatgataacgagaaagcacagcttggttggatccgtggatcatgtagtaggagccccaagtctattatgtcttcctttccatgatcatccctcacatttgatccatgagctggacatccgcttaatcataattggatgtatcactgatggagttggagaaagttattgctagcctcaagtcaccagtactgtgtaagtgaagaatgacaatctgttgccatccaaataaagtctgtactcttaaacacaaatggatggagaaataagatgaaatgagagaaggatgagcatgtaatagtaatagaggctgataacaaggcactaacctgtattctcctgttcatggtgaataatcatgtgccatttatttggaaccaaaattttggatgc

SEQ ID NO: 17933 - DNA, 1222 bp, Oryza sativa
  ref <308>: DATABASE ACCESSION NUMBER: AK068349
  ref <309>: DATABASE ENTRY DATE: 2001-12-06
atggggcaggatggcgctgtcgccgacgggtggggaggagaccgacggggcgaggcgggagaggaggtccggcggcaggcgacatggcggcggcagcagcggcgaccacgtgacggcatcgaagatcgcccacacctgcagcggccgccgcatccgcgtctccctccacgtcgacgacccgccggccgtctcccgcctctacatccacgatccacctcctcgacaccgacaaccaaccatggccggacacttacgacctccgacacgccgaggtcgtcgccgcccaccacggctccatcctcttccggacccgcgtcccctttgccgacccggacttcgtcgcgcccggacactttcccgtcgactgcttcgtctacaccgccggcgccaccgccgcctctcccccgtcgctcacgcagcttccccgttgcttcatcgacggcttctccgacccggtcgaggacgaatactacaagccgtaccaactccagcgacaacagatcatgctagacgagaacatcggcttcctctcctactctggcgacggcggccacgagttcatggtggcggacatcaggaactaccacggtgattccctcgagctctgcatcttcaaccaccatgccagctcgccgtcgccgtcgccggagcaatggaggatccagcgtcttgagatgcatcacgcctcggcgtgcaagatcggtcacagcaagaagcagctcagcgatgggtgaacgacgtcgtgctcaccctgcacagccgctacctgcgctgcgtcgacttgtacaacgacatacgcctcatcgacaccaacaacctgcgaagcttcagctacatcccgctgccggaggaggcaatgacgcacgaccgccacatcgatgaagacaagcccgatccggctcgccgtgtctccatcaccagcgcaggctcgataaatcttgtttgcatagacaacgtcatcgtacgcagcgagataagaagggtaagagagaggagactgacctggacatgttgacatgtaggaccacgtggttcccacgctgactcagcagccacgtatgacaaacccgggatcaaaaccatcaaatgatctagtgtgaccggttttgattagtcaatggacgcgagatatttacagtttgaggatgatgttgtaactggatgataagttgagggactttcggtgtactttttccggccgaatataatctgtttagaatcc

SEQ ID NO: 17934 - DNA, 2073 bp, Oryza sativa
  ref <308>: DATABASE ACCESSION NUMBER: AK099052
  ref <309>: DATABASE ENTRY DATE: 2002-08-28
gctctccctccccacccaaaccctcgcgccgccacccccagcctccgcccggatccagaccgcctccgccgccgagcaccatgggcttcgacgtcggcgtcgtcgccttcaacccggagggctggggccctcccgacaccgcgccggcgccggcatcccttggcggtggcgccgccgcggcctccatccccttcgcgcccttctcccgctcggacaagctgggacggatcgccgactggacgcgcaacccggcgggccccgccgccctcgccgccgcctcccgcgactccgtcttcgacttcacctccgtcgacgactccctcgccgccgccgcggaggactcctcgttccgcctcgtcgacgccaagccgccgccgcgccacccgcggttcggccccaagtggcgcttcaaccagcgtccgcagctcccgcagcgccgcgacgaggaggtggaggcgcgccaccgcgaggccgagaaggagcgcgcccgccgcgagcgccacttccagaacaaccgctcccaccaccaccccggcttccgcggcaaccagtcctcgtcggccaagtcctccgtcgacatccagcccgactggaccatgcgtgagcagatccccttcgccaactttaccaagctctccttctccgtcgccgaccagcccgaggacctcctcttgtgcggcgccgtcgagtactacgaccgcgccttcgatcgcgtcaaccccaaggccgcacgccgcctcgagcgcttcaagtctcgcaacttcttcaaggtcaccaccaccgacgaccctgtcatccgccgcctggctgaggaggacaaggccacggtgttcgccaccgacgccatcctcgccgcgcttatgtgcacaccccgcagcatccactcgtgggacatcgtcgtgcagcgcgtcggcaacaagctcttctttgacaagcgtgatggttcccagctcgatctgctatctgtcaacgagaccgcgcaggagcagctcccagaaaacaaggatgatatcaactccgcgcactccctggctgtcgaggctacctacatcaaccagaacttctcgcagcaggtgcttcttcgcgatggtgagaaggttacctttgatgagcctaacccgtttgcttctgagggcgaggaggcagcatctgttggctaccgctaccgccgctggaagctggatgatgagatcagcattgttgctcgctgtgaagtgcatgctgtgaatgctgatccaggtggtggtcgtcagttccttactctcaatgcgctcaatgagtttgatcctaagattactggtgttgactggaggcagaagcttgagacacagcgtggggctgtgctcgctacagagctcaagaacaatgccaacaaacttgctcgctggacttgccaggctttgcttgctggtgctgacatgatgaagttgggatatgtgtcacgtgtgcacccccgtgatcactacaaccatgccatactcactgttatgggatacaagccaagggattttgctacacagatcaacctcaacacatcaaacatgtggggaattgtcaagtcgatcgtggacatctgcatgaagtttgaggagggaaagtatgtgcttgtaaaagatccagcgaagccacaagtgaggatctatgaggtgccttctgatgcatttgagaatgactatgtggaagagccacttccggaggaggaacaggttcggccgccatcagatgatgttgatgctaccgcggaggaaatggatgcagcggcagaggctgaggcgaacaatgcagcagcttctgcaggtggtgagggcgagaagagcgcagaagctgctgccgcttgaagggctcctcttcaggttgccagctagatcctttttggtttaattatctgtttttatggtttacatttaagagttgaactgcctgttatcgatacagtggtcttgtttggtcgatgataaaactgttctgtttttcatcttaaagatgctaagttgcccgctcaatgactatgttggtactcctagtttgatatcacttctggctgtttattgaccatgttactatgtttaaacc

SEQ ID NO: 17935 - DNA, 1176 bp, Oryza sativa
  ref <308>: DATABASE ACCESSION NUMBER: AK068350
  ref <309>: DATABASE ENTRY DATE: 2001-12-06
gaatccatccatccaacccatcgccttccctcccggatcacctgcgtgtatatatatatataagctttaccttgcattccaagcttcgatcgatccatcgatcgattgatcaaatcttgtgtgatatagcactagtttgatgcgtgcgagatgggcgggatagctcgacgacgaggaggaggagatcaaggtggtgttgctgctgctgccggcggcgacggcgaggcggcggcgtccgggttctccagcggcgattcgtcggcgacgacgacgctgcggtcgccggcgtcgtcgagcctgaccgacgatggcggcgaggtgacgtcgtggacgtcggctgacggtggtggtggtggtgactactgctcgttttcgtgttcgtcggagtcggagttggagttggagtcagacgacgacgacgacgaggaggaggaggagatgatgcagctggatggtggcgggcacgccgccggcgggccgctctacgagctggcggcgccgctgctggcgcagcttcctctcaggacagggctatccaagtactaccaagggaagtcccaatccttcacatcgctctgcaacgccaggtgcgtccaagaccttgcaaagaagacaaccccttacatcaccaggatgaagctgcagctgcgcagaggccatggagtcgtggatcggttgtcgaattcgcgtcgcgctccagggccctgcagcaagacgatggcgaagaaggcgacgaggtgctcgtccgatcgattgctgtcaagagcaagggagcacaagcctcttcacagcagcagcagcacacctgcacaacagagcaagaaagagctgtcaagatgctagttgaaaggcagtacaggggtactgaaaaaaaaatggagatgaggtttttcaacaaaatgaactcttcagcaatcagcactcagctgcactggagctagaaatatagaatgtctccaggtctcctccaaacgatgctttcagaaggaagttttgctcagttttcttttcttctgtggatcattgtgtcattttacttgataaaatggctgagccgatgttagatacatcatgatcaagccaacataatctggagacatttcatcaagtttgtacatagatgcaatattcataagatatattattttgtctaatacataattattttgactttgg

SEQ ID NO: 17936 - DNA, 2075 bp, Oryza sativa
  ref <308>: DATABASE ACCESSION NUMBER: AK068351
  ref <309>: DATABASE ENTRY DATE: 2001-12-06
gggcgcccggccggccggagacctcttcttcttcatccatcctttctttctttctttctttcctaggcctaatcttacataaattattcacacggacaaatctagctaagcacaaggtatgccgccggcgccgtcgcaggagcaaactaagctggcgccggagaagcagcagcacatctccggccatggcgagcaagccgtccggtaccatggatggaaggtcatgccgtacgtcatagggaacgagacatgcgaaaggctggggacgatcggcacgacggcgaacctgctggtgtacctcaccaccgtcttccacatccccagcgccgccgccgccaccctcctcaacgtcttctccggtacctccaacctcgcccctctcctcggcgccttcctctgcgacgcctacctcggccgctacgccaccctcgccgccgcctccatcgcctccttcctcggcatgcttgtgctcaccctcaccgccgccatcccatctctccaccccccaccttgtgcctcctcctcgtccacgtcgtgccagggccccacgcaccgccagctcgccgcgctcctcgcctccttcgccttcctcgtcgtcggcgccggcggcatccgcccctgcaacctcgccttcggcgccgaccagttcgacccggccaccgccgcgggccgccgcggcatcgccagcttcttcaactggtactacttcaccttcaccatcgccatgatggtgtccgccacgctcatcatctacctccagagcaacatcaactgggccatcggcctcgccgtgcccaccgcgctcatggccctctcctgcgcgctcttcttcatgggcacccgcctctacgtccgcgtccgccccgagggcagccccttcaccagcttcgcccaggtgctcgtcgccgccgcccgcaagaggcgcctccctgccccggcgtctcctgccgacgacctgttcgatccgccgcaccggagcaagctggtggccaagatcaagcacacggaccagttccggtggctggacaaggccgcggtggtgacggcggaggacgcggtggtggacggcatgagcgcggcggcggcgaacccgtggcggctgtgcacggtgcagcaggtggaggaggtgaaggtgcttgcgcggatgatcccggtgtggtcgtcgtcgatcgtgtactacgtgatgctgacgcagctgggcacgtacacggtgttccaggtgatgcagtcggaccggcgggtggggatgtcggggttcgaggtgccggcggggtcgatggtggtgttcaacatggtggcgctcacggcgtggctgccggtgtacgaccgcgcggtggtgccggcgctgcggcgggtgacggggcgtgaggaggggatcagccagctgcagcgcatcgggatcgggctggcgctgtcggtggcgacgatggcggtggcggtggcggtggagcagaggcggcgcggggcgggaggagggtcgtcgtcgtcgtgggcgtggatggtgccgcagcaggcgatggcggggctgtcggaggcgttcgcggcgatcgggctgaacgagctgtgctacaaggagtcgccggagagcatgaggagcgtggcgggggcgctgtcgccgctggcgctggcggtggcgagctacgcgagcggggcgatggtgacggcggtggagcgggcgacggggtggctggcgcaggacatcgataagggccgcgtcgacctcttctaccttgtggtgggcgccatgtcggccgccaacctggcttacttcgtggtctgcgcgctctggtacaggtccaagaacatcgccgaccacggcggcgttgagcttcttcagaccagctccaagcacaacgccgacgcgccgccggccatggcggtctgacgacactgacagctactacacacgtacgctgacttttcatacttactatatactacttgatgcatatgcatgtgtccactccatgatgaacacaacagagacagaaagaagagagatgatacttgtacgatccagtttggaattggactacattaattacattagggatgaatgaatgtaattgtaaatc

SEQ ID NO: 17937 - DNA, 1603 bp, Oryza sativa
  ref <308>: DATABASE ACCESSION NUMBER: AK068352
  ref <309>: DATABASE ENTRY DATE: 2001-12-06
gagcccgtctctggcctcgtcacttcactccactggcggcggcggcggcggcgacaggactcccgccgccgctcagctccggcgtcgccctcccggaggtcctcgtcgtctgggacatcctggtacggcttccccccaaacccctcctccgctgccgcctggtgtgccgcgcatggcgccgcctcacctccacccgcgacttcctcctcgcccaccaccgccaccagccctccctccccctcgtcaccggctgcagaaacggcgacgtcctcgccgtcgaccgccggcgccggctcctccaccctgtcgcccggttcgacagctccgtcttctgcgtggaggaggcctcctgcgacggcatccttgtcctctggaggaagagggccatcggtgcccattccagtgtccgcttctcgatctgtaacccgaccacgcgtcagtccggtgacatcccgctgccgctgctcaccgggttcatgctcatgggcttgtactggcaccgccccaccggcgagtatcggcttctgctctacaggatagagctacctgcttcggagcggctcgttgatgttctgatccccggcgatagaaacgcctgctacgtctacacattgggctctggcgatttgccgaggtgcattgggtggccagaggcggaggcaaacggcgcatctgtgctgctgcatgggagcctgcattggtataagagaatcgaagatatgattttggcgtttgacattacagccgagtcgttccggtggatgcggtctccattcggcaaggcggtgtggagagcgtttcatggcctgtttgagattaattgtatgctcggcatgtactgctgtgacgatggtgcgacatttgtagatatctgggtgctggaggattatgagagagaggtctggtctctcaagtaccgggttgaattgccagttctagagatcaggagagagcttgatgtgaagcgtgatctttacagtgtgatggtttcttccgaggatggggatgtgcttgtgctggttaactgcaaacgagccatgctctacattggtactgatggcaagctgttggcgagtttgccacatgataatgacggcctcagtattactccagtgaagcttagagcaagccttgttccgcatgcattctttccatctctgctggactatgtcgtgaatgcttcgcctttcgtgtgatgcctgctgaatgagtgtaagacccatctgttatctgatgaagtcagttgggtggaactcttgtcttcagcgctacatgatgccatgaaaagcttggcgattaccacattctggagttggctgacctgatactagtcttgctggatgtagctgcttggtgttttatctttgctggagttgtacattgtgtctattaggtatgtgctatcactttgactaggtgaagccaggggaaggtttatagtcctagtttactgtctttaggatgttctgttaaaacttgttgagttatgtctgttagatgactggggtctgaccagaaaacctgatattatcctgtatgttggaaatacctgcagttccttgctttgctttcaatgaaaagcaaggtcctatgacctttatct

SEQ ID NO: 17938 - DNA, 1201 bp, Oryza sativa
  ref <308>: DATABASE ACCESSION NUMBER: AK068353
  ref <309>: DATABASE ENTRY DATE: 2001-12-06
gacaccgacttaacacttggtcatttctcatttgtgcgtcacggagtgagcagtgtacatacgttactagctcaaggctgcagcggagagagagagagagagagagagagagatgggcgctgtggctgcggttcgtgccgcggtcctggtcgtggccgtggccctcgccgcggcggcggccggcgcgtcggcgcagctgtgcgacaagtactacgacgggacgtgcccggacgtgcaccggatcgtgcggcgcgtgctgaagagggcgcggcaggacgacccccgcatcttcgccagcctcacccgcctccacttccacgactgcttcgtccagggttgcgacgcgtcgatcctgctggacaacagcacgagcatcgtgtcggagaagtttgcgacgccgaacaacaactcggcgcgggggtacccggtggtggacgacatcaaggcggcacttgaggaggcctgccccggcgtcgtctcctgcgccgacatcctcgccatcgccgccaagatctccgtcgaactgtccggaggcccccggtggcgcgtgcccctcggccggcgcgacggcaccacggccaacctcaccggcgccgacaataacctccccagcccccgcgacaacctcaccacccttcagcagaagttcgccgccgtcggcctcgacgtcaccgacctcgtcgccctctcaggggcgcacacgttcgggagggtgcagtgccagttcgtgacggacaggctgtacaacttcagcgggacggggaagccggacccgacgctggacgccggctaccggcgggcgctggcgaagagctgcccgcggcggggcgggaactcgtcggcgctgaacgacctggacccgaccacgccggacgccttcgacaagaactacttcgccaacatcgaggtgaaccgcggcttcctccagtccgaccaggagctcctgtccacgccgggcgcgcccacggcggcgatcgtcaacagcttcgccatcagccagaaggccttcttcaagagcttcgccaggtccatggtcaacatggggaacatccagccgctgacgggcagccagggggaggtccggaagagctgcagatttgtcaatggaagttaagggaggaggacccgttagctcgaaggactgagttattcttgtactgtaaaacggattgaagatcaatttatttcatttacggatttg

SEQ ID NO: 17939 - DNA, 2095 bp, Oryza sativa
  ref <308>: DATABASE ACCESSION NUMBER: AK068354
  ref <309>: DATABASE ENTRY DATE: 2001-12-06
gaggggaagccaagagccaggcaaatctcgagcccaacctgctgcacgcaagaacagagaacgagcagcttcggcggggaagaggaatcgaaagagaaggaaattttgatggcggaggaggcgaagccggacacgcagctgttccagctcctctccgacctgctccagcaggtacaagcgccgccgccctctcgatctgttgtcgatttcttgtttttggattaggggtggttcatgatttcgccgacatggatcttcgcttcgtgcggatgttgttacttttgcggatctagtatcacatatcaatctcggttgataccattatttatgtaaacctagttaatttgttttggggatagatgcaacatggcctatggcctgggattcgacctcaacgacatggctgggagagaagcaaaatagcagcatagtgcataggctcagagttgatgtagttaatctctttctggtggattccttgctttatgttactatgcactgcgcgccctgctgtgtaatgtttacgaatctgaaagagtgaaacatgggctattgatttgggtcattgggtgattgaaggtcaatgccaactatcaatctactggtgattggctgggattgattccttctcgttctagcaatcaaacaaaatttcctatctaaatcaagctgatctatatcagcccctgtttcaaaactctgaactctatcaactacacccattgcaacctggaggtgtgaaactctttttcttttattttcatatattcatatttttcaagctatgacaagacaaaacaacaacaatagaatcccttttctttttgctgtatttcccatagaaccacagaatcagcggcatgatcatgtatattagggccaataacctcacttgaaacaactagtgaccattcaccggtatctgaaactcaacagtttaccctatgagtgataggaacaatatacaaaatgctgaatcagtactacaaacttttttttttcatgagtgtagtcttattcttataaactgcatggtaatctgagtgtggaaccatgaaaacattcatagacatgatcacttaactgaacacttacttctcggtgacaagtgaaatgccatacaggattagttcattttagccctctccatgagggttctacttaacattgtatctgcaaggtattgtagtctattggaccttggtacccccatcactgactgtcctgtttgtaggcgtgtctacatttttgcatagcatgtaatgttttgtcattattggggcatctgaatctgtatagttcattgattatagcattggaagtttggatcctcattatatgcaggattgcatgtggttgttactttacattcatttctcgcagttcctcaggatatttctgatttcttactattcaacatcatatctttttgtgatttggataagacgacaattgtcttttgatgcttgactatgatcattgagaaagtaactagtatttgattattcaaatgcaggtggagtcaatgagcaaccaggaagaagtagaattgcgtgctaagatcgaagcactaggactagaagttaccaaggtaccagagcagacacctaagcagcttgatgaggtaactgcaacaacctctgtttaatcccctttccgcgaatttatttacattttctcatctcatttgttttcgttcaacgctatctttagttagagatcgcagcagagctggacaaactatcagcgaggcttgataatgttgacaagatgatatcttctgccatggcctcggatccagaggtgaaatcccttttgagtaccactgctgatatctggatgcccgtcatcaccgcctctgccgatgaaaggcggggatttgcaggaacaagtggtgaaagcaaccaagaagagcaggagagttccaaacaatagcctcctacatgtaccttcacatgagtatttcttgaccatgtatcaacatttgtagacaaaacaagcaataagcacacattcatgagatggtaaataaatctgataacttgtggtggccattttgtacatcaattcttgagtcttcagtttgttatttttc

SEQ ID NO: 17940 - DNA, 3080 bp, Oryza sativa
  ref <308>: DATABASE ACCESSION NUMBER: AK068355
  ref <309>: DATABASE ENTRY DATE: 2001-12-06
tcaggaccagaccgcacgcatcagggttgaacatgtcataagggaagagaagttcatgcaagcatatgacttaattgaagtatactgtgaacttatggtggcacgcatgtccattattgactcacagaagacttgccctattgatctgaaagaagccatagccagtgttatatttgcatcaatgaggtgttcagatgtcacagaacttgcagatgttcgcaagcatttcacaagtaagtatggaaaagagtttgcagcagcagctcttgaagtgcgacctgacagtggtgtcagccgactggtcattgagaagctgtcagctggagcacctgatacacagaccaaaatcaaaaccttgacctctattgcagaggagcacaacatcaaatgggagccaaaagcatttgaggagaaattgccgaagcaaaatgatgatcttctgcatgtgacctcaacatatccgggaggaaatattccaactaggggatcatctgcttctaattctggcatgccaacttcacagcctgctgcaccttctcattcatatatggaatcttccaattctcacatgtctacggcacattcatattcatcagctgaggttccagacaatagggctccatatgtcactgccaattctaatgctttcccccaagaaaacagaaggggttctgatgctccaatgtcccctaggtcccagcatggtcctaacagtttctctcatgatactgctggaggttcaaatgtttctagaccttactcccaatatggtgcaacagttccagatacagatacagcgtccaggagggaagagttcaatcactctagggagagaaaatcttcagttagtggttccaattggaatatagaattcaaggatgcaacatctgcagcacaagcagcagcagagtccgcagagatggctagtattgctgctagggctgctgcccaacttgctagtcgtggaaacctttctgcggagcaaaatactggagcttttgagtcacctgcttatacccatgaaactacacccaggaagcaacaagctgaacatttaatgaaggatgggcagaggagttctaatgagcagagttcaggggcttatgatccaagactcatctcaagtaatgatgctaggaaggatggggggagaacagaaacaagccgtgtaggtagtcagaatatgccaactaattccttgggtcaatccccaccatatagccctcatattcacagtgatgagtatgacatgccaactgatccgcatcgttctcattcacccgatcctcaatattctgatgattcatctgagaaagaaagcaactttggaagacctgaggatcatcagtttaatttacctggagaaagattgtccgaggctcaacttggtgggcacaacatcaaggacacggaaagcaagcatgctacctttgatcaagagaacacagacaactactacagcaactatagctcttcccatggtacattcacccatggcagcagtaccatttgggacagtcagaatgataaagctggacctgattcttcagctgttgtttttgatcaatatgattctgatgtcggagaagaaaatttattggatcctttctcttcaaagcacactgaagaacccactgttgaagatcacaagggattctcaagtgcagattggggtcaacagcatagaaatgaatctccagttaatcatagcagctcaacactattttcaggaacagaagcaaacagaaaagatgtttcctcacctcattcttatgataatgtgccacctacatttgactcggatggtgttagttctgatgaggaaatgaccacaggcatgcatgcaaggtctttaaggtctcattccagaggatccgatttttccgagagtagagaaaatataatttctggaaaggttgtccatgatgttaatgaaaatattgaagatcatgtatccatgtccaggaagaattaccttaattcatctggttctaatgcattcaataaggagcgctacagtgaaagttcacctagatctgattactcatgggttgatggggaattggatcgtacaaaaatcagagatcttgaagaagaaagagtgccacataaattggaaggtgcatcatcattgacaacaggagaaaataagaatcagctgttttctttaggcaggcaaacttcaacatcatctgctgactatgatgaaggcgatccaggcttgaactttggaaggctaactcctggactaagaaacaaactccggcaacctcctccgtacataaaggattctgggaatacctcgttgcataaggttcctaccgccattgaaaaatcagtgcactctgaagaggatacctcgtttggaaatacaagaaatacttctacaggtatggccaggagttcgttcggtgcagattacaacagtgaacttcatgaccaaaatcaaagtgttggagcaagtgtggaagctagatcaaccatgaggaattactatgggtcagaaggtgatagagggaagttatctgagcaatcttataatgctccaagttctgtgatgaataagagttctggaggtgtaaattccagtcaagatctgtaccatgaaaagccaggtgctggagcccgcaggggaactacaacaaaaactgccaaaagttactttgattcagatgatagcgaaagaaagcacctcaaaaactgctccgtcgcatgttcaccccaagcttccgacagactatgattcgtttgctgcacattttatgtctcttcggaccaatcgccgctagttttatgatcgcataccagttgagttttacatgtgaagaagtcgtatttacaaacacagggatacatacattctatagcttcgagttgacatttgtacagtatatcaactcatagcactcggtcttatatgttggtctttttggcgagctattattctttcgttctattttggcctcatgttcatcacatcttaggtattgtcattatgaaaagattgttagcgtgtaataagcacattatgcagtcagatgtacagacgtttacagaacttaagaggtttaccttttttc

SEQ ID NO: 17941 - DNA, 1297 bp, Oryza sativa
  ref <308>: DATABASE ACCESSION NUMBER: AK068356
  ref <309>: DATABASE ENTRY DATE: 2001-12-06
gatttccgcctcgatccaattccaaatgctccccgccggcggctacccgtcggccgccgccatctccttccccgacgccgacgtggatgacgactccgacgacggcgacttcaccgacgcccccctcatcgacccctccgaccccaccttccccaacccggcctcctcctccgccgccgccgccgccatggctactccagcctctgcggggggcgggagcgggagcgtgggaggcgtcggctcctcctccggcggcggcgagaggaggccgctgttccagcggctgtggacggaggaggacgagatcgtgatcctccgcgggttcgcggagttcaccgcggcgcgcggcacggcgttcgcgtcgcaccagtacgacaccgaccccttctacgaggacatgcgcggccgcctccagctcggcttctccaagagccagctcgtcgagaagctccgccgcctcaagcgcaagtaccgcaactgcgtctcccgcctccggggatccggcagcgccttctccttccgctcgccgcacgagcaggccatcttcgagatcgcgcgcaacatctggcgccccaccaacaagcacggccgggacggcgactccgacgacgaggacgccacgcaggtcaccccagcgcccgttcccgtgaacaccagccccaatgaccacaatgccaattacagtgacaatggagggctcggaacccctcagattgccggtcatgccacctcagccggctgttttagatgccgacaagagttgcttgacgcctctgtttaaggagatggtacgtgcagtgataaatatcgaatcaaacccgttcggtgcacaactgtccgagccgccacatggtttgcccatggaaggggagaaatggaggaagcagcgtatattggagctggaggtatacttgaaacggatcgagctgctgcaggaccaggtgaaggctacgcttgaggagctcaagtcctccgcgcctgggacttgaatgaccgagcgtgaaggcctgtcttgatgctcatttaggattcttggtatgattcgtagtggtagatgtttaggtgtttttgcagattttcgtccataaaagaatactgttgacttgtttgggcttggaactagcttattttatgtttctaattgtttacatgattatttagctttcacttcttgcctcctttcctataagataggtatatggttgtctctaagtggtatatttggggcggccagtaaggcatcctgatagaagggttggacacttcaaattaatttatgaggattacagattattgt

SEQ ID NO: 17942 - DNA, 2057 bp, Oryza sativa
  ref <308>: DATABASE ACCESSION NUMBER: AK068357
  ref <309>: DATABASE ENTRY DATE: 2001-12-06
ggataggttgatatttatatgtgctccgttcatgagggggcagttgccgcgagagagatggcggcggcggtgctgaacgccctcgcgccggcggccaccgtcgcgcagctcgccggcgcggacgcggcggggctggtgtcggcgatcctgcaggcggtgcgggcggcccggcggaaccggagggagtgccgcctcctggcgcggcgcgcgatgatggtgggcgacctgctgcggctgctgccgccggagtcggagacgatgcggcggccggaggtgaggcgggcgctggacgggctgggcggcgcgctccggcaggcgctggagctcgtggaatcgtgccaggagagcggcgccgtgcgcggcttgatgacggcggggaggcaggcggagcagttcagggaggtgcagggcgagatcaacgactacatgctactcttccccgtcgtcagccacatcgacatcacccgccgcctcgacctgatttacggcctgctgcttcctgcagactctcaaccccaccagatgccagaggatgcgccaggttcacctggcgaccattttgaagctgatgttaggaatgtggagatcactgtagctgaggtaattccgtttgaaagcaatcaaactataacagagccttttgagttcggtgaacaccatgtagcaggtcatcaggaaggtttggaagagctgctgtccaaagtgcagaggttgaaatggctttgctggtggtctcagcatgattctctagagcgtccatcaacttatgacttattaaaggctgctacaaataatttctcatctaaaagtaaaattgcaagtgggggttgggctactgtttacaaggctcaaatgcgtaatagtcttgagattgcaatcaaagtatatcctatgggcacgggagaaaaacgtgtattttcccagtacgaaagggagcttaatttacttacgaagcttcagcatacgaatataattaaacttcttggacactgcactggagaatgggagctgattttgatatatgaatatatgcccaatgggagcttggacaaatttatacatggcccaaatagagaagtatcgtttgactggttttcgtgcttcaaaataattcaagggatagcagagggtctgctctatctacacacgtatgaagctgagatatgcattgtgcatagggatttgaaaccgagcaacattctgcttgattcagatatgaatgctaagataggtgattttggtatagctaaaactataagcccggcacggcagcaagacacatatgtatcaggcacatttgggtatattgctcctgaatatcttcgtggaggtattttatcaacaaaggttgatgtatatgcctatggtgtcattcttctagagattattactggcaggaggtcctgtattccctgtctaaaagatgatgagtatgtgcatttaactgagtatgcctgggatctatggagaaccggaagatcagctgagcttctagatgcagcattgcgcaatgaggctcgaattgctgagataacaagctgcattcagatagcgttgttgtgtgttcagaaggatccggctgaccggccttccatgttggatgtgcttgcgatgctaagagatgagaagattgtagctgcccctaagaaaccaggtgatcttctccttggagacgaaacgagcgtagagtcaggtgatcttctccttggagaggaaacgagtggagagactgcacattggttcgcaagcagcggcgctacttgcagttctactgagttcacggtgccccggtgagaagagattttgtcatatttgaagctggtggctacttaaggtgcaagtacgttatgtataaagctattacctttgattattcacagcgttgcaagcaaaataagcatggtgaatgtgtatttcagattctgagtaattatggatttaccatatgtgatggaaataaattaaacatacagaaggtggaatgtatagtatatcataaatattttagacaaaattggctacaagcaatataattctgtggcatttgcttatgggcg

SEQ ID NO: 17943 - DNA, 1690 bp, Oryza sativa
  ref <308>: DATABASE ACCESSION NUMBER: AK068358
  ref <309>: DATABASE ENTRY DATE: 2001-12-06
taagcgaagcaaagcagcggcgacacggcggcgatggctgcggcggcgaggaaggggacggcgacgccgctgggcgcggtgttctcgccggaggagacgaggagggccgtggcgcgggttgccgaggccgtcgccgaccgccgcgccgagctcggccgcctccagggcttctccgccgacaacgccgccctcgtctccctcgtccagaggctccccgacgaggtctcccacgacatcatggttcccttcggtggcgcggcatttttccccggccgtttaatccacacgaatgaactactggggaggggtactatgtggagagatccgccaagcagaccaccgagatattgcacaggagggggatggagctggaagctcaagtggaagcgatgaaggcaactatctctgaccttgaagctgaggcgaagttcttcgaatcaactgccgccgaggcttctgaaggtcttattgaaataagggaagaatatgatgaagatacagaaataaattcatcaacattggatgcttcaagttctgcttcaggcatgccagacaaagacagggaatatactcaaatcatggcaaggttagatgaacttgaaatggaagaaaatgatgctggtagtacttctgaagaagatggagaagatgatgaggatgacgaagatgatgaggaagatgctggaccaagtgaggatgataaggaagatgaggaagaagagaatattctaattgatgacaatgatcatcataatgctagtttgggtgcctcattttctggaagtggtggtaatgatcagagtcatgaaagtgcgcagctgaagagtgctctgaagaagccaggaggaagggaaatactgaaaagcgcttcttttgcaccctcagccagcacacctcactcggtttttccaggacagacttctacaataaaccctggaattcagcttcctcttaaaaaagctgtttcttttcaagatgataacaggcatacagttggtccatccaagtctcttccattgccacagggtccaaaacactcgagtccaatacttcaggtttcttcagataaccctacatctcatgatcggaagataatgtcaagtggacaaaaggccttcacagggtctattattgaacatgatgataatatttcaacccttcaaccttcaaagagtgctgctttgcagaatcctgctagttcatcttcaagacctgtatctagattcaagatgcagaagggagggcgttgagaccatatcgttaacactaggatgagtgcgaaaccgtcaacttagatctttggtaacatctgcattgtcaacaactgctataagcgaaagctgcattgtcaacaactgctataagcgaaagcgacaggtgtggtatcaagaccacagttctaagatgagaccttggagctagcttgtctgtgcgcggatgagaaaattctttatacccagagtgtagggctgtaggcactagttttggtctgaggattcagacatttagggaaagttcctgtaattcttgttctagtttacattgatgccaacagcccaacgcattgatgggtgttacttgtgatagctctgtgcaagcattttgtgatttgtgtagcactacatacagtgacctcatctggtccttgcatttgcctttatggaatgcaacttgagtggaattgtatgtg

SEQ ID NO: 17944 - DNA, 2099 bp, Oryza sativa
  ref <308>: DATABASE ACCESSION NUMBER: AK068359
  ref <309>: DATABASE ENTRY DATE: 2001-12-06
ggatggggggaccgggctagaacgatttttcaccatctttatctggtcggtttcatgataaaactgtgaaaagttgtgtcttcttccaaagctgtgtgggtatggaagggtttgtacgaggagagcgcatggagggtttgggggaaagaagaaaagattcacgccttcttttgccgcggcgatggggttttgggccgtgggcggatgcggccgagagagagagacctcccgcgcggcggccgagagcagccgaggcaggggggacggccggcggcggcgaccacgaagccgtcggtttgttttgttactactccatttctgttccccctccctgatcaagtaaactagtttgtaggatcgcatcaactcggatgaggaatttttgccgattagatttagttttcaagctggaaatatggtgattcacgggcctttttcttgtggtggttgtcgttgttgttcatgccatttttctgaagtgaaagatgaacaaaaatttccactgaaaagtaatattttgacactgcaggtttgttgaaaaacgatgggcacatcgtgcgaaagatgcagacggcgcgatgagcaggactacaggaatttggatgattcccaaaaacacttcttgctaactatgatgggtgattttcaacatgagatgatcattccaaaagaatttgtgcagcgtttaaagggtgacatccctggagaaatccaactggaaacacgtaacagaaacagtcacactgttagagttgacaagacccaagaaaaggttatctttacagagggatgggcacaattcgtcaaaacctttgatctgcagatgggtgactccatgatgttcagattcaatggaaattctcagtttgatgtcattatagttgatcaaattggccgcgagaaagcatgttctgctgttgtggatgattctcagaatcctaatgtgcaagaaaggcgtgtagatgctactgaaacattgaacagttcgcgcgctcattctcagcccatgccaatgcagtcaactactgaaactgtgaaccattcacatgctcgtccttgtcccatgcatactgctgttgattgcatgcccctttctcatgctcatcctcaacccatgccgatgcaattccctaccgaaactgtgaaccattgtcatgctcctactggtcccatggaaatgccacttgaaaacgttgccctttctcatgctcatgctaggcccttgcaaatgcagtcacaaccaacggatagattgacacaggtgcaaagaggtaactcaagtaaaggcaacatgaccacgatgagttcctcctccatgtcatctggttacaactcaattattatatgcatttcctgataaagcacatctgatgttttcttttctttgcacacaggatattctttgtcctctaaagatcaggattgcagagtaggtgttatacctgatcccatcatcgggcaaaagaccatactaagtcgagttcaggtgaatgtggtgaagcgcaagatccaaaatattggttctcaaattccaatctttgtatctgtcattggaaagaacaacgcctctggaagaatatcctctctaagtatcgccaaccgatatgttgataattaccttcaagacgagaaaactatccgtctttcgcgtcttggggacaagtggaacatcaggctttctgattcgagtggtaacagaaggatggttggtggatgccgaaagtttgcggaagacaatgatgttggagtgggtgatatctgcctgttcgagctgttgaagaatcataaatgcacaatgaaagttcatatcatcagggcaaaggatatctgttaatcgaaaagcctgttgaatctgctgatttctctgatgactgttgctggtgcttttgtgctgctgagaatggtagtctatccacagtttatgcaactactggtactaagttgttattgaactagtacattgcatgctgattagatggtgatttcccttgctaattctctttttttgggtgatacactaggggggttcccttgctaattaatgacccatgtaattactgatacttacttttggtgcaatgcttttgtagttagttatc

SEQ ID NO: 17945 - DNA, 2842 bp, Oryza sativa
  ref <308>: DATABASE ACCESSION NUMBER: AK068360
  ref <309>: DATABASE ENTRY DATE: 2001-12-06
ttccaggcatcccctcgtcgtggtgcatatatatattgaaggcctgaaatggctgaacattgggcagaaggttcaaagcatgcttctgcacaagcatcgtaatctagatatcaagcaacatctgcaagatctaggcaaaggaacatcttcgatctattagctcagcgagagatttcccctcgaacaaaacaccaagctaaaaaactttggagcaaatctccaggaaatgatgctgattccaatgaactaagatatgcagctacagatgctaaacatgatatatattcatgggcagaatcacagtccctgcatcactggtctgccaaatattgtcctcttttgccaccccccaggtctactatcgcagctgcattcagcccagatgggaaaacacttgcatctacacatggtgatcatactgttaaaataattgactatcaaactgggaaatgtttgaaagtgctgagtggacatcggcgcacgccttgggtggttagataccatccattacttcctgatatccttgctagcggtagtttggatcaggaagtccgtctttgggacgctaaaacctcagactgtattggatctcaggacttccatcggccaattgcatcaatagcatttcatgcaaggggggagattctggcagttgcatcaggtcacaaactgtacatatggaactacaataaaagagatgaggctgctgctccaaccattatattaagaacccgccgctcactaagagctgtccattttcacccccatggtgctccatatcttcttactgcagaggttaataatcttgattctgcggactcaccattgacccttgcaacctcttcgggctattcaaactatccctcggctgtgttttttgcaaatattaattccagaaactgtccacatcatgaggctaattcatcatcaccttgcttgctttggcctgcatacctcagggatgatggaagtttatgtctgattcgcaatgacttggttagtagttcaaccaatgtgcatcagagaccatcatctttagctcaaaatccattggcatcagatgttgaaaatcaacagcctgaccaacttgtcacgcctatggatgtgtgccctggagaaccatctacttctcatgcttctgcatctggtttaagtggagttgaaatgcagattgacagggggcaacctagctccagattactgggcagtagctccactagtaatcatgagagttctactgctagagatgatgtgcaaatgccctcactgagcaacagcgtgccgattccagcaacatctcagccttcagaacatgatggccgtcatggtatgccaatgaattcgtttaccacttctagtggattagatgttcacatgatcctaagaaattcagagggtggaaatcatcatcatgatctcttcagtgactcgcgtagctgggagcttccctttttgcagggctggttcatggcccaaaatcatacaggtgcttctccatctattccgattgatgtcggcagttctagaggatcaaatcgacatcatgcttctcgtcgtcatgttgtgggctcattacgtggggttgggagttcacttctaggcccccaaattgatgaagctgaggttcatgctgcatcattaggtgttggatctgaacttactacctcactgcttgctgctggagctgctgaattaccttgcacagtgaagcttagaatatggcggcatgatatcaaggatccatgtgttacattggaacccgaggcatgccggttgacaatttctcatgccgttctctgcagtgaaatgggtgcccatttttccccttgtggacgatttctggtagcatgtgttgcctgtttgctgcctcaaactgaaggcgaccgtggtagccaattgcctgtgcagtatgattctgcaggggccggaacatcaccaactcgtcaccctctcccttctcaccgagttatttatgagctccgagtttactctcttgaggaggcaacgtttggcaaagttcttacatcaagagcgataagggcagctcattgcttaacttccatccagttctcacccacttcagagcacatactattggcatatggtcgtcgtcataactctatgcttaggagcattgtgatggatggggaaactggaattcctgtatatactatcttggaggtctatagagtatcggacatggagctggtaagagttcttcctagtgctgaagatgaagtaaacgttgcatgctttcatccttcccctggaggtggtcttgtttatgggaccaaggaaggaaagctcaggatcttgcagcacaatggtgcagatatcacaagcacagggttgaattgctttatcgaggaaaatatgcttgagattcagagatatgcgctggaaggctgaacgattggttgccatgtgttatgtgtacttctccaggaattttcctctgcaaagtttatcattgtacaagtgagcctcaaggaaatcatcagatttcagcaaagtcatggcagattctcaaatgagtttgctagagtgccttggggataggtctgtgcagagggagttggaagatgtaaatcaacacaaccatgttgctgctgtcaagtcatcacgatgctgtaattacagaattgtacatgtaatctttaatcaacttaacttgtattttagaaagcacacaatgctaacccttttcttttcaatggcagaggtatttattgttccccttgtatttttcgttgtgtagtcttttattccttgacggggtaccaaatgccaatgattaaagtaactaatcatcaattcatctttggttcaaagatgtactctg

SEQ ID NO: 17946 - DNA, 2597 bp, Oryza sativa
  ref <308>: DATABASE ACCESSION NUMBER: AK068361
  ref <309>: DATABASE ENTRY DATE: 2001-12-06
gaccgccccgaatccgcccccaaatctcctcgcgacctcgaaaccctagcctcctccggccaccgtcgccggccacggtgagcggccccacccccccgcagccatggcctccccggagggctccacgtgggtcttcgactgccctctgatggacgacctcgccgccgccgccggcttcgacgccgcccccgccggaggcttctactggacgacgcccgctcctccgcaggcggcgctacagccgccgccgccgcagcagcagcccgtcgcccctgccaccgcggctccgaacgcctggtaattgcggggtttacggcctccgatcgcgctccagccagccctggctgggcccggtgccgtggtctggggtgctacatttttttttcgtcctgatttgtcgcggcagcgtgttagtgcgtaagttgagactgggtatatcgtgatcgttgctattgattgttcgattggaggtcgatagaagcgtatcatatcagactatcagtgggattcggattaggggattagccattgagtgtgtctgaacatgtagaactagttacgtactccctccgttttctaaaatatgacaccactgacttttcaaaatacacttgaacattcatcttattcaaaaaatttatgtaattattatttgttttattgtgacttgatttatcgtcaaatattctttaagcatgacttaaattttttatatttgcacaaaaattttgaagacgacgaatagtcaaacgtttatcaaaaagtcaacgacgtcatacattaacaaacggaggtagtataacttagtaggagccgtcagcctgttttactgaacagagggctcaattcctggttatattgaattgtcagcttcattttcaaatctatttatttgtgtgcatacgtaatgtatttaaacctaatttagggcctcttcatgatttataattctcattttaattgtgatgcaaatgctgcatagcatagcatatatagtttgctaagcatgcattgtgtcatgtttatctggtgtcatgtcatgggatagttgaactgaagaaaacatacaccataattgatgatgtttatgatgccactattgtacaagattcagtttgccgtgtaatattacaatataagaactgataacaagtaaaccaaatggtgtcaaattggcgtggtggtgggagggtggatggttgtgatttgctgtaggtccaactgtctgagataccagattttaaaattttttgtatctatatgcaagtaaattgcattgacatgatattttgagccaggtattgagatttgtcctgagctttccagtggatttttcaatgaatgatctatgaaggatcagaaacggggtgagagaagtggttaatctgtatcacttgggttccagcacgaagcttactgtggaatggaaatttattgaagaacgtgttcatgttaggatattgtttactgcaactctttgatttaagagtattcttttatttatgataccttgtagtcttgtggtgctagtacattttctttatgcaccaggaagtcatctcatgtgtttttaaatctgtcctggtttttgacttgtgcttccaccttctggtgccataggttgtggtgttatgaaccacacagtgcatcttaactgatgtattgttctgttgtgttaaatttgcttgattcttttgttgtcattgtatagttttttatgtacttattgctgtatattatcgtgacatatggcatactgaagtacaagtttatttttttcaccagtgctgaaatcaatggctctgtggactgtgaacatggcaaagaacagccaacaaataaacgtccgagatcagaaagtggcactcgaccaagctccaaagcatgcagggaaaaagtaagaagggacaagttgaacgagaggttcttggaactgggtgctgtcctggaaccagggaagacacccaaaatggacaaatcgtctatattgaacgatgctattcgtgtaatggctgagctgcgtagtgaggcacagaagttgaaggaatcaaatgagagtctccaagagaaaatcaaagagttgaaggctgagaaaaacgagctgcgtgatgagaagcaaaagctgaaggcagagaaagagagcctggagcagcagataaagttcctgaatgctcggccaagcttcgtaccacaccctccggttatcccagccagtgcattcactgctcctcaagggcaagctgccgggcagaagctgatgatgcctgtgattggctacccaggatttccgatgtggcagttcatgccgccttctgatgttgataccacagatgacaccaagtcatgccctcctgttgcataagtcaaagcaaagatcaatttgcctcgccttgtaggaaagaggtgaaactgccttccattcaagcccagtttggtcgtcagtgtttaaactacctagctaatcccaggattaaaccgaagcttcgctgtatcgaagtatcaaccggtgacatgtgaactgacgaaagatgacaccgttgtatattacatattagtaaataaattccatctgtccaattaaatgagaattagatgcc

SEQ ID NO: 17947 - DNA, 1546 bp, Oryza sativa
  ref <308>: DATABASE ACCESSION NUMBER: AK068362
  ref <309>: DATABASE ENTRY DATE: 2001-12-06
aatggccaatcgccacggtcttcggatggacggcgacggcgtcggcggcagcatgcacgtggtgatgctgccatggctggccttcggccacatcctccccttcgccgagttcgccaagcgcgtggctcggcagggccaccgggttacgctcttctccacgccgaggaacacccgccgcctcatcgacgtgccgccgtcgctcgcggggcgcatccgcgtcgtggacatcccgctgccgcgcgtcgagcacctgccggagcacgccgaggcgaccatcgacctcccctccaacgacctccggccctacctccgccgggcctacgacgaagccttctcccgcgagctgtctcggctgctgcaggagacgggcccgtcgaggcccgactgggtcctcgccgactacgccgcgtactgggcgccggccgacgcctcgaggcacggcgtgccgtgcgcgttcctcagcctgttcggcgccgcggcgctctgcttcttcggtcccgcggagacgctccagggccgcggcccgtacgccaagacggagccggcgcacctcaccgccgtccccgagtacgtccccttccccaccaccgtcgcgttccgcggcaacgaggcgcgcgagctgttcaaaccgagcttgatcccggacgaatccggcgtgtcggagagctaccggttcagtcagtccatcgaaggatgccagctcgtcgccgtcaggagcaaccaggagttcgagccggagtggctggagctgctcggcgagctctaccagaagccggtgatcccaatagggatgttccctccgccgccgccacaagacgtcgccggccacgaggagacattgcggtggctggacaggcaagaaccaaactccgtcgtctacgcggcgttcggcagcgaggtgaagctgacagccgaacagctgcagagaatcgcgctcggtcttgaggcatccgagctgccgttcatctgggcattcagggcgccgccggacgccggcgacggcgacgggttgccgggaggcttcaaggagcgcgtcaacggccgcggagtcgtctgccgaggctgggtaccacaggtcaagttcttggctcacgcatcggtcggcgggttcctgacgcacgccggctggaactccatcgccgagggcctcgcgaacggcgtcaggctggtgctgctgccgctgatgttcgagcagggcctcaacgccaggcagctcgccgagaagaaggttgccgtcgaggtggctcgcgacgaggacgacggctcgttcgcggccaacgacatcgtggacgcgctgaggagagtcatggtgggagaggaaggcgacgagttcggggttaaggtgaaggagctcgccaaggtgtttggggatgatgaggtgaacgatcgatatgtgcgagattttctcaagtgcctgtcagaatacaagatgcagcgacaaggatagtgctgttttcttgtgtgattgtgtcttcaggcgtcactgtagtagaagcgaattgatgttttggaattaaacagagtgatggaataaagttgcgtttat

SEQ ID NO: 17948 - DNA, 3721 bp, Oryza sativa
  ref <308>: DATABASE ACCESSION NUMBER: AK068363
  ref <309>: DATABASE ENTRY DATE: 2001-12-06
ggagcgattccaccatctcccccgtccggcgcctacggagtacaccgcaaccggtcgccccaatccggcgcctagaccgtgacccacccgccatcttccgcaagaccgaatccccaacccacccaccatcttccgccgcccccgtccccgtccccggccatggatccgtcgccggccgtggatccgtcgccggccgtggatccgtcgccggctgctgaaacccggcggcgtgcaaccgggaaaggaggcaaacagcgcgggggcaagcaactaggattgaagaggccgccgccgatttctgtcccggccaccccgcctcctgctgcgacgtcttcatcccctgctgcgccgacggccatcccaccacgaccaccgcaatcttcgccgattttcgtccccgattcgccgaatccgtcaccggctgcgccgacctcctctcttgcttcggggacatcgacggcaaggccaccgcaaccacaaggaggaggatggggaccaacatcgaccatttccccaaactttgcatctttctttggaaaccaacaagacccaaattcatgtttggtcaggggttatcctccaggagggtttgtcaattttattcaacaaaattgtccgccgcagccacaacagcaaggtgaaaattttcatttcgttggtcacaatatggggttcaacccaatatctccacagccaccaagtgcctacggaacaccaacaccccaagctacgaaccaaggcacttcaacaaacattatgattgatgaagaggacaacaatgatgacagtagggcagcaaagaaaagatggactcatgaagaggaagagagactggccagtgcttggttgaatgcttctaaagactcaattcatgggaatgataagaaaggtgatacattttggaaggaagtcactgatgaatttaacaagaaagggaatggaaaacgtaggagggaaattaaccaactgaaggttcactggtcaaggttgaagtcagcgatctctgagttcaatgactattggagtacggttactcaaatgcatacaagcggatactccgacgacatgcttgagaaagaggcacagaggctgtatgcaaacaggtttggaaaaccttttgcgttggtccattggtggaagatactcaaagatgagcccaaatggtgtgctcagtttgaatcagagaaagacaagagcgaaatggatgctgttccagaacagcagtcacgtcctattggtagagaagcagcaaagtctgagcgcaatggaaagcgcaagaaagaaaatgttatggaaggcattgtcctcctaggggacaatgtccagaaaattataaaggtccacgaagaccggagggtggatcgtgaaaaggccaccgaagcacagattcagatatcaaatgcaacattgttggccgctaaggagcagaaggaagcaaagatgttcgatgtgtacaatactctattaagtaaggatacaagcaacatgtctgaagatcaaatggctagccaccagagggcaatacggaaattagaggagaagctatttgcggattaaggtgagttttataaactgaccactattttctgaaatgtatgaattctgaaatttatatacaattgtgtaaacatggaaaattagataatgtatgcatgatgcacaacatgtgcgtgcagcactatttaatggcagtttcacaagtgtgaaaactgaccactatagtactattgtggtgtgaaaactgaccactactattgtggtgtgaatgctactgtggtgtgaaaactgaccactatagtttcacattcctggatgcagccctcctctatatatatagatacagtcctcatctcttcctggcatacacacagccctcttctctaattcctggacgcagtcctcatctcttcctggcatagacgcagcccttctctcttcctgtttagttcaacaacattgaggtgatctgcctttctttgaagtttctatcttttttcactgctgtgaatgattatttctctgctgtgaatgattatttctccaatcttcctttgttcaccttctctctttctctgctgtgaagatgtctggaaatgaaaatcagattcctgtgtccttgttggacgagtttctcgctgaggatgagatcatggatgagataatggatgatgttctccatgaaatgatggtgttattgcagtcctccatcggagatcttgaaagagaggctgctgaccatcgtttgcatccaaggaagcacatcaagaggccacgagaggaagcacatcaaaatttggtgaatgattatttctctgaaaatcctctatatccttccaatatttttcgccgaagatttcgtatgtacaggccgctgtttttacgtattgtggacgcattaggccagtggtcagattactttactcagagggtagatgccgctggtaggcaagggcttagtccattacaaaagtgtactgcagcaattcgccaattggctactggtagtggtgctgatgaactagatgagtatttgaagattggagagactactgctatggatgctatgaaaaattttgtgaaaggaattagagaagtatttggtgaaagatatctcaggcgtcccactgtagaagatactgaacgactactcgagcttggtgagagacgcggttttcctggtatgttcggtagcattgactgtatgcattggcaatgggaaaggtgcccaactgcgtggaagggtcagttcactcgtggtgatcaaaaagtgccaacgctgattcttgaggcagtggcatcacatgatctttggatttggcatgcgttctttggagtagcaggttctaacaatgatatcaatgttttgagccgatctactgtgtttatcaatgagctgaaaggacaagctcctagagtgcagtacatggtaaatgggaatcaatacaacgaaggttattttcttgctgatggaatttaccctgaatggaaggtatttgctaagtcatatcgactccctatcactgagaaggagaagttgtatgcacaacatcaagaaggggcaagaaaggatatcgagagagcatttggtgttctacaacgtcgattctgcatcttaaaacgaccagcccgtctatatgaccgaggtgtactccgtgatgttgtcctaggttgcatcatacttcacaatatgatagttgaagatgagaaggaagcgcgacttattgaagaaaatctagatttaaatgagcctgctagttcatcaacggttcaggcaccagaattctctcctgaccagcatgttccattagaaagaattttagaaaaggatactagtatgagagatcgtttggctcatcgccgactcaagaatgatttggtggaacatatatggaataagtttggtggtggtgcacattcatctggatgaaacaaggaactaggtttctgaacgcattacggactgaaggttgaggggcagaatgatccacccagttgcttctatcagatcactaaagtttcatttcactgttttattttggacacttgatgcttgtgtgcatccgatgaatgtttaatttggtcacctgatgcttgtgtgcatccgatgaatgtttaatttggtcacctgatgcttgtatgcagttatctatcttatttgttaatgttgctggtactgaggatttttagaagtgaaatgcacaagttgctgtgttttttgact

SEQ ID NO: 17949 - DNA, 1998 bp, Oryza sativa
  ref <308>: DATABASE ACCESSION NUMBER: AK068364
  ref <309>: DATABASE ENTRY DATE: 2001-12-06
gacccagcagcagccatcaggcctaccactaccacctcatcctttgattcctctccatctccagtactgcatgctgctgcatcctgcatcctcctccaatcttcctccgtccccttcaccgaggcatcagctagcattgacggatgagcggcgccgttggggagccaccgaacacgaagacgccgtcgacgagcaccccggcgccatggttagaggagagggggcagacaaggaagaggaggaggctccgcccacagagaagaagagcagactcctaccttctatctccaccgctgcgcctccatcctcatcacgcatcttcttgccatcccgtcgctcccaatctccaccgaggtaggtcaaggtggtgatagaagaaggacgccaccgagttcatggccaatctggaagagagttgcgcccttgcagcagtacgatggtgatcggtgtgatgtatccagggatgtcattccctttgttagtgaacaaagaaaagatagggatcttcaaggttctaggaactctgcctatgactacaggacaaattacctcagggaccaagatcatgatttggaaaggtagtgatgagaaaactgttggagagaccctgtacccaccaatcttacatccagtcattgcaactcctctgcaaatgaaaatggtggatgaccccgctctttctaatgtggttggcagagccagtaagatgattggtaatttcatgagttactatactcacctcccacatgaggccacaaagggcaaaatgacatttctcttacatggtccatgtgataaaaaagctgtggttgaagggataggaaggacccttggtcttcctgttgcgagcgtggatgcttcgtcactcatcaaggacttcccttctgactctgtctcacagatcaacacctgcatacagagacctgaatcacgtgatggtccacttctgatcttccttgaccggtttgatgagttggtccctcacaacagatgtggttcaacagttatgactgacataacaaccacccagcttaaattgctgcttgatgatccttgggtgattttcgggcatcgtattactattctggtagtatctgtgaggtggataaacctgatatgcccgactattctctcaagaatcaggacacgattttattgtggaaatgatgagaaagagggggattgggatggtgttggaatgtctcttctaaagttattggaaacaaacaagtcgattgatccaaattcacgctgggttgtgacaaatgccattctgtatgggaacacctcgctcagtaagagtgatgtcaccaaactctttgcagcaacacagtcattcgattccatagtcattgatgcaatgcaagtgctgaaggattttaaaaatactgggtcaaaggcggtgtctgacctgttcctgagagctacagcgagaagaccctgcattatactgattcaacaattagatgctatcaacaacgaaacattaatctccctgatcttacacgagatgaacaacatggatagagatctacatgtgtttgcttccacgaggtggtggcaactcatacaccatatgtttttggagtcacgcctgttcacgaggagagttttttgtggcgtggattcaaaaaaagatgaatgcgattttgtgggccaagctttatttgagatacaacagaggatgggaacagcatcagataagagcacctcctcttaaggcaaaggagggagaggagataagataactcaccattagcgagcttactgtattggttatgatgcactggtgaaattcgacgccattagcttttactgtatgtttatgatgggctggtaaaattcaattccgtaatcagtcatggtgagagttgtctggtaactgtgaggaaccttaattttgagcacttgtctgaatttttttttctttcgaggtaacagttcctaaaacttgtcaaactgctggcctgttggccatgcaaatactctattttgacg

SEQ ID NO: 17950 - DNA, 1316 bp, Oryza sativa
  ref <308>: DATABASE ACCESSION NUMBER: AK068365
  ref <309>: DATABASE ENTRY DATE: 2001-12-06
gtggcacaggagacgaacgacttgcgaaaagttcaccttgcttagctttatggagtaccagtagtcagtttgctttcttttctgcatattattatatatgcaacgacgcgacggtcagatcgatttatagcagagcagtagttacgttgatcgatcagtttgagagtttgctagcgctagatagagctatagtatagggctcgaagatgacgacgagctcatggagcggcctgcttgtgatatcctgtatgttattgatgagctgggcggcggcggcggtggacatgtcgccggtgcggttcgacgccgcctacatgccgctcttcggaggggacaacctcgttccctcgcctcacgcccgcaccgtcctcctcaaactcgaccgcttcaccggttctggattcgtgtccaagtcggcgtaccaccatggattcttcagtgcttccatcaagcttcctcatgactacaccgccggcgtcgtcgtcgccttctacctgtccaatggcgacgtgttcccggggcagcacgacgagctggacttcgagctgttgggcaaccggcgaggccacgcatggcacgtccagaccaacatgtacggcaacggcagcaccgggcgcggccgcgaggagcgctacctcctccccttcgaccccaccgccgccccgcactcgtacgccatcgcctggacccccgccgccgtcatcttctacatcgacgccatccccatccgcgagctcgttcgctgctcctccggcgactaccccgccaagcccatgtccgtctacgccaccatctgggacggctccgcctgggccaccgacggcggcaggcacaaggtcgactacgcctacgcgcccttcaccgccgtcttctccgacctcgtcgtcaccggtggtactgacgacgaccactgcgccgccatgggcctgatgacgtcggaggtggccgtgatgacgccggcgaagcgcggctccatgcggcggttccggtcgcggcacctgacgtacagcgcgtgctacgacacggtgcgctacaacggcaccggcgtcgtcttcccggagtgcgacgagtcggagcaagacaacttccacgcatggggcgagtccaagcgtgtcatcaacagcagatccagttccagcgccacatacgccactggttcaggcgtgcgcatcgactaatttatttactagtactgtgtaatctcaatcatgcattattccaccagttgatcctgcttctagatgatcgatgatgagtttgtacgtacgtgcacactgacacattttccagttcatatatatactcgtatttccttc

SEQ ID NO: 17951 - DNA, 1339 bp, Oryza sativa
  ref <308>: DATABASE ACCESSION NUMBER: AK068366
  ref <309>: DATABASE ENTRY DATE: 2001-12-06
gggcggcttgacgggagagaaagaaaacctcccgtctctcggctcctccgctccttgcgccatctcgcggctgaacaggggaggtggcgagcagagcagcggagagcaggggaggggatcctgcaggttttctttagaatggcgacatctttggatatgtcactggacgatatgattaagaacaacagaaattctagggggagaggaaggggtaggtcacagggaggaggtcgaggcagaggtgatggccaaaggttcagctatggttcagggcgtggacgtggtgctggcaccttccgtggaaggggagtaggagtgccttcacgaaggccacttggtgttagtactcggtcatcatcgtatgctattgccaaggcaaggacaaatttattgctatttttctgtataccttcaagaatctgaattattagggacctacacaagaggtggttagaaaattaatgaaatgaaacggaccatgggttcatgtcagaccatatctgccactttgtaaccgtggaacttcagagaggatctgacaggtttctcttattgaaatcaccctgagaactggcacttttctgctgagaatttcatggcacaattgtgttggtttggccggtttatgcttgaaactagaagcatcgtctctccttcattggcatgctgatggtctatgtatttactgattggatacttgtttatgtggataagatcttcaattcgtacggaattttgtgcaatggtatagggttattatagttttgctgatgctagttgattcatcaagtaccatggattgatgggttttgtggtttgacgctaactatttctcatcatcatctgggtatgtgtgctgtggaaaatcatcagtcattcaacaaaaccaaggatattgtatggaggcaagatctgtttgaggacagcatggttgctgctggcctttctgtgacagaatctagtacaaagctgtatatttcaaacttgcactatggagtgacaaaagaagatatacaggtagctggatctctgcgttttgcactatgcatgctggaatctgacagttccacacacattgggaattttcaagctcatgttctctgttcacaactctgcttcaggaacttttttccgagatgggtcatttgaagcattgtgctgttcattatgataacaatagacgcccaactgtaagtctgtttatccgagcttggtcttttgtactgtatgcatatttcagaattaagcattgttcttttgattttcaattggtaatttggtattcaaacatttttcatgttatattccaaacatagagcaagtgtcgtttggttcaacc

SEQ ID NO: 17952 - DNA, 1742 bp, Oryza sativa
  ref <308>: DATABASE ACCESSION NUMBER: AK068367
  ref <309>: DATABASE ENTRY DATE: 2001-12-06
gtcctcttctcttccgtgcccctccgccgcacgcgttccccatccccaccaaagcttcttcccccgagaggcggcgaaatccccaaatccgaacaagccaaagccatcgtcgagctccttcacccaccgatcgattcgatctgaccgcgccgccgcaagggaggaggaggaggaggacgacgagcagcagccatgtgggcggcgtcttgcctggcgtcgtgctgcgccgcgtgcgcgtgcgaggcgtgccgtacggcggtcggcagcatcggccgccgctccgcccgcatcgcctactgcggcctcttcgcgctctccctcttcgcctcctgggcgctccgcgaggtcgccgcgcccctcctccaatccatcccatggattaaccacttccacaagacgcccgaccgcgagtggttcgagaccgatgccgtgcttagggttagcctcggcaacttcgtcttcttcaccatcctcgccatcatcatggctggcatcaaggaccagaaggacccccgcgacaagatacaccatggcggatggatggccaagatattctgctgggttgtcatcgtcttcctcatgttcttcgtgcccaacggcgtcgtaagcttctacgaatcaatatccaagtttggatctggactgttcctgcttgttcaggttgttcttttgttggactttgttcatggatggaacgagaattgggttgccaaggatgaacagttctggtacatggctctattggttgtctcagttgtctgttacattgtcacattctctttctcgggtctgctctttcactggttcgctccatctggacatgactgcggaatcaatctgttcttcattgtcttcacactgattcttgtttttgtttttgctattgtcgccctgcacccaaagatcaatggtagcttgctgccagcatcagttatcgccctctactgcacctatttgtgctacagtggactttcaagtgagccgagggattatgaatgcaatggactgcacaaccattccaaagctgtgtcgactggtagcctttcgctgggattgctaaccaccatcctttctgtggtctattcggctgtccgtgctggctcatctgcaactgtgctctcagccccagactcaccacgtgctggtgccgacaagccactgcttcctttcagtaaggcagatgaggaagcggaaaagaaggatgtgccaaggccagtgacatactcctactcgttcttccacctcatcttctccttggcaagcatgtactccgcgatgctcttgactggctggtcaacctcagttggtgagagtggaaagcttgttgacgttgggtggccatccgtttgggtcaggattgcaacccagtgggcaacggcaggtctgtacatttggtcccttgtcgccccactcctcttccccgatagggaattctagatgaaccagcgtaagtactcaactgctgagatcgcatccttttggagcatcatctatcttgtcaagcttatttgcaaatagctaagccgtctctctatgtgtggtctgtaatattaaccgtgcgtaaaccagtggcaagaagtccctgtccgtgtcatggttatcgagtctgtctacttaataacgtgtgataccaggcattgtgcctgtattttaacagtaaaaattgggtacgttgtttgtgtttgtatatatattggagttggtttacctcagctggatggagtaccctacattcgcattgc

SEQ ID NO: 17953 - DNA, 1587 bp, Oryza sativa
  ref <308>: DATABASE ACCESSION NUMBER: AK068368
  ref <309>: DATABASE ENTRY DATE: 2001-12-06
gggaatccacccggccgacgccgcgtctaccccatccccccccccccccgccccctcctcgtcggcgccaccgccgccgcaggctcgccgcctagggttccttccactctcggcgcaaggggcgtagggaggttgagagggagcgagcgagcgatggaggggtgggtggcgacggtcgcgtacacgggcacggcgctggcgtgcgccgcggcggcgacggtggtggcgctgcgcctcgtctaccgccacctcctccactacgccgagcccacccaccagcgcttcatcgtccgcatcatcctcatggtcccggtatatgctgtgatgtcatttctttcccttgtactacctggtagcgccatctacttcaactctattcgcgaaatctatgacgcatgggtcatctacaatttcttttcactctgcttggcatgggtaggaggtcctggtgccgtggtagtaagtttgactggccgatctctgaaaccgtcgtggttcatgatgacttgctgtttttcagctgttcctctagatgggcgttttatacggagatgcaaacagggttgtctgcagtttgtgatcctcaagccaatattggttgttataaccttcattctttatgccaaaggaaaatatgaagatggaaattttagtgtcaatcaatcctatctatacataactatcatctacacaatttcgtattcgatggcactgtttgctctagcactgttctacgtagcatgcagagatcttcttcagccatataatcctgttccaaaatttatcattatcaaatcagtggtgttcctcacctactggcagggcgtcctggttttccttgctgcgaaatctagattcataaaaaatgctgaagaagctgcttatctccaaaattttgtgctttgtgttgagatgctcatagcagctattgggcaccaatttgccttctcgtacaaggagtatgctggttccaatgcccgtcctttcggtggattcaggggaagcctttttcatgctctgaaattcaatgacttctatcatgatactgtgcaccagtttgcaccaacatatcatgaatatgtgctctacagtaacgaggaagaggatgaaccgacaaaatatagctctgccagtgttgtgtcaacagtacaggacatacagctggtagaagtctctgtcgtggactcgaaagctccgttggcatcagtcatcctaacacatgaggcagataaaacaatgccctcccatggcatggaagaaactgttgccccttcagagccatacgacctctcaaacttggttgatgtagaactgtccaattactctgctgaggtccctgcaattcctgatgtggggaaacaatgatattgtgtgatatatatccgtcagatgtaaatgggtagcgctcacgagttgttcatagattacactgtaaaggtatccttgtaatcctttgtttctgccaatttttccccgttgctagggacgtgctgatatctttggttcaaattgagctaaactgacagattagctgatggtgtcaagtaaatttgtaatgtagggagaagagaatgtaacatgtttctc

SEQ ID NO: 17954 - DNA, 2799 bp, Oryza sativa
  ref <308>: DATABASE ACCESSION NUMBER: AK099053
  ref <309>: DATABASE ENTRY DATE: 2002-08-28
ctcccccacgtctcgtctccccttcccttcccccccgccgccttcgccgccgacgcgccgatctccaccaccccccacctcgctccgccgccgccgccgcctcttgctactgcctccctccctccgccgcatactcccctcgccctccgaccactccccctcctctactcccccgtctcctcctcgccacttcgccaccccgccgccttcgccgatcccctccaccagatctggccaagagcggcagcctggcaggaggggaggcgggggcggcggcggcgcctcccctccgccagatctggccgggagcagcggcctagcaggaggggaggcgggggcggcagtggtgggcggtggcggaagggaaggcgacggccccgcaggaggggactcggcgacggcccgacaggagtgttcattggaaaccagctgctgatgaacatacaaaaccaaaaaagcgccagcatactgtgctgtacataccaagaagaagaaggagaagaggtaatgggcaacaacgtgcgggcaggcatcacgctcgatagaattaattgtttgaaacgatgatatgataagaacaagagggagaccaactgaccttaatccattattcatggaagcgtgaaggttacgtacttccgttgacatgaaacttcatagtatatatgtcgacctttcatctgcaatcaccaactaaacaccccagttaattggctgtcatctccgtcgtctctcacagcgagcattgtgctgcctgcgcaagggacttcatccaaagttgttgaaataaaagggagatcattctctatcctttccataagatagatggcagcctgtgcagccagtactgcaaccatagattgggagctcctggaagcggccatatctggtgataccaggtcaatgaagatgaagtacatggattcacatgatcctacaattctgcttggaaaaaatccacaaggaaacacatgtcttcatatatcttccatgtgtggccatttggaattttgcaaagatgttctttcacttccacaggatccaaccgtgaagaagaaactactcactactgtgaatgtgatgaatgagacgccactgcttactgccataacaagtggccatgttactttagctgcttttctactcaaatactgccatgaacaaggattcagtgaggtaatcttgaaacaggacaagcacaaatgtaatgcactgcaccatgccatttgcaacggccacaaggacctggcactggagttgatagcgactcagcctgccttgtccaaagatgtcaacaaatacggcgagtctcccatgtacattgcgttgatgatgagggattctaagtttacagatatttttgagaaactgttgggaattgatggttcttctcattcaggaacctatggctacaatgctctccatgcagctattagaaatggaaatccagatattgctaaaagaatcatcgttgaacgcccaaatctggccacagaagaaaataaggatggtaatactccaattcagctagctgtacgttggggaaagatcgacatgctacgagtattgttgaaacatgacagatctcaagggtatgttatcaacagaaaaaatggttatcctctcctcctttctgctgcacatcgaggtcatgttgctgttgcccgagagattatcaaatattgcccagatgctccatattgcaaaaaagatgggtggacatgtcttcataaagctgtcaaatcaggtaatatggaattcgttgagtttatccttggggaaccacgacttcagaaactcgtgaacatgcgtagcagcaaggggaaaacagctctacattatgccatccagaagtgtgatccgaaaattgttgctgctttacttgacaagaaaatagacttgacaattcttggcagtgacggtaatgcagccgcttgggaattacgggatgccttggatagtgcgaagacattaaactggaatgaagtgtcaatgcttatgattaaagctgatcctccaaatgcaaaatccgtttataatcttcacgaggaagccaaagaaaagttgatcaatgcgtcaaggaaggatgcaaggtcgctgactcaaacatacacaagcaacacttcgctagtggcgatcctcatcgcaacaattacctttgctgctgctttcaccctgcctggaggatacagcagtgatgctggaagccagggacttcctataatggcaaggaacgttgcctttaaggcattcttgatatcagataccttagcaatgtgcgcctcacttgctgttgcgttcatatgcatcatagcaagatgggaggatctcgatttcttgctttactacagatccttcaccaagaagcttatgtggttcgcgtacatggcaacaactacagcatttgcaaccggtttatacacagtattggcccctcggctgctatggttagctgttggaatttgctctgttgctgttttagtgccaattctcactaaggtgctcggggaatggcctgtcttaaagctcagaattcggttgggccaagctttcaaatcagagttccttgatatggtctgatattatcgatatatcttgtaaatgatagcatattatatcgttattgttcaaatatatgtgtcacgtgttgtttgatcaataatagcatacattgttaaatctttaacttcatgtatataatctaaataatgtactctgaacattattcatgtggagcttatgtaatgacttgtatctttttttcaagttcttgtttattgttattgatttgttaactgc

SEQ ID NO: 17955 - DNA, 2457 bp, Oryza sativa
  ref <308>: DATABASE ACCESSION NUMBER: AK068369
  ref <309>: DATABASE ENTRY DATE: 2001-12-06
gtgaaagaggaggcgaggcagaggagtggagcagcatccgaatccggccacctcatcatctcgcctcgcttcccggcggagatcgcgagggcgacggcggcggcggcggcaagctgcctccgacgagcccaggcagaaaaggagttatggatgttgagaacagtatggatgatgaccatttccaacaaaacatgggtaatggagatggaatgaatgtagaaggaggaagtatggaaattattactagagtggaacttgagcttgcatttgcctctgagaaattactaaatctagagatgttggtgatggagatagctcgcaaggctactgattttgagcctcctacattggaagacgaatctgtttcttctgaaactgccgagagtgcttttgaattggacatcctatatggttttctagatgcagaagtaggggagttagatgacatgatcagtactcttgagactgatattcaaaatgttgagcatatggtttgtcaagatgaatctggaggcaagattaaagctaggctagatgctgctatggtgtctttaaagcagatgaaggaattagtttctgatatcagaaaagagtcagccaagtttgagaaagccatagagtttccccatgacaaagaaggcattactggagacgctgggtatgaaaatggtattgtgtcatcccacactagcatgaggacagaggatcaacgaagaaatgttttgcagatgttagaacaatcgatagcaagtgagctggatcttgaaaagaagctctctgaatcaagatgtattatagaagaactcaaactaaagctccatcatcatgatcaggaaaaatatttcctggaggaatctatcgaatcattatgtgggaaaacatttgcagcagaaaacgcttctgaggtactcttgggaacttcaaaagaacttgtggacaaagttagtaccgtagagtgccatctaagtgcatcaagatgtagggagggtgatctggagtcgaagttaggagaaagcttgatgggattatcttcactgcaagtcaacgcagagaatattcaagaagggagtcaacatagtggaggcacagaaactcatccaagtcctgaattgccatccttgcaggataaggttaaggagctagaaaaacagttgagggaatctgattcacagttgcagttggcaaaggcatcagcagaaacttttcaggaggagcagaatgtgctgcatgccgagataagcacattagaaaacattattaagagtctcaaagaagatgtctcaagagcagaaagtagagcacaaaatgctgagttaaggtgcatgcagctaactgaagctaacatagaacttaatggggagctaaactctcttaaaagtcatggttcagaaaagactagccttttggagaggaaacttaaggagtcacatacccaattagagcatgcaaaggcatctcttgatgccactgttgaacagcagagtatgctgagatctacaatgtcggacatggaacatatgattgatgatctgaagggaaaggttttaaaagctgaaaccagagcagagaatgctgaatctaagtgtacattgttaacagacactaacttagaacttagtgaggagctatcgtttctgaggggtcgagcagaaagtctagagaactcattacatgaagccaaccatgttaagatgtctaccgtcaaggatattggaatcagaacaaaaataattactgatttggtcacaaaacttgcattggaaagagaacgacttcatcaacagatttcgttgttgacaaagaaaaacaagatattggctcagaagtgcaaaggaagtgttaaggatgacactcaattgagcaaaaatgttactggcaaagatgttgagcttcattctactaaattagcggaggaaatagttcctgatttttcttcatcacagactaaggctgagaaacctgtagaccctagcaatgaggaagagaagacgaggtcttcagaggatgatgactctggcggggagggcactgctgaggcagtccggaccatacagccgtcagtgctgaactggaagtacatcaccgtggcattcctgatcttgttagtcgctgtcttcatatacttgccactcccagaagaaagcagctccgtttgaagaggccaatgcaatgatggctaatgtagtctgtagtgtgtacactatttacatccctgttttttttttctttgtttgtttcaccccctttctgctcatagaataagcaatttttggtgctgtagactgtgatatgtagtgttcagatctggcctgaactcggtagtgatgcactgatgctcctggatgagtgattgtaaactcttagtttggctgccattgcccagtcttttggcctctaagacaaatggttatgacttgtgagttgtgactagtaaatttccttctgttgattctaatt

SEQ ID NO: 17956 - DNA, 722 bp, Oryza sativa
  ref <308>: DATABASE ACCESSION NUMBER: AK068370
  ref <309>: DATABASE ENTRY DATE: 2001-12-06
gacatcttcacttctcttcttcaggacactcctccctcctctccccacgctcctctctcctcctctccctacacacagcgacgacgttggcgatggagacggcgacagcgttggcgcggtagaggaaccaacagcggcgtccctgctttccctcccctccatctctcagatccgtatgggaggaagccagaggtggtggcgcggcagagggagcggcgagggtgtcttcccctcccctccctctcttagatccggatgggaggcctgcagtggtggagcgtcagaaggagcggcggcgggatgggaggagtccgacggcggtggtgcggcggcggcgtccctgccttcccctcccctccctctctcagatctggatgggaggcctgtggcggtcacgcgtcagtgggagcggccgtgggatgggaggagtccaacggcggtgtccgtgccttcccctccccttcctctctcagatccggatgggaagggcagcggtggtgcatcagagggagcggcggcgggatgggaggagacggcggcgtgtggcttcgatgagaatagctcgtccacggtggcttcggcaacctccaatgtcactagcaatgacgatagacaacgtagatgtttgcatgctgaaaatgcagtgagaagttgatgtagtgatgttggatgccaatttgaatgtggattggatttgaatctagatctggatttgaattttg

SEQ ID NO: 17957 - DNA, 1298 bp, Oryza sativa
  ref <308>: DATABASE ACCESSION NUMBER: AK068371
  ref <309>: DATABASE ENTRY DATE: 2001-12-06
gtcttgtttcttcagaccccaagccgatggcggaggcgtcctcgtcctcggcggcggcggtcccgccgctggacccggaggcgattgccgccgtggcggaggcagcgccaccggaggagatgacgctggtggcgaagtggaaagggaacgactacacggtgcgggtggtcggggacgacacgctgggggagctgaagcggcgcatctgcgaggtcacgggggttctccctaaacggcagaagctgctctaccccaagttcaagctcaacgagtgcaaggactccgagctcatctcctccatccccttcaagcccaacgtcaagatcaacatgatcggcactgttgaagatgaaatatttgtggacaaagaagatgatccagagatactcaatgattatgaaataggccagaatgaagttactgctatcaaggataaagatgtctacaagcaaaaactaaaacggcgtgcaagtcaatataagatcaagatattgaatccatgccgcaaagggaaaaaactgcttgtcttagacattgattttactctattcgaccataggtccgctgctgagaaccctatcgaattgatgcgtccatatctacacgagttcctctctgctgcatattcagaatatgatatcatgatatggtcagcaactagcatgaaatgggtggggatgaagatggaccaacttggagttcttggcaaccccaactacaaaattactgctcttatggatcacttggcgatgataactgtgcaatctgaaaacctgtcagaaaagaaaacttttgattgcaagcctcttggtgtcatttgggctcagttccccgagtacaatgaaacaaacacaatcatgtttgatgacctcagaaggaactttgtcatgaatccacagaatggtcttgtgatcaaaccatacaagaggacccattcaaacagaggcactgatcaagagctggtgaagcttacacaatacctgcttaccattgcagagctagaagatttgagcaagcttgaccatagtgcatgggaatccttcacagaagaaaatgccaagagacgcagacacaggtagttttttctcagtgtattgatcagcaggaaagaaaagttcgccctcctttttgatcactgctattaactgcatagactagaatatcttggattgaccatgacaaccacaatgctacttagaatactctacatatatccctgcgttcgatctgcacaaaaacatttccaaactgcaacagttattttttaaccttcctgtgtgcatttcaacgttaaacct

SEQ ID NO: 17958 - DNA, 3650 bp, Oryza sativa
  ref <308>: DATABASE ACCESSION NUMBER: AK068372
  ref <309>: DATABASE ENTRY DATE: 2001-12-06
gattcacatccaagattccaaagttcagagagagaagagttgcagcttgtacagaacaaacaactcatgaatgccacttcttccttccatgatattactatctcctgtggccttctgaatttctgcaaatttgcaatcgaagccatcaactgctcatcctcctcccctcgcaaaacctctccgcctcaaaccctcgccgatcgatcggcggctgggcttctcaggacgaactgggtgatttgcctccttcgtcttcttctgttgataattccgcggcattgcgagttgtttctgtgttttcccccctgatttcgttcgtggttttggtttgattgcgccgtgggatgcagtagggtttagcgagcgagcgagcaagagatcccccacatccatcccgcgagcgaggggtgggggcgccgtcgttcgtcgtccgacgaatatcgcggattcaagatgggcacttatgttaggaactattcagatgatgaattctctgtggctggcgagaagccagatgtagagttcatggactatcagaatgatggctctattcaagattattcactcgaagatgcccctgtggttgtcacggttcctttccctttcatcgacggcaaaccaaaatctgtccttgttggagaaacatctgccgacaccattagcatagaaaatacctcttctgaacccgtgaatttgtggagtgtgagaatattttcttccaatccagaagacagttatgtgctttctatgatgaaaccaccactgaatgatactgatgaggaagcaaagaggaattttcttggtttgacttctgtggaagatcgtacactccagcctggacaaacccttacaatttggctctcctgtacgccaaaagacattggtttgcatacatcaatcgtccatgttgatatcggtgatgagaaaatcgagcgtgtggcttttctattggccgatgataatgtttcccaggctttattttctgacaaaccctattccaggaaacacactcagaagaagaagtttgagtgcagttcatttgtgccaggttgtcgaccaactcggcagcatagtcaaggattcaagttcaagctccctcagtttgcaatacctgcagacatccgcgaactcattcaaagtaaacagagacctgatgtcctatctgaagagctgaacatgacaaactatgcaaaattctttagcactcttttagtcatggaagagataaatttggaggaggagatgagatcatatgacatggagcgtatcttaatgaggaggaggggtctcgaatttttgtcacttgaggtccctggcttggctgagaaaaggccttcactagtccatggagattttatatttgtcagacatgctggaagtgatgctcggccttatcagggtttcattcacaaggttgaagcggatgagatatttttgaaatttgataatcagttccaccttgctcaccgtgacaggaatcagtacgatgttagtttcacatataatagactgaacatgagaaggctttacaaggctatccatgaagcagaacttttgggacctgacattctatttccctgtcgatcatcctccggaagtgtgaagaaggggccgtttaaacctctaaatccacatataaacactgagcaagctgatgtagttgcaacaatacttggctgccgaggggttgcgccatacgtgatatacggacctccaggaactgggaagaccatgacccttgtggagtctattttgcagctttatacagccaagaggagggcaaatgtcctcatatgtgctgcttctaatagtgctgctgaccatgtattggcaaagcttcttcaggctagctatctgattcgaccaagtgacatatttaggctaaatgctgccagccgtcaatatgaggatgtcgatcctgattttattcgattttgcttctttcaagatatggtgttcaagtgtcctccattgcaagcactattgcggtacaagatagttatatcaacctacatgagttcatcgatgctgcagtctgaaggcattcgtcgggggcatttcacacacatttttttggatgaggctggtcaagcctctgagccagaggctatggttcctttgtcgggtttgtgtggaagagacactgtggttgtgttagcaggtgatcccatgcaattagggccagtggtttattgtaaacaagcagagaaggatggtttggggaaatcgtatctgcaaaggctgctctttgaatacgagcagtacagcacaggggatcctaactatgtgacaaagctagtgaggaattatcgatgccatccagcaatcctggaattaccatcagaacttttctatgggggagaattaattgcctgtaaagaagatgaagtgtcgtctatttatgacagcattgatcttcctaacaagtcgttccctgttctttttgttggcattcagggatgtgatgagagagaaggaaatgatccttcatggtttaataggattgaagctagtaaagtagtaaatatcattaggaatctgacaaggggtggtgatgttcgtgaagctgacataggagtcattactccatatcgacaacaagttgtcaagataaagaaggcacttgagacatttgaaatgcctgacttgaaagtgggaagtgtcgaacaattccagggtcaggaaagggaaataataatcatctccacagtcaggtctacagtaaagcataatgagtttgacaaattcttcaacctgggattcttaagcaatcacagaaggttcaatgttgcaatcactcgtgccaaatctttgctaattatcataggaaaccctcacattatcactaaggatcggcattgggataggctcctgaggtattgtgcagacaatggttcttaccaaggatgcccacttccaccaccagaagagacccaagtctctggatttcgtggcagccaagacgaacctgctaggtggggttacaaccaacaacaagagtcatctgctaactacagctacaagcaagacccacacgactctggttccgaacatgtaaatggtttgccctccactgaaaatgaagtggaatggtctgagaagacgctgaatgaggagcaccagccatgtagcagtgctgctgaagcagactctcctgagttcatgctgaagcagaaggctgaggaagaggaacatgttgagcaagatggcgtacagcctgagcaatgtccagccaaggacaacaaactccaagatgcgtatgcagcgaagtactcctttcctcctgaatggtgtgatgtttcaaatatccctgcaacaggatgggatgattgatcggcccggtgagtggccgccctttttttttttttccacaagaaagtatttacctaggtgcatctggtcgaataaatcgatatcaaccttgtaaggactaacattcaggcactctgtagcctttccttgaaaggctttcagctcaccctcagtcccattcttctgtctgcagtctgtagccttcccttggatttcttgatgccattatctacctggtgtttgagtatacgggaacaaatatgttcctgtgaaaactccgaaactgattatcttgctagctatggcaatatatatagcatcctcacttgctgttatcg

SEQ ID NO: 17959 - DNA, 1311 bp, Oryza sativa
  ref <308>: DATABASE ACCESSION NUMBER: AK068373
  ref <309>: DATABASE ENTRY DATE: 2001-12-06
ggtcgcgtccgaggctttgaaccctagcgcaccaatggcgacggcgacggcgacggcggctgcggccgccccggcggcggtgcccgcgctggtgtcccccttgtcccgccgcgccttcttcccgctccctcgtcgcgccggccccaaatcgcttcgggtcttcgcgtcggcggcgaggcgacgtgggttggtcgtggtggcggcggatgcggcagcggcggcaggtggcgcggagttcagcgacgaggagaacccctacgagattctgggtattaccccgcttgatagcttcgaccacatgaagctggcctacaagaggaagcacaaggaagcggacgagaatggagatcagtactacctgtcaaagttggagaaggcatacgacactgtgatgatgcagcagctgcagtataggaagaaaggagtaacatatggttctgttcaggtgtcgaaggatatcaagtatgctgatgaccagccaattgttccttggggacctagatcctccaaatcaacagtaaaggacatgcgcatcaatttaggaatatcagcagccattgttgtttggatagctatcatgggcaatgcggactggaagccattgcagttcctatgttttgctttcttctacagaatacttcaaaagctaagggctactgaaccaccaataacgccaatatataatgagtatggtgaggttgaaggacgtggaatacgaatggcaaaacgagtagtccgtgctttgggtttgatatttggatgtgtatttgccgcgtcattgggttatacagcagctgttaacgtgattgagttttcatggcagtatactccacgcattgtttattactatcaggagttgattgttacagcagctaccgctgctctgctgtacatcacagcctcatactaccggtaaacagacagtggaattacagtctggctaagagaaccatgagatgttaggatatgagctgagattcggtgagtggcacacttgtggactggtgttacctcaggcattaatggagagtcaagagttcacaaattttgaagtataattgggccggcttttgagttagatactgttgaatatgcgcttgtattgcacagttgtgaacctcctcactgggcgtaaggcgtcggctgatgaaaaaaaaatagtgtgcatattttaacagaaatgtaatgtatgagattatatcagattctggtattttccttccctttttttttccttttgagggtgagagattctgattcttgttaaaaacttgacgagtagcccaacaaaataacttgacaagtactttc

SEQ ID NO: 17960 - DNA, 1563 bp, Oryza sativa
  ref <308>: DATABASE ACCESSION NUMBER: AK068374
  ref <309>: DATABASE ENTRY DATE: 2001-12-06
gacttctccctccgaatttaacgcggagcgaagctcagagcagagcacgccggccatggcgcgcgcctcgagctcctcgtctccgccgtcgccgcgcctcctcctcctcctcctggtggcggtggcggcgacgctgctccccgaggcggcggcgctgggcaacttcacggcggagtcccgcggcgcgcggtggcggtctcgccgcgcgcggcgccgcgccttcgagaacggcctcggccgcacgccgcagatggggtggaatagctggaaccacttctactgcgggatcaacgagcagatcatcagggaaacagctgatgcattggtcaacactggtctggcgaaattggggtaccagtatgtgaatatagatgattgctgggcagaatatagtagggattcccagggtaactttgtgccaaataggcagacgttcccctctggtatcaaggcactggcagattatgtgcatgcaaaagggctgaagcttggcatctacagcgatgccgggtcacaaacatgcagtaacaaaatgccaggatcacttgatcatgaagagcaagatgtcaagaccttcgcgtcttggggagttgattatctgaagtatgacaactgcaatgatgctggcaggagtgtcatggaaagatacactagaatgagcaatgccatgaagacctatggaaagaatatcttcttctcactctgtgaatgggggaaagaaaatcctgctacatgggcaggccgcatgggtaacagctggagaacaactggcgacatcgccgacaactggggcagtatgacatctcgtgcagacgaaaatgaccaatgggctgcctatgctggacctggtggatggaatgatcctgacatgcttgaagtgggaaatggtgggatgtctgaagctgagtaccggtcacacttcagtatctgggcactagcaaaggctcctcttttgatcggatgcgatgtgcgctcaatgagccagcagacgaagaacatactcagcaactcggaggtgatcgctgtcaaccaagatagtctaggtgtccgaggaaagaaagtacaatctgacaacggattggaggtttgggccgggccactcagcaacaacaggaaggctgtggtgctctggaacaggcagtcataccaggcaaccatcactgcacattggtcgaacatcgggctcgctggatcggtcgcggtcactgctcgtgatctatgggcgcactcttcgttcgcggctcagggacagatatcagcatcggtggcgcctcatgactgcaagatgtatgtcttgacaccaaactagtcagcaaagaaaagcagcacaggttagtacgtgtccggcgaatacagctaaattgatcaggattcaggaagaaggtttgcaatttgcaaggattggtagagctggaaatgggatgccatttggttatgtatgtagaaataagctgtaagcctgtaagcgtatatgtaatcagccgtcaaatgctggcgagtgtatttctgaagtttgcaacgaaagttgcagcaataaaaatacaaaaagaaggctttcctgcc

SEQ ID NO: 17961 - DNA, 2791 bp, Oryza sativa
  ref <308>: DATABASE ACCESSION NUMBER: AK068375
  ref <309>: DATABASE ENTRY DATE: 2001-12-06
gtcggtcggtggtggttgtcgtcgtcgtccgcttgtcgtcggtgatctgtagtgccgtcggtctttcggcgaaacagtaccagtctccatcgaatcgaatgtgtgcgtgtttgtgtcgccagcatctgccgtgtcaattgtagttcgctggcccttagggcaggaaaatccgttccgtttagagtcggtcaacatgttccaatctgctttgccgtagaatccttcggacaatcgagaacacttctggacgtacgagcttcagcaaaccgagaattcaccgatgaagtggcggtaaactgagacaacaatgacagtcgacttccgggagttcttctggggcgagagaaatgccggattcgagctactctatcgaaactgcaagcagagtcaggcgacggccaaagaactggtcgacttcgtccgagagcgcagccagatcgaggagaactactcgaagcttttggggaagttagcgacgtcgcgacttctgggcagcgggtcctccgtagctccgctctgggctgtcctcagaagttcgaccgaaaaagcggcttcggtgcactcgcagctcgcgcatcaactcagcgattcggtgaaagaaattcaacgctatgcagacgaacagcacaaaagtcagaaaaagatcaaggatgaagaagcccccaccatggaggccgttcagacgctacaacagaatacgttgcttttggccaaagcccgagaagcgtacgacagtcgaaaatctgaaacgaatgatctgaaacgcaagaaagctctcgaagactatcgtactcagagcgagcgacatgagttggccagagtgaactttattcagaagatgagcgaggcctgctatcgcttccaggtgctcgaagagaatcatctcagtgcggtgaagagtttcatcgataattacattcacacgctaatcaatagctatgccatgtgcgcttcaatgtgtcaggacctgcaaacaaacgtcgacgcactcagcatcgaagcgctgctcgaccgcttctgtaaggaacgcggaacaggacgggacaagcctgagcctcataagaatctacaggacacgcctccactctccagcaactcgctacaccttgcgcagctgcactcgcagagttccgaggacgttttcaggtccggtcacacgaacagcacaggaagtattcccggctccacgtcggcggccaccatggacagtcaacagttgaatcatatggccacgatgcctcaccaatcgtcgcaatcgaggctatcggaaatattcgataccgttcgggggaagcacagatcgacgagtagcagaagcaatgacaactcttcagcaaacgatcccttgtccggtatcggctcgacggcgaatctcaactcatcgaacgtaatgatgcccacttcggggacattggtggacagagatggcttcagtataccgccgccaccttcttcgcgatcttcgacgctattgaaatcgaatcaagacagttctagtgatgacagcagtgatgacgataccgagtccagacgaaaaatcaagatagagatcaagcccatctccgaggcgagttacgcaacacaggtccaaccggctcgtttggtgtcgccgccggcgagaacggtcataagtcctgagttcaacggaaatcgaactcctccaacactcgccgaactcccaaaaagcatcataccccgacctccatcgcggagatcgctcgaacggtcatcgccgtcgatgacgcgcgccgaatccgtcacttcgattggatctgtttcgacgggctggtcccgaggaccttcaccgctcacgctcgtatacggcgatacgatcccgatagctgtcgccttccaagaagtcgtacatgcatcgttccgaggcgcagaagaaggtctctgtcaggtgaggattttcggcgatatgaaaatgtgcttccctgccggaattctcaacgtcctgatatcgcacccgaatattccgcaactgacgttctcactcggaaatcttcctctggacaacctcactcccaactcgttgctggttagctctgtagaagagcaaccgggcaccttccgaatggacatgaacgagctcttgtcgcagttgaagcgtctccacgacgctcaccccggccagtcctacttcaacgttgatctgatgaagtacagtctagccggcgggcccggagcgacgtccgctcccctacatctggtcacctattggaactgcgactcgacaaagtccgacctcaaggtggactatctgtacaacgcgacggacaaatgggctcaacgaccgtgcaatgccataatcacggtcacgctcccgccatccgccgcaatcagcaacgtacactcgaagccaccctgtagttggaacagcgcgtctaagaaagcctcttggaaggttgtcaacatcaaagcgggctcgattctcgctcgcttccagcacgacgggcccctgcatgccgatcccccgggtgaggtggctgcccagttttccataggagacgcgtgctttagcgacgcctcgttcacgcttgcgcccgcctgcggttatcgtgtgtctctgatcaagaagaaaatcatctccggtcgctacactgctgtgatgtgagatgcagattgtaacagaaaaacagatgacataagaatcgcgcaggacggtcagaaacgctagtcagacaaagacgacgagaaggagatggaggagatggataacaacggctcacagcaacaaggacacaaagcctcgtgtgtaaattcttcgatatccagtaaattgttggtc

SEQ ID NO: 17962 - DNA, 1209 bp, Oryza sativa
  ref <308>: DATABASE ACCESSION NUMBER: AK068376
  ref <309>: DATABASE ENTRY DATE: 2001-12-06
ggtgctgcctcgcccgcctccgagcagttggggaagagaaccgaagcacaaaccctagcggcggcgcagctcagccggggtttgcggaggaaggggaggggcaccgcccgcgatgctcgcggcgtcggctcggcgggtggcggccgccgccgccgcgtcgtcctcccattccaggctcgccaaccagctcgcccacgcgctgaatccgcagaggtggatccatgaccggaacaagaaggcgatggagttggtggccaaggggtggagcgccctgcaggaggttgatcgcgtcatcgactacgccgaccgcaacgacaagcgcctgatcccacttctcaggggtgcaaaggaaaattttgagctggctctggagatcgacaatatgaacactcatgcgagattatggcttgccaagatgcatttcaagtatcatgttcctggagcttgtaaggccattggtgctgctctgttggttgaagctgcaaacatgggtgatccagatgcacagtatgaacttggatgccatttgagaattgagaatgactacgttcactctgaccaacaggctttttattacattgagaaagctgttgaccagttgcaccctggtgctttgtatcttctaggtgctgtatatttaactggagactgtgttaagagggatatagcttcagcaatgtggtgtttccacagagcatcagaaaagggacactctggagctgcaattgcatatggatcacttctattaaaaggtgctgaagtgcctgaggttattaccaggttcaactcaggtaagagtccatcaactggaaagatgcgaaaaaggcccatacagcaggatccagtgaagctagcaaaggagcagtttcaaattgcagctgaagctggatgtgatctcggtttgcgatggctgaagaggcttggggattatgaaaagcagcaagaacaaccaaagcaaatccagcaatgaccaccttcgaaatgatttgcttcacttcggcattgctctatgttgacatgcgtttgtcatacacactatacaggtagaacgtcagattctcaactgtaatcatgtaattgaatccaagcactatgtaaattttgatatctggcccaactccttgaaaaggtagacttgagttgatcccctttctctacaaaggatttttatcgtaccagtccttatagagttcgttactttgtttttcc

SEQ ID NO: 17963 - DNA, 791 bp, Oryza sativa
  ref <308>: DATABASE ACCESSION NUMBER: AK068377
  ref <309>: DATABASE ENTRY DATE: 2001-12-06
ggttcccttgctacactgacacacatcctcgatggccacttatctccaatcagcaggcctcaccgccgccactgccagcaccagccgcctcctccggccaacaccacggaggctgctcctcctcgtggcggcgtgctccactggcggacggagatcagcctgcctctccgtcggcctcgcagccgccgccgccaccatcttccagcatcatcccgcctgcgccgccaccgacgacgagccggcaaacaatgggtggtggctcaccgagttccctttgccggtgccaaagattgtcaacaaggagctgaacaatggcgagacggggagccggacgttcgtgaggaacggcatctacatagccgacatcgggccgagctacgcggcgcacgcgtacaggctgcggagcacggcgttcgacctgctggcgctggaggacctgctgggcaacaacgccgacagggccaactacgtcaccaagtacctccgcctcaagtccaccttcatgtacttcgacttcgacaagctcatctccgccgcctccgacgaccagcgccccccgctgctcgacctcgccacccgcctcttcgacagcttcgagcgcctccagaaggcctgcggcaccaaggacgacacccagatcggctcctcctatgccgacaccaagatcatcctccaggaggtcatggcaaagatggcctagtgtttctgttggtgtactagctagtactgtatttctctcactttacttgtcatacatacatatatatatatatatatatatcctcctcatc

SEQ ID NO: 17964 - DNA, 1689 bp, Oryza sativa
  ref <308>: DATABASE ACCESSION NUMBER: AK068378
  ref <309>: DATABASE ENTRY DATE: 2001-12-06
gctagcggcataggacgacgagctccctacacagacgggagagagagagacagagagacgagggagaagaggatgaagcccaagaacggcggcgcggccgcggacaggaggctgccgccgaggtggatactcctctgcgcgttcagcttcggcctcggcatgctgttctccgaccagtttggatcggtgccggagtggcagaaaccgttggcggcgcagcgccgggtgcaggacaggaagctgcagatccttgatgaagattttgttgccaagccgaaaccaacggacgacagagacgtgatgagcgaagtaacaaagactcatgaagccatacaatatctagataagtccattgccactctacaaatggagctggcaggtaagcgcagcacactcgagctacttggcaatggaaatggtataagccagcaaaggaagaaagcttttgtagtgattgggatcaacactgcattcagtagcaggaagcgtcgggattctgttcggcagacctggatgcctcaaggtgaggaactcaagaaattggaagaggagaagggaatcatcattcggtttatgataggacatagtgctacgtcaaacaatgtgcttgataaagaaatagacgcagaggatgccgctcatcatgattttcttaggctggaccatgttgaagggtatcacgagctatctgcaaagaccaagatattcttttccactgctgtggcattatgggatgctgatttctatgtcaaggtggatgatgatgttcatgtcaaccttggaatgctgatcacaacccttggtcggcataaattgaaaccccgggtttatattgggtgcatgaaatcaggaccagttcttgctgacaaaaatgtgaaataccacgagcctgagttctggaagtttggcgaagacgggaacaagtatttccgccatgccactgggcagatatatgccatctcaaaggaccttgccacatacatctcgatcaaccggcctatattgcacaaatatgcaaacgaagacgtttcacttggcgcatggtttatcggtttagacgtggagcacattgacgacagagacatgtgctgtggaacaccaccagactgcgaatggaaagcgcaagcaggaaatatttgtgttgcatcattcgactggaagtgtagtggggtctgcaatccagttgaaaggttgaagtatgtgcactcgagatgcagtgaaggagatgatgcaatttggagcgcttcattctgacgagatgctaacaagctttcacagcttcacagactaagagatgggttcatataatcatacgtttgtgcagacagtatccgtctccttgaagttcagagctttgcaaatcgcagtgggaaaagaattagaagagatagaaacatatacatacacctgatgaaggaattggcagaacgataaactgaacttagacaccacctccctttttctttattaggatggaacattgaagacgtgggtatacattcttcaggggaatgtggctagtacacatgttgattgtcatagtacagaaagaaaaatggttacattaaattaattcattcgttagtatgaaatctgattagtccgtatctgaacttcttgtggcgaccattttaagtacatgcggagaccgaaaatatatgctacaatcgtctggcgaaaatatatgct

SEQ ID NO: 17965 - DNA, 1847 bp, Oryza sativa
  ref <308>: DATABASE ACCESSION NUMBER: AK068379
  ref <309>: DATABASE ENTRY DATE: 2001-12-06
ggctcttgctgctcctcttctcctcgcttcgtcttcttcctcctctcgcctcttcgttgcgagtagagagatttttgttgtgatttttgagggaatatttttggatttttggtttatttttgtgtgggtttttttggaggtgtatttattttgtttttttggtggtgatttatttttgagaggttttaagggattaagggaggtgtgtgaggaagatggggttagtgtgtgtgagctccaatggcgagagctcgtggcggaaaccctactaggttgaggaggaggaggaggtcgtcgtcgcgctcgcgtgtggaccatggaggccaagtcgggggaagcgagcgttgcgccggtggccgtggcgaccgaggcaacggcggcgacggtgagcttccagccgcaggcggcggtggccgagcagggtagctcgagcggtggtgtgctggtgccgccgccgcctatggcggcgggaggaggaggagttgtggtggcggcggcgccggtggcgggggtggtgaaggtggggaagaagagggggaggccgaggaagtatgggccggacgggagcctgatccggccgctgaacgcgacgccgatctcggcgtcggtacccatggcggcctccgcggtggggccctacacgccggcgtcggcggtgggcgccgccatgaagcgcgggaggggtcgccccctcgacttcgcctccacggccaagctccatcaccaccaccaacaccagcaccatcaccagcagcagcagttcggcttccacttcgactccattggtgaaatggtggcttgttctgctggtgcgaattttactcctcacatcatcactgttgctcctggagaggatgtgactatgaaggtcatatcattttctcaacaaggaccacgagctatctgtattctatctgctaatggtgtgatatcaaacgttacactgcgtcaacctgattcctcgggtggcacattaacttacgagggacgttttgagttgctatctttgtctggatcgtttatgcctactgaaaacagcggaacacggagtcggtcaggtgggatgagcgtttctcttgccagcccagatggccgtgttgtcggtggtggagttgctggccttctggtggcagcaagtcctgttcagattgttgtcggaagcttcctaccaagctatcaaatggaacagaagaataagaagcctagggtggaagcggcacccgcccttgcacagactcctcctgctgttccaatctctagtaccgatacgcacagcagcgagcaagggcagcacagctccgtcgccccaagaacaacaaacatcgtaacctcagcatacaacccagaccagagctgggcatctcctgctcagtcgatacctgacagcgcgagaacaccatcgggcgatgtgaaggtcaccgcctctggagcctgaaactgagatgaactgaccaggatccatgaaattcctggtctgtcactgctgcagccgcacaccatgatcgccggtggcggccaaagatggcttcatttctttctgacttgtaaaagatgtatctgagttccagtaggttttccatcttcaggcagaagagtctaactgcaattgctgtagctgtcccgatattagtcactgtttaagcatcaggctaccctgcttccttgtaacaccatgtcggtcttattggagattggagagttctgtagttacaaaattgtactattagttctgtgtgtgtgtgtgtgtgtctctaggcttctttttcattttgttggattactccacttaatttgctcctggtgtaccccttattaaattagcattagaattttttttcactctaatt

SEQ ID NO: 17966 - DNA, 1150 bp, Oryza sativa
  ref <308>: DATABASE ACCESSION NUMBER: AK068380
  ref <309>: DATABASE ENTRY DATE: 2001-12-06
ggcttgtttgttccctctctcctcctcctccgtcagtctgtcgtcgaactccattgcgagctcacaagggttcagcacaccaaccaccaaccgttgggctcgagttctaccaacctcccttttctagtcgggctacaaattttcagcagcacaaatggcagaggcggtcctccttgctctcacgaagatcagtgatgctttagcagatgaaatcactaaagaattgattgtgaaactgtctgaaaaggttaataatctgaaggatctggatgaaaagattgagcaaatgaggaagcaattgacaaccatgaacaacgttatattgcagatgggcatgatatacctcaccgatgaagtcgtcaagggttggattggtgaggtgaggaaggtggcgtaccgtgttgaggacgtcatggacaaatacttgaattactccatgcaaatggcggaagaatggttccttaaaaaatacttcatcaaaggatcacatccttaaaaaatacttcatcaaaggatcacattatgttttggttttcactcaaattgctgatgaggtagtcaagatagaaaaggaaatcaaacaagttatagaactcaaggatcagtggttgcatccatcccagcttgtttctgacccactcactgagatgggaagacagaggtcccgggacagcttcccagaacttgtgaaagatgaagatcttgtggggattgaagacagtaggagactgctgactgaatggctgtacgctgacgagctggacagtaaggtgataacagtgtcaggtatgggcggactggggaaaaccaccctggtcacaaatgtgtatgaacgtgaaaagatcaacttctctgctcatgcatggatggttgtgtctcaaacctacactgtggatgctctattaaggaagctgcttaggaaagttggttacacagaaccaccactgtcatgtaacattgacaaaatggatgtgcatgatttgaaagaggaaataaagcgaatgcttaaaggtaaaaaatgcttgatcgtacctgatgatgtctgggaccaagaagcatactttcaaatacgtgatgcattccagaatgaccaaggaagtcgcgtaataatcacaatgcggaagaatcatgtggcagctcttgcttcctc

SEQ ID NO: 17967 - DNA, 813 bp, Oryza sativa
  ref <308>: DATABASE ACCESSION NUMBER: AK068381
  ref <309>: DATABASE ENTRY DATE: 2001-12-06
ggtcgtcctcgtcgtcgtcgggtggtggtgggtctctcgcgctcgccgccgccaccgccgtcgcggtgtccggctccatcgtcatcttctccctctgccgcgccgcgaggcccgcggcggcggcggaggcggaggcggaggcggaggcttccctccgcccctgcctctcctcctcctcctcctcctcagagaggcggaggcggaggagcgggaggcgggtgcggttcgcggcggacgtcgtcgacaatgagggcgccgcccgcccggcgcggcggctcgcggcggcggaggagcacacgtgcaggggcgacgcggcggcggccgcggcggcggagcggatgccggcgaaccgggaggcgttgtaccgcggcatgctccgcgaccgctcctcccacagggtcacctactcctgctgaccaccgcctcctcgccgccgcctcgccgccggcggccgccgcggttgctcgattgattaggctctcgcaattaagctaattaatcatcatcctccgcttgcttttggttaactttttttttgcttgttttttctctctctttctcgtgcgtctttgcttcgaaagacaggaagacagaggcagttgttgactttgtgtggatccagtacatctctactgtacagtggatggattagtatattttatttttaagtagtttttgaatctcctctaggtttgtaaatactcgatttcttctcttttttatctcaaagaaaagggaaaaaaagagacgatttgccatgtcaaaagtggttgtgaactcgacgagagattaaagtcaaaagtggtgttcgtc

SEQ ID NO: 17968 - DNA, 3536 bp, Oryza sativa
  ref <308>: DATABASE ACCESSION NUMBER: AK068382
  ref <309>: DATABASE ENTRY DATE: 2001-12-06
gagatggagtgcggtactggtcataaaagctagatctctccactgcaagctcatgatcttgtcgctaacgaagctagctaattgctaagtaactacaggcatgggatcacgctactggtcgcttggttctccacatgctggcaccgaagaaaacaatcaagccacaggagggatgaaatggggtgatcccaggacacaaggctcgcctgccagcttgcaaggtaaagcaactggctacctgcctacctagctacgccatgtaaaaaaaaaaaaaagcacagcaagcacataaacaactttagctggacatttctcttttttatctttactaattatttcatcgtaaggtcctctaggatgcgtccaccaaactatggtgatctatgagacaacaaaagctaaaattatcatgttatattttttttctaaaaaaaagcaggttctgatccatacagactatatactactccacgttaacaatacttattgttttatacaaatacatggtctccaaaaaataaatttgaccgctattaatttatttattataatatatgtaaaaatattaataaatatatgattttgttgaagtaccttctaagttcttcagatttataagataaatgtttagaaattaaagcttggcatcaatcttgcctaaaatgaaataatatcaacctgaagggtgtagctagttagcctgctgataggctgagcactagagcgctacacctatcaagtaatttcaaattttatttgaaagaaaagtaatttcaaatttaatataaaaatgacacaagataatactgccagcatatagttaacaagtgagtataatactccataatttcttttgcacggatatataaaaagtacatggaattaaatgaaaatgattatgattggctgatatcaagaagtacaggggggaattaaatagagaattgttgttattgttgtgataagaacgtaagtaaagaaattaatatattagaagacaaaattttgctttatttattgaagcaatgttgtgacgtattttcttttgtcgatacttcatacaaaagcatggcatttagccagtgtgagtatatagtagatcaaccagtcgataacatgctaacaatgttttgagcaaatatatctaccggaccacaatcccttcctcactatagctaggcttgtggcctatactaaggcagttgggctttgtatttctgggttcctcctcgttgccgacccaatcattcttcgagttagaaggcaactcatgacgtttatattaattactctctgtttgtaggatatagtgggccgtcttcagtgcatcagcccatcagcagagaacgtgagtactgtacagtgcacacagattgagcatttttaattagatatgtatatatatgcgtacgatatgattatatgaagttaaatattcctctgtgttgtaattacgcatgcactacagccgcagcgggtttaatacggggagatcccagggctcaaggcgcacaaggtaattaaattattaccaggcttaatttcgtccagtttaggcgaggattctctttattagatcaaaggctttccgcgcagctttattgatcaaagcataataggagttcgatacatgagaaatgctggggtttccgcctcttaggttggatctaatttgtatccctaaactataaaaccgggtataaaaactcttttaagtattaaaactggtgaaaaagactctcaagactacagcgagggtggtattcgccgatgtggagtccacgtggcagctaaccactaaataaataaaaaaatagacatggcccacatgtcagcgccctttcttcatctcccctctatttcttctccggcatcggcaagtgcatggcggcggtgccttgtggtgagtcgtttccttgtgctgcgatcctgcgactgcgactccgccgctactggagtggccgcaacatggacctcctcgtcctgtccgcctccgatgtcacgccgtctccaccgcagacaagccccgcatctttgatcccctcccggtcttcccttctctcccatgcaggacaacatacagaagtatcaccatctactccctcagcagcaagggctgggataacatccaaaagaatgcaagcaacaattaagccaaatcgtatttgcggttggttttgcttctcatcggcgagcgtggttgccatcgccgggtgtcatgcacaacatgtcaccatcgatgatggttggatctcatgcttgctctgttgtgtcgtctctagtgaataatttctaggtgtttgtccttcgatcgccttcctctctacggcactgagttcgttgagctcccatgtgagcgagcgttcgagcgagcatcggtggcagcaggcgcatagcttgaggtcgacctcgcctagctccgggggtcacgctgctcgacgccgtcaccacccgaatcgatcaactccatcgccgtcgactcctcttccggttcgccctccaccacctctccctgtcttccccgccgccttcctcggtccgtcgtgtgcacgtcgctcttgtagcttgagcccgaggagtctcgccggtcgccagcccaccgctgccttcctcccttctccacggacgggcagctaagatcgaggtcgatggggaagagagatatgggagagggagcaaggaggaagaaggggtagtactaaggatgacatgtggtctccacataatatttctatattttttttctgactctgcattttttatcgtggtcaacatgccatgtcatggaataccatctttcatacttacttaggagtctctttgcactggttttaataattaggagagttattatacccggttttgtgatttagtggtacgaatcgaattcagcctatattaagggactcaatgtggactttttcctttaattaattactctctgtttgtaggatatggtgggccgtctttactgcatcagcccatcagcagagaaccggcagcgggtttaatccggggagatcccaggactcaaggcgctcccattacacaaggtaattaaattattactaggcttaaatttcgtccagctgatgcgaggattttcttttttagatcaaattaaggctttccgcgcagctttacttatcaaagcataacaggagttcgatacatgagaaatgctggggtttccggcttgccaaacacaacaaacagccattaaaccaacgccctaacaaacaccaagtcttatgccacagataattacttaccagaacacgcagaagactcaaaagaactcaaaagaggtagacacaattccagattcctcctgcgcgacttcatcgtactgttcaccgtcttgagcttcgccctccggtcctcctcgacttaaaacatcctaccgctgggaattccagctttactgagaaagcccaggaaacataagtcttgcaaaaccattgtgccgacaggtaaaagaaatacttaaaacatcctaccgctgggaatcccagctttgagataaaaggggtttt

SEQ ID NO: 17969 - DNA, 2206 bp, Oryza sativa
  ref <308>: DATABASE ACCESSION NUMBER: AK068383
  ref <309>: DATABASE ENTRY DATE: 2001-12-06
gagtccagcaattccactcccccaccaccgccatcctcccccccgccgcctccacccgccggcgtctacctccatctcctcctccatcaccgccaccgccgccatccatacgggctctcccgctcggctcggctactccaccaccggcaacgctccccgtgccgcatccatccccccccctccaagcttccagtcgcaggagagaaggcggccgccggagtaggcacacgcaacaagcagcttccagtaggtttccctcaccggcggcggcggcggcggaggcggcgagaagccggccatggcgacgaagcagcaggacgcttcgacgtccggcgcggccatgtccatgaaggagtacctcaagaggtaccaatccgacgacgcgcagggcaaggccaagaagaagaagaagaagaagcccaagcccgcggccgccgtgggcggaggtgtgcttatcgtcgacgaggaccccacgtggcacaagcccgtccagatcgaggaggagcccgcgtcgtccggggatgagagaccgttggtggacgaggacatcgaggtcaagcggatgcgccgcctggaggcgattcgcgcggcgcggccgtacaatgctatcgctgaggacggaagcgggtgggtcaccgtggccgcccccgaggactccgatggtggtttaaccggtcgccgccgcagaaatgacacgccctcaccggagcgcgggggtgctggaaggaaggatctgtctcctccgcggcggaggcagcggcaggatacgccctcgccggacccgagagatgctgcgggtaaggatctgtcgccgccgaggcagaggcgaaggcggcaagacacgccgtcaccaaagggtagtgaggtagctggggggcatgatgatttgtcaccaccgcggaagtctaggcagcaacgagacccctctcctccacgcaggctctctcgccatgactccaaggaatcccaggacatttcaccaccacgaaggcgtaccaggcatgactcagaggagccacaggacctctctccaccacgccgggaggggcggcatgattctgaagaacccaaagacctcttgccaccatggaggcgcgtgaggcatgattctgaggaacccaaagacctctcgccaccacggaggcgcacgagacatgattcagaagagcccgaagacctctctcccccacgcagacggacgcggcacgactctcatgaacccaaggacaaattgccaccactgaaaaggcaggctttgggtgatggggacatttcacctccaaggaagggtaggaaggaagtggctccgaaggaggtgaggaaagctgggttgatgacagcagaggaagttaaagaggacatcaggaagattaaggaggatgagaggctcaagtttgctgcacaggatccctcagtgattgggaaaggggcaaaagcagtattccgagataaacaaggaaaacgaataagtgaagaagatatgaggaaggcaaaggaagacacgaaaccaaaggaaatacatatagaatggggtaaagggttggtgcagaagcgagaagctgaggctagattacaggagcttgaatctgaaaagagtaagccatttgcacggacaagggatgatcctgagctcgacaccatgctaaaaaacagaatccggtggggtgatcctatggctcatcttgtcaagaggaatgatacagacctccttctggaggacttgggagatgatgaaaagatgaaagaatctggcttcattgttccccaaaatatacctagtcacagctggctgaagcgtggtgtagatcctcctccaaaccgctacggcataaagcctggtcgtcattgggacggagtggatcgcagcaatggatttgagaaggatatgtttaagctgaagaacgagaagcaagcaacggagcaagaggcctacctttggtctgtcgcagatatgtgagcatagctgttcttcaaagaagccaaggtagcttgtgtgccttgttaaacgaagtagtatactgtaaaatgcttggaaggaaggaagcacggcctctcggcgtagcacagcgtgcttgaaaactcaaatgtagaatcaaacttgttgtgcattggttgaaatctttttggcatttttctctttgccactcttaaaaacattttgtaacatcgatgaacatctttactcggaattagaagctgatctttt

SEQ ID NO: 17970 - DNA, 1404 bp, Oryza sativa
  ref <308>: DATABASE ACCESSION NUMBER: AK068384
  ref <309>: DATABASE ENTRY DATE: 2001-12-06
gaaacagagagaggcagaaggcaagctgcagtgttgggggagaagaaaggagagagagagagagagagagagagatagagagagagagaggcagtggcagaggcagaggaagggaaagaaagctccaatctcgcctctgctcctgtctccaggaaatcttgatgcttgcacataaataggtgattccaagattggacatttggtacgcgagctctgagctatccaagaacttggtggtgaagatgtcagtgatccatgcggaggacatcgagatatcgctgtgcgacggcaactcggaggacgagcggcggcggcggaggatcgggtccaaccttcgccggaaggccatccacgcgatcaagaagcgcggccggcggcgcgtcgactgccgcttcccgccggccatctccatcgaggacgtccgcgacgccgaggaggagcgcgctgtcgccgccttccacgaccgcctcgccgcccacggcctcctccccgacaagcatgacgactaccacatgatgctgaggttcttgaaggccaggaagtttgatatcgacagggcaatgcagatgtgggcagacatgctgaaatggagggaagagttcggagctgacacaatccttcaggattttgattttcatgaactggatgaagtgctgcgctactaccctcagggctaccacggtgtcgaccgggagggccgcccagtgtacatcgagaggctcggcaaggtcgacccgaacaagctcatgcagatcacctcggtggaccgctacatcaagtaccatgttcaggagtttgagagggccttcagggagaggtttcctgcctgcacattggcggcaaagaggcacattgattccaccaccaccatcttggatgttcagggagtgggatttaagaatttctcaaagactgcgagggagcttatcaaccgaatgcagaagatagacagtgactattaccctgagacattacatcaaatgtttgtcgtgaacgccggcagcgggttcaagttgatctggaatagcgtgaagggctttctggacccaaaaacttcatccaagattcatgttcttggttcgaattaccagagtagacttcttgaagtaattgattccagtgagttaccggacttcctcggtgggtcatgctcatgcagtgacaagggtggttgtcttgggtcgaataaaggcccatggaatgatcctttcattttgaagctgatacacaatttggaggctggttgcgtcagagagatcaagccagtgtctgacggtgaagaaagaagcagctcatcccttcggttggagcagccgaagtggcagggcatgattagcgacatatcaaatgctgagtcagggtcagacgttgatgattttggttctttctttcagaaaggtgttg

SEQ ID NO: 17971 - DNA, 1307 bp, Oryza sativa
  ref <308>: DATABASE ACCESSION NUMBER: AK068385
  ref <309>: DATABASE ENTRY DATE: 2001-12-06
ggtattcgcaggctcatcgacttctcgtcttcctctcctctctctcgtttcgattcccccgcgagagattcgatccaaccaaacccacccgctaccagcgtcttctccttcgcgagcaagttttttgagggtttgcaatgggaggaagcgaatacgatgatgactgggagttgcctagcgctgacatcactgtagttctttgcggcaaacttggctgtggcaagagcgcaactggcaatagcatcgttggaagagaagcatttgtatcagagtactcccatgctagtgtgaccagtacttgtcaattggccagcaccgcgctaaaggatggccgtaccctcaatgttattgatacgccaggattatttgaaatgaccattacatctgaggatgccggtaaagaaattgttaagtgtatgagtatggccaaggatgggatacatgcagtgctgatggttttttctgccacatctcgttttactcgagaagattccagtaccattgagacaattaaagagtttttcggagagaagattgttgatcacatgatactagtatttacttatggagatttagttggtgaaaataaattgaagagcatgctgaataatgccccagagtatctgcagaaaactgttgagctatgcaaaaacagagttgttctctttgataatatgaccaaggaccgatggctccaagagaagcaacttgaaaatttgcttgatgttgttgactctgtgaatacaaataatggaggaaagccattttcagatcaaatgctcgcttgcattaaggaagcacatgccagagaacaggaggtgcatgatgctattggatatacagaagagcaaatatctgaattgaaaaaggagatccagagaactcgggatgaacagcttgcaaacattaccaacatggtggaggaaaagctgaatatcactgttgacaagctgcaacagcaactcatggaagaacagaatgcaaggctagaagcagagaggttggcagctgaagctaggctccgatcagatgaggagatccgcaagctcaaaaagcgcctcgagaaggcccaacaagaaaatgaggaattccgaaagatggcttctcaacacaagtgttctattctatgagtagctttctcctaggatcaagctgctgccatggttgaatgctccgtgcattgttaatagagttcagaacagtgctctaggctatgtggttgacataaaacttttgctactgggctatctcatatctgtaaatatacaggtatttggatttttaatgtccaaggattttgactatcg

SEQ ID NO: 17972 - DNA, 2515 bp, Oryza sativa
  ref <308>: DATABASE ACCESSION NUMBER: AK068386
  ref <309>: DATABASE ENTRY DATE: 2001-12-06
ggtaaaaaacagaaacgccccgcaacctgcgccccctcctccgcgcgcctccatcgccgccccgcaccctcccatcgcctctcctccgcgctgcccctccaccagcaggcggcgcggtccatcgccgccccgcgccctcccctcgcctctcctccgcgccgcccctccaccagcagccatctccacaccgcgccggcgcccctctcctctccacccgcgccgccgccgcccctcgcctccccaccgcgcctctacccctagccggagaggcgccgcccctccacctccaccagaagccgtccccacaccgcgccggcgaccctcgcctccccaccgcgcctccacccctagccggagaggcgccgcccctccacctccaccagaagccgtccccacaccgcgccggctaccctcgtctctccacccgtgccgccctcgacctgcgccgcctcctcgccgccgtcgaacgccgacgcccctcgacgccctcgaccgccgctgcctcctcgccgccctcgaccgccgacgccccgcgccgccaggccgcagccacctccgccggtcacgatcgccgtcatctgaagggttccaatggatgatgctaaattaattcttcaggtctatgatgctaaattggttagtccatgttttgcactgatattatcactgatctgtaattgttcttgcagaactcttaaggatcatctgaagattgaatttgaaagagcagtggactgatgtgctacttcattttattactttgcatgctctgagatcaacaatctctcatgatagatagcatattacgtaatgctggagacgtggatagagattagtacattcattacatatgatagatagcatatcccatttttgatgactatgtggtttgtcatgtcatgcacataagtaagaatattaggttgctttgatttgtgaatgttcaatgactatgattctgaaggtttaatcaaatggtacctttttttttctaaagggtttcagcaatccatattattatccatttactgttagtgccactaatcatggttgctgctctttcaaatatgatgctgtgcagcatggaaacaaaaattggtttctctttcatgttaacagaagctatgaaccatcctaatactaatttatcaatggctattatgcatctgttcaatagtgactcgatcagttatgtgatctacatcagtgagataaccgagatcaaattattatgtgcatgtgtgacaaaatatttgctgtttaattttccttccacccactatagcatacatcagtgatataattgaaatcaaattattaatgtgcatgtgtgacaaaaaaaagaagttattatctgcatgtgtttctcaaatttagatagcaggcctaatcttttatcgagctaggagaagccctgagtgccctggttaggaacaacctggagctatggttgatgaatcatgagtaaagagttttcggttctgtcagaatgaaaaatgcctgaccatagctctgaagatgagtacatcttttgcaagtcttgatctgtgcacctcttcagctgactgccagcatgaaaaaaatatgattatgattaggctttttgcaaaacttggatttgtgcacctttttaattagggatggatggcaatatgccaatatgattgctgtatagtagcttgaggctttgaggttgatgaagggtacagtgcttcttcctgactttttttttgtttcaaaatagctttctcggtgcctttttgtttgcttatgaatttatagcatttgtgtagagttaatgattttatatgtcattataaatcagttctttcatgacccaaataaaaatctaactctaaagctacaattttattatcgttttttgtgaacctaaatatacaattacccacagatttgtatcaggagaaacaatctcattatccttaaaattatctaggtattcaatatgaattttatatgtgagcatgatcatatgttcagattgatttcgtttaagtttacatactgatattaatttgatgatctactaagttcgaatgccttagaagaaaataattatgccttttatttattcttctgacacagtccaagtctgtttggagaaggaaacaggctaggaaaaaaagtgtgatcatggtccgctgcaagaaaagagcatgcattggtttgtacttgtgcattaatcttgaagttcactggtctacgagggaaacttcgttggagggcggcaactgtcatggttcatggatgcatacgagcacaacgccacctggtggctgacaagccggcaagtacgagaaaagcaacaatgggaatctggagcacaagtcatcaatggcgatctgcagaagataaatcaaacctgtgatctgaatgaagctcatagtttttcccaactccttagtactactacttgctagctgattctgattagatataattgttgatggtttcgaattaatttctaaacaatatgatattttgaacttttcct

SEQ ID NO: 17973 - DNA, 1131 bp, Oryza sativa
  ref <308>: DATABASE ACCESSION NUMBER: AK068387
  ref <309>: DATABASE ENTRY DATE: 2001-12-06
gatcgactcgacgacgacgacgcattccgaattattcaagaaattcaagaagtgaacagaggaggaaaggaaacatggcttcgtttgcatccacggcggcgccttggggatgcgtcgccggagctcggcgtggcggcggcggcggcgggcggtgtggggtgcgcgcgtccgcggcgctggcggtggcggcgccggcggcgaggacgcactacgaggtgctcggggtcggggcgggcgcgagcaggggggagatcaaggcggcgtaccggcgtctggcgagggaggtgcacccggacgccggcgccacgggggacgaggacttcatacggctccacgccgcgtacgccacgctcgccgaccccgacgagcgcgcgcggtacgaccgcgccatggccggcccggcggcgtcggcgttccggcgggcgcccgcgtcgtcgttccggcggcggacgtgggagacggaccagtgctggtagggcagaagcacaactccggtgctccctgccctactgcgccgcgctctccgccgccggagctccgtcgggcacggcggtttgccggcgagtgacgtgggattctgtcggccgtcggatccatcatagaaggcccagatcgaagaggaaaagaggaagcggagcgagatatttgcagaggagccctccatttaccatctattgtcaacaaggtcctcccgcgaccatctcggccgttcgatcgacttgtgcggcgcagattgagccaaaaagagaggcgcagtgcggatgttttcctatgggaccctcaagtattcggtattatcaagcatacccccatcccgccgccggcggcggcggcggcggagcaaagtgttgccgcgccggcgagtactgcggtgatcgccggcgtttcgtggggataacaccgctaatgcatggttcttctcctgcaatcctgtgtatatgctgtaacacgaagagaggcaattttagagaactcttttgtgtgctgattagcttgtttatataataggttttagctctgtctctctcaactgtaaatgatcaagaaactattgtttcttctctttccttttcaaatcatcatcgttgagtactaatttgaagaacactcgaatgtgtatctttggtgatt

SEQ ID NO: 17974 - DNA, 1214 bp, Oryza sativa
  ref <308>: DATABASE ACCESSION NUMBER: AK068388
  ref <309>: DATABASE ENTRY DATE: 2001-12-06
gccctcgcttcacactagccgaggagacgcgagcgcgagctgctctcctctcctcccgccccgcgtcgccgacgtcgaggcggcggtcgacgtcgacgtcgccggggatggccgggcagcagccgcagcagcagggcccaccggaggacgactttttcgaccagttcttctccctgaccagctccttccctggcgccgcgccgggcggccgcgccgccggtgaccagcccttctccctcgcgctcagcctcgacgccgccgcggcggccgaggcgtccgggagcgggaagaggctcggggtcggcgatgacgccgagggtggcggcagcaaggcggatcgggagaccgtgcagctcaccggactcttcccgccggtgttcggcggcggcggcgtgcagccgccgaacctccgccccaccccgcctacccaggtgctctgttgcagcagcggattgtgtctcagttcgaaatcggcagagctggtgctaatttttgttgtatttgggcggccttatggcgaatttttcaggtgttccacccgcagcagtcgaagcagggcggagcagccgtcgggccgcagccgccggcgccgaggccgaaggtgcgagcgcggcgtgggcaggcgaccgacccccacagcatcgcggagaggctaagaagagagagaatagcagaaaggatgagggccctacaggaattggtccccaatacaaacaagacagatagggcagctatgctagatgagatccttgattatgtgaaattcctgaggctgcaagtaaaggttttaagcatgagcaggctgggtggcgcgggtgctgttgcacagctggttgctgatattccactttcagttaagggggaagcaagcgatagtgggggcaaccaacagatttgggaaaagtggtcaacggatggcacagaaagacaggtagcgaagctgatggaagaagacatcggggcagcgatgcaatttctccaatccaaagcactctgcatgatgccaatctcgctcgccatggcaatctatgacacacaacaaacacaggatggacaaccagtgaagcacgaacccaacactccttcctagtatagtaatagcaactgtaagtctgtaacatgaatcgttacaacccctagtagacatcaacctatcaaagtgtaagataaaacagctcgttttgattcactaacaaggaggcaggaaaagacct

SEQ ID NO: 17975 - DNA, 2207 bp, Oryza sativa
  ref <308>: DATABASE ACCESSION NUMBER: AK068389
  ref <309>: DATABASE ENTRY DATE: 2001-12-06
gtcttcatttccacaccgaggaagccagggagagagcttcagctctccctctccacctcttgctcgtcgtcgaccgccaagaaggaggagctcgcattcatcgtcgagccatcgtcatcaccaactctttctcgttccatattcctcacttcatgcctaccactttaccctttgacaccatctcatttcatccattgcagcgacggaaacgccgccgtggcccccggagctctgcgcaccgccgcagccgacatcgtcgtcgttccgaccgctgtagaccaagccgagccgagccatcacgccaacgtcttctccttgaagtcctcttcaaaacccctcaataatcccaggcaatggcgcagcaagtacggagatcggccaccgtcttcttcacctccggtcgccgtcgccattgtcgattccgcctcctccgatcttggagtcttttgagctgtcgccgtcaacccgaaggagtttgccgccgccggacctgttcgcgagctattacggatgaccaagcttcgccaaccttttctagaatctcgctttccctccggtgaagcggccgcatgaggacgacctcggcgccggtgacgtgctgaccttcaggttccactccctcgccgtcttgaaattattcgaccgcatccgcgagtaccgtctgcacgattaccggtaccaggcaacgcgaggctggtacagctccgggacggcgccggaggatgctcttcttccctgtgcggttgctcgaccaccgaggatgtatgggtgcgtgatcggggtgcagcgcggtcggacggtggaggtcgtcgacacctccgacatcttgctcgacaccgaccccggaaccctcgaccgcgacttgttgaagaagaagctcgagacctacaagaaggcgttccctggcttggccattcttgggtggtactccattgacactcatgtgacgaacaccgatatggaaaccaaccaggctttgatggatgctagtggaacaaccttttatcttctattcaatcctgcaatgaacctttccctgaaggatctcccagtgactatttatgaaaaagtgcactctaccaataggagtcccactccgttaatctttgtccaaggcaaatataaaactgagactgtagaggcagagaggatatctttagaccatacgtgtcctgtagtttctgatgttagtgtgccacctcttgttggaaaagggcaacatgcaaatattatgcagacttctggatttaagctgatgctgtttgaaattccttctggtttcgcgatgtttgaagtttcacaggaactgattgcacgccctaaggacatatgggcacgatttgcttatcaggatgacattacaaatgttattgttaccctgggttctattcagatccataacaaatctgttgctagggatattattgttggtcctggtgacgaactgaaagaatttatcctaagcttttgcactcacaactacttaattgttcaagatgtagagcttaaagatgttatcgagaagaaacttaatatctattgttactgtaatccaactgttgtcggtgaattgacatggggactgaactatgtcctacataagttgttacctcaagagcaaagtttaactcatgagccttatcttccactaagcaaggcaatgtctaagcagataaaagaatatgggttcaaaatctcgccacgagagattgacagagagttcctaagagctatgagttttttaaattatttggggtatatgtcagagcgttattcactgctgctagatcatttgtttggacaatatcgtaagaataatatgtccgacattgaatttgctaaatcaattgcatctcatcttcattcctctgagggaattgtaccaagagatgagagatacactagagcagagattatggagttcattgacttcataattgcagctcctgaaaacagaagccggacgctatcgttcctgcggcgcatcgaggcagcttctattgatgattctcctccaccgccttcactgtcaggagggatgggtgtttcgttgttgaagcgtcttcgtttggattggataactgtttgttgtctaggatgtgcagttgctctttaccctttctaccgcagagtatgaatgactttgttataaaattcactatgttttgaggacaaatacatattctctgacctgcttgattagtacc

SEQ ID NO: 17976 - DNA, 2018 bp, Oryza sativa
  ref <308>: DATABASE ACCESSION NUMBER: AK068390
  ref <309>: DATABASE ENTRY DATE: 2001-12-06
tgagcgatttgtttagatcaaacgggttcgtaaaaaaaaagttttattctcgggttcgttgggttttatctatataggcggcgagcgagaccatctcattcagttttattccgcgcgcctcctaaatcgcgcttaatccggcgcatcctgattcagagagtggtttggattcgttggattcgaggtgaacgaacagggcgtggaattttcgaggactctctcctctcgcagaatcccgcgcgcctcctgattcggagagcggtttggatttggattcgaggcgaggaattttcgaggactttggcagcggcggcgggggctggtgagcttctgctgcggcttggagtctgcccccaccattgcgtggggaggtggaggtggaggcggtggtggcggcgggggcggcggaggacgatccttccgcggcttcggtggcaggtttgatccaaattgagcgccctgaggatttggggcgtgtttatggaggattagatcgagaattttggttgtttctgtgagatggccgccgattccagcatgggattccatcaggggatcacggcctcgatgtacaaccatcacatgctctccttccaatctaacagcgacttgggcggtggcgccggcgctgcggccggtatggtgatggccccgaggagcatgaacgggactagtagcagcgctgggctgttcgtctctccgaacaccggtgtgctgggcaacgcatcggtggccggcccgtcgaggagctcgtcgggggatgcgttcagtagcacggtggcgcccaagtacaagttcgtcactggttcgccttcagattggaatgaccgtgagctgaacacactgaaggaagggcttgtgagatatgctcgcgaaccgaatatcatgaagtacataaaaatagcagctatgctacccaacaggactgtcagggatgttgcattgcggtgttggtgggctacaagtaaagatagaaggaagaaacctgatggattttatacagggaaaaagataagagacatgaagccaatccaggacaagatggttgcatctgcctccatggctaattttcacctggcacctgcaaacactgtgacccctttctcaatatcgatgcaacatacaaatcagcaatgtcaggttcctaaggaagaagttcctgtcgtggatagtgcaacacagcatctcctggaagaaaacaatcatttactcaaccaaatcgccacaaatatcgaaacattcaagacgggagagaacacggatctcttttttcggacaaacaacaacttcaaaaatattttaagcagaatgagcgagacgcctggtatcatgggccagatgccccaattgccagtgcaagtaaacgaagaccatctgagttcacttcttcagctggacagaatggttccttcgtatggcgtaacgcaaacctctcatatgaagcaagaaccgcgaagctagtataaacatacacgaaaacaaggacttgaaaaggaaaaaaaagagcagatggctggagctccgccgcccaagtttcgtgtaccatgaagaaggctaagttgccgcaccgagtgagcgagcgccaggaacagtcccggcgtttctttcttccagcgagattgttttccagtgatctgattgtctgcccgcctgcctacctgcccgagttgaaagctgttgaaagcaccggaaattgaggcctgcagctgcttgcgggggtatgcgcaacgggcgagcgagttgctgttgttgtacctggttgggtatccagcgaaatgaatacaccagacacttgattcgggagtgagtaacacgcacacaagtgactgtaaatatttggatggctggaggtgttcccctgtcctgttttgttctctctgattggtcgtcaatatatttttcggaagggtaccttgtatgtttttccactttggagagttaggagggcaccttatgtattattgcatagttggaagatcgtgttgataaaaccaacaaaaagatggctttaggttttg

SEQ ID NO: 17977 - DNA, 3120 bp, Oryza sativa
  ref <308>: DATABASE ACCESSION NUMBER: AK068391
  ref <309>: DATABASE ENTRY DATE: 2001-12-06
gcgcggcgtgggtgcgggggttaaacaagggaaggggtttttggcgtcactcgcttctctctctcccctacgcgccgccggcgagatgcggagcctcgccgtcgcgagccccctcccgcccgccgccgcggttcgccgccggccacgcgcatccgcctccggaagggaagtgatttcacaatgttggaagtgtgagataaatcaggaccaacctttggggaactccctaaggataggtcactcacaaggtagtttgcaaagacatggttccaggaatttgctcgcagctgctgcggctatttcaattgaacaagctgaagtcagtacttatcttccaaaaggtgacatgtggtctgtgcacaagtttggtggcacctgtatgggaacaccccagagaattcagaatgttgctgatattgttcttggtgactcttctgagaggaagctgatcattgtttctgcaatgtccaaagtcactgacatgatgttcaaccttgtgcataaagctcagtcaagggataattcttatgtgactgcactggatgaagtttttaataagcatatggctgcagcaaaggaacttcttgatggagaagacctagcaagattcttggctcagttgcattctgacatcagtaacctgagagcgatgcttcgtgctatttttatagctggacatgcaacagaatcgttctctgatttcgttgttgggcatggagagttgtggtcagctcaaatgttgtcgtatgctataaaaaagtctggggtgccttgcagttggatggatacaagagaagttctagtagtgaaacctagtggttctaatcaggtcgatcctgactatttggaatctgagaagcgactccagaaatggttttcacgacaaccagcagagataataatcgctactgggtttattgccagtacagccgaaaacattcctactacgcttaaaagggatggaagcgacttctcagcatcaataattggatcccttgttagggcatgtcaggtcactatctggactgatgttgatggggtatttagtgcagatcctagaaaagttagtgaggctgtgatcttaagcacattatcttatcaggaggcctgggaaatgtcatattttggtgcaaatgttttgcatccccgcaccattatacctgtgatgaaagacaatattcctattgtcattaggaatatgttcaatctatctgcccctggaacaacaatttgcaagcagcctgctaatgaaaatgctgatttagatgcttgtgtcaaatcatttgctactatagacaaattggcccttgttaatgtggaaggaactggaatggctggtgttccaggtacagcaagtgccatatttagtgctgccaaggatgttggagctaatgttatcatgatatctcaggctagcagcgaacactcggtatgctttgctgttccagaaaaggaagttgcagcagtctcgacagccttgcatgttaggtttcgtgaggcattagcagctggaaggctatctaaggtcgaagtcattcgtgggtgcagcattcttgctgctgttggcttgaggatggccagtactcctggagtcagtgcaatcctttttgatgcattagcaaaggcaaatattaatgtacgagcaatagcccaaggttgcagtgaatacaatattactgttgtgttgaagcaagaagattgtgtgagggctttgagagctgttcattcaaggttcttcctctccaaaaccactcttgccgttgggatcattggaccaggtttaattggtggaacacttcttgaccagctgaaagatcaggctgctgttctcaaggaaaatatgaatattgatctacgtgttattggaatatctggctcaagaacgatgcatttgagtgacataggggtagacttaaaccagtggaaagagcttctacgaaaagaagcagaaccagcagatcttgatagttttgttcgccatttgtctgaaaatcatgtatttccaaacaaagttttggtggactgcacagcagatacatacgtagcatgccactattatgattggttgaagaagggtatccatgtcatcacgccaaataagaaagcaaattctggtccgcttgatcggtatctgaaattaaggactctgcagcgtgcatcgtatactcattacttttatgaagcaactgttggtgctggccttccaatcattagcaccctacgaggtcttctagagacaggtgacaagatattgcgtattgagggcattttcagtgggactttgagttatattttcaacaattttgaaggtacacgaacttttagtaatgttgttgctgaagcaaaagaagctggatatacagagccagatccaagagatgatctatcaggaactgatgttgccagaaaggttattatccttgcaagggagtctggtctgaggctcgagctttccgatattcccgtaaagagccttgtgccagaggcactgaggtcatgttcgtcagcagatgaattcatgcagaagctaccgtcctttgatcaggactgggacaggcaacgcgatgaagctgaagctgcaggagaagtgctgcggtatgtgggcgtggtggacgtggcgaacaggaagggccgggtagagctgcagaggtacaagagagaccaccccttcgcgcagctgtccggctccgacaacatcatcgccttcaccacgtcgaggtacaaggagcagccgctgatcgtgcgaggccccggcgccggcgcggaggtcaccgccggtggcgtcttctgcgacatcctgcggctggcgtcctacctgggagcaccctcctaggctttaaccttgagcgtcctgccttcctcgacaaaaattgtctggaggaagatgaggcgtattgattgtgcccgactggttattacatcatatatgggactggtagtatgcagtatgtatgttgtttctgaataagtgcgaggaaataaggtcttagaggtgctagatggtccttggatcaggtgttgtttttgccacacaatccagagccgcttgctatcgaactgccacattgtattggtgatttggagtgatctaataataatggcttaaatttctttttgctg

SEQ ID NO: 17978 - DNA, 1529 bp, Oryza sativa
  ref <308>: DATABASE ACCESSION NUMBER: AK068392
  ref <309>: DATABASE ENTRY DATE: 2001-12-06
gccaagccctcctctcctcttcccaacactagtaggataaagccacagagagagcagtagtagtagcgagctcgccggagaacggacgatcaccggagaagggggagagagatgagcggcggtcaggacctgcagctgccgccggggttccggttccacccgacggacgaggagctggtgatgcactacctctgccgccgctgcgccggcctccccatcgccgtccccatcatcgccgagatcgacctctacaagttcgatccatggcagcttccccggatggcgctgtacggagagaaggagtggtacttcttctccccgcgagaccgcaagtacccgaacgggtcgcggccgaaccgcgccgccgggtcggggtactggaaggcgaccggcgccgacaagccggtgggctcgccgaagccggtggcgatcaagaaggccctcgtcttctacgccggcaaggcgcccaagggcgagaagaccaactggatcatgcacgagtaccgcctcgccgacgtcgaccgctccgcccgcaagaagaacagcctcaggttggatgattgggtgctgtgccggatttacaacaagaagggcgggctggagaagccgccggccgcggcggtggcggcggcggggatggtgagcagcggcggcggcgtccagaggaagccgatggtgggggtgaacgcggcggtgagctccccgccggagcagaagccggtggtggcggggccggcgttcccggacctggcggcgtactacgaccggccgtcggactcgatgccgcggctgcacgccgactcgagctgctcggagcaggtgctgtcgccggagttcgcgtgcgaggtgcagagccagcccaagatcagcgagtgggagcgcaccttcgccaccgtcgggcccatcaaccccgccgcctccatcctcgaccccgccggctccggcggcctcggcggcctcggcggcggcggcagcgaccccctcctccaggacatcctcatgtactggggcaagccattctagacgaccaaaaaaaaaaaaaaacaaccgcattggcagcaatggtgtcactgaacaccgtgcaggctagctagcttcatggccggtgaactttgactcaggcgagccgccggagttgactcaaagataattaaaagaagtgttttaagtggattggattggattagacagaggagatgaggactcgagaaaggcggcgatgagaccgtggttggggggaccctggcctggactgaacgacgacgaggcagcagcagaaagatggtgcaattgcatcgggtggcatgtcagtgtgtgtgtatagtggcatgtacatagtacatggtgattgattcggtatacagggggctagctttcctgtttctgtttcttcattggttaattattactcccattataaggtcttcttcagggttgctagcttaattaattaattaattagcccagtggttgaagtgtaagtcaaaattcatcaagtcagagactggaataatacaatacagtactgc

SEQ ID NO: 17979 - DNA, 2424 bp, Oryza sativa
  ref <308>: DATABASE ACCESSION NUMBER: AK068393
  ref <309>: DATABASE ENTRY DATE: 2001-12-06
gactggaaggtgatgagagtactcaagttgatcgccggagcagcatcagcatcagcatcagcttcaccatgcggggatcagatcatcatcaggatgtcgtcgcggcaccgcggggcggtggcggtggaggagacgacgggcaggcgcacgacatggtgatgccggggttccggttccacccgacggaggaggagctcatcgagttctacctccggcgaaaggtggaggggaagcggttcaacatcgagctcatcgccttcgtcgacctctaccgctatgacccgtgggatcttcccgctctggcctcaattggggacaaggagtggttcttctatgtgccaagggaccgcaagtaccgaaacggcgatcggcccaaccgagtgacgccatcggggtactggaaggccacaggggcggataggatggtgaaggtggagggtgaccgtcctatcggcctcaagaagacgctcgtcttctacgtcggcaaggcgcccaaggggcttcgcagcagctggatcatgaacgagtatcgtctccctcatggcgacgctgaccgctaccaaaaggaaatttcgctgtgtcgagtctacaaacgcccaggaatcgaagacaacttccacctcaccggcacaaccactaaatcctccggctcaaaggcggcggcggcgatgggcaagaagcacgccgccgcgaaccggacgtcatcgacggcggcggctgcggcgccccgcctcgccccgatgttcgacggcggcggcggcggccaccactaatccgccctcatgggaaaggcaacatacaacgcatcacacaccgccgccgaagggacgaacgccatcgccatgtcactgtcggcggcggccgcgctgcatcctccggcgccggcgatgttccggtcgacggcgtcggtggcctcgctgagctccaccacgtcgacggaggaggacggcacgtcgctcttccacctcaaggccggcgcgacgacgacgaacacgacgacgatgcatcatcaccatcatcatcagcagctgcctgcttcaactcatgctctgctcaacaccaactcgtcagcaatggcgaccatccccatcgacgagctgagtagggcgattggatcttacagcaacatccaccatcaaccaaactctactacaactcatcaatcaactgctttgccgccatcgcaacaaagccctcttcttccattcgctagcatggagaagatttgggattggaaccctctcctagaatctcccaaggtttgcacaaacttcaagtaactttgattatgatctactcttggatgatggattaatgtttgtatgcatgaatgcatctatgcaactatgcatatatatgcattgcatggatgcaaaaaccatatggtattatatgtgtacttaattaattatgtatatgtataacacatatttgggctaggacagggttatctatctatataatggaacatggtaaggtagttctagtcccatgcaattaccggcttaccgcgccattattttagttcacattagtggatggaagtaactgtatgtcaatttctattggatatgatctcgaggacaatgtgtagtgttactcgtcgatctagagttgtaataaagatgaaatagcattatatatgtgatcttttttcgcttccatagtatttattctacatatatataaattatccatgcagccggcagcatatatgcatatgcatgaactgcaggtgtgtgttcataatttatgtagtatatttgataggtgatcttggaagatatctagtgttttggttgcatgaaatgatattgcgcgcgctcattactctggaaaaccacgcatgcatatggtatgaaattaatactgtgttacaaattaaaatggtattggtggtttttgctactcttttcccattatttcgaattttaaacatcacaataatataatcaattttttgctagttaaattggtttgtgcctcgaacagatatatagccactgtatctaattaacatttcttatgtgttcttatggatttatagtcagataataatcggccggttggatggataagtactgatcatatgcagtcttttcacaatggttgacaattttctgcatattgctttgtctatgaataaatgaggagtgcaaaacatcgatccacctgaattaatttaactcagtaaatacagataaatactgctatttgtagtatttcttagcaggagcgttgccattttgcgtcacttatttcttctcagatttaataatgtattttactttaattagttgtgagaacctggtggataaattaatatgtaaacatataataatgtggaatgggtggaatatgatttgacttgattattccctacaattaatatataacacaagctggcagcagtgtatatattct

SEQ ID NO: 17980 - DNA, 2604 bp, Oryza sativa
  ref <308>: DATABASE ACCESSION NUMBER: AK068394
  ref <309>: DATABASE ENTRY DATE: 2001-12-06
gatgcgtgcgtgtgcgctgcttcttctctcaagtggtggaggggaagaggagcacaaggagaggcagacggcgataagtcgctcgctcgccaattcgccatgatcgggtggggctccgctaccgtacacgccccggaggaagcccaggccccgcccatgctgctgagctcgtgatcctgcgctcctggccacaggctgcgattcggcgttggggtttctggtccgaggcggccatcaagatccgtgcttcttgtcctttggcccgggcggagtggtttctttcttgcacgggacgtgctcgacggaatgcctgtgaggggaattcgctcgctgtgagttgggaggggtggtagctgtgcttgcctgcttggtctggtcatggtggattgagtgcttgggggtggtgggatttggtccctgggcatggccggttcggagaggaccgtggtttggttcaggagggacctcaggatcgacgacaacccggcgttggcctccgcggcgagggacggcgctgtgctccctgtcttcatatggtgccctgcggatgaagggcagttctatcccggccggtgctccaggtggtggctcaagcagtcgctcccccacctcagccagtcactggagtcgctcgggtgcccgctcgtgctgatccgagccgagagtacccttgaggctcttctgcggtgcattgattctgtcggcgccaccagattggtttataatcatctgtatgaccctgtttctcttgtgcgtgatgacaaaataaaaaaagagctttcggcactgggaatttccatccagagttttaatggtgatctgctgtatgagccatgggaaatttatgatgatagtggacttgcatttacaacctttaacatgtactgggagaagtgcatggaattacctattgacgcatcaccgtcacttgcaccttggaaattggtgcctgtcccaggtttggagagtgttcgtagctgttctgttgatgacctaggacttgaatcaagcaaggatgaggaatcaagtaatgctttgctaatgagggcctggtctcctggttggcgcaatgcagaaaagatgcttgaagaatttgtctcccatggtctcctagaatactcaaaacatggaatgaaggttgagggagctactacatcattgctatcaccatatcttcattttggtgaggtgagtgtaagaaaagtatatcaacttgtaaggatgcaacaaatcaagtgggaaaatgagggaacatctgaagctgaggagagcattcacttcttcatgcggtcaattggtcttcgagaatattcacgatgaggagcggttcaagtcctggaggcagggaatgacaggatacccattggtagatgctggcatgagggaactttgggctaccggatggacacataatcggataagagttatcatttcaagttttgctgtgaaatttctacttatcccatggacttggggtatgaagtatttttgggatgtgctattggatgctgatctggaaagtgatattcttggttggcagtacatatctgggagcctgcctgatggccatgagctcagtcgtcttgataatccagaggttcaaggtcaaaagtatgacccagatggtgtatatgtaagaacttggatacctgaactagctagaatgccgacagaatggattcatcatccatgggatgcaccgagctgtattcttgaagttgctggagttgagctggggtttaactatcctaagccaatcgtagaccttcacattgctagggagtgtttagatgattccatctccacgatgtggcaattggatacagctgagaaacttgcagaattagatggtgaggttgtggaggacaacttgagcaatatcaagacttttgacatcccaaaagttgttttgagggaaacatctccatgtgctttgcccattgatcaaagagtgccccatgctagcagcaaggatcataatttaaagtcaaaggtattgaaggcctcaaatagaagttctatttgtgttgatatgatcaggtcctcaaagatggaagcaacgagctctgtagcaaactcaccggtatcaaggaaaagatccttttgtgagactgcatttcatgtcccatcttattcatcttcagctgaagtgcattcgcatattcaagatcatggtggttccttagttgggccttcaagatatctcctgcaggaagcaggtagaaactatgttgatgagccaacatgaactgtgtggagcgcctgtatcgtgatcttagctaatcttaattctgacaacagcttctgctataatgacaaactcatgatatattattgctgcaagctgaccagcttctgtcggcataaatggctttattggataatctaggtgctcaggatgggtagtggaaacccacccatttcacactcccactgcttctagaactaagtctaacaagtcttgataggattagtaaaactgtgcaagtctttgtagtcaaatttcacggcatgtatatttcagtagatattgctggaggtaaagcctccatcgagaaacaagatagcacccaacctatgtttaactatgatactttttctggc

SEQ ID NO: 17981 - DNA, 2118 bp, Oryza sativa
  ref <308>: DATABASE ACCESSION NUMBER: AK068395
  ref <309>: DATABASE ENTRY DATE: 2001-12-06
aaaacgctactacccctccgccacagcgtccacacccgcgccgccgccgccctcaccctcgccgccgcgcatcccgcggtcccaccgtcgccgattccaccgctgccacggacaaccccgccgcccctttccttcctcgccgtgggagcgccccccccctccaggttggctagcagctagctccgccggccgcccttccccgatggggggcagcggcgtaggcgccgccatcagccgccgtacgtatgtgagcggcgcctgcgcacgcctccagctggtccgcgcgagaagaagaagaagcagaagagagaaacagtggcttttttttgctgaaccagatgccgatgcagtgacgattcgttggccgaggatcgcgttcttataggcccgatttgcaaaggagtgcttgtaaatccaatcataccatttcgattttcatttgaccaaggataggcaagaataggaggaaaaaggagagtggcatataatgacgggtggatcaggtgttgtggtgctagacaatgggggtggtcttctgaaggctggatttggtggggacatgaatccgactgctgttgtccccaactgtatggccaagccccctggttccaagaaatggctagttgctgaccagctgcaggcacaagatgttgatgttactggcatgacattgaggcgtcctattgatcgtggctatctcatcaatcaagaagtgcaacgggaggtgtgggagcgggttatacgcaacctactgcaggtggatcctaacaactcatcgttgctactggtggaaccacagttcaaccctccagcactgcagcatgcaaccgatgagcttgtttttgaggagcttggtttcaaatctctttgtgttgcagatgccccttcccttgttcacctttatgaggctagccgccagccatcgctgtttcgagctcaatgtagccttgttgttgactgtggcttctctttcactcatgcatctcccgtgcttcaaaactttacactgaattatgctgtgcggcgcatggaccttggtggaaaggccctcacaaactatctcaaagagctcatttcatatcgctcccttaatgtcatggatgaaacactcctcattgatgatgcaaaggaaaaactatgctttgtatcccttgatgtccctggtgatcttcgtcttgccaggttatcatctaatgacaacccttttagatgctcctacattctccctgatggtataacatacaagaaagggtttgtgaaggacttggatgaggcatgcagatacagctctctgcctgctaatggagaatcggttagaaaggatagttctgacagcgataggagcaagtttgaggataagaaaaagcctgaacttagtcaaaatgaatttgtgttgaccaatgagaggttcctagtgccagagatgcttttccatccaattgatctgggtatgaatcaagcctggcttgctgagtgcatagttcgtgctatacaagcttgccacccacatcttcaacctgtgctttttgagagaattatcctgacaggaggaagcacgctattccctcgattcaccgaaagattggaaaaggaacttcgtcctcttgtgcctgatgactaccaagtaaagataattgctcaggaggacccaattcttggtgcctggagaggtggatctcttttggcgcacaggcctgattttgaatcaatgtgcattacaaaatcagagtatgaagagatgggttcaatgcggtgccgtcgtagattctttcactgaaagttgtgtgccagcagctcagtagaagtgcaatttgtaagtatgattcagcactatctagttcaggtcttgaagaaatactcattaattaggcaaacgagaagtttggttctagaaggtaatgatgcacaattttaacacgtggtcatttttttacataggaattagaagctattactccatgtatctggtcccccttattactggcaaccaattctttcagccttcctaccagctaaatatgcagatatagtccttaccagggaaaacctttgtggtctaacaccctcggaacacagttgctctgagataaatggtgaattttgcttttctgctcggtg

SEQ ID NO: 17982 - DNA, 1648 bp, Oryza sativa
  ref <308>: DATABASE ACCESSION NUMBER: AK068396
  ref <309>: DATABASE ENTRY DATE: 2001-12-06
gtttcctctcctcgcctctgctctcttcccccgttaaggcaggcgatcctgatcccctctccatccgccggcggccgacgcgggggcgcggaggcgcgcacgcacgcacggcggtgtggacggctcctctccttgccggagcccggcctccttccctgtgcggcctcctcgccccgccggcgagcctctctgctcgaatcgaaccggaggtataccccattcctgcctcgtagccctctctctccctccctccctccctcgctccggcgccgcttcatgcgccggcgagacctggatcgggaggaagactcggatcgagccggtggggcgcgatgaacagccagggattcggtccgggcgggagccccaagtcgttccgctaccctagggcggacttcgatctcgagtccgggatcgcccgcaagggcttacgcaagcccaagaaccacgacgcccccggtttgctcacctccacgctgatgaagatccggtacttctacgaggcgcaccccgtcgcggtcgccttcatcctgctgtccttcgggctcagcgtgctgatcctcctgtcggtgtacgagacccggttcaggatgatgcggggttcttcgggtgaggtcggggagtatccgctcccggagctccgcaaccttgtgatggtggccgggcattcgatttacacgagcgagagctgcgggaagattgatcgcgaggactcttggttcttggagccgtatcagaagcaccccggtcaggcggccacgttcttggcgcatatcaaggaaggcgtgggtatcgccgcgagggatgagaaggcgcttctgctgttcagcggcggcgagacgaggaaagatgcggggccgaggagcgaggctcagagctactggactatcgcggattcgaaaggctggtttggaaatgatgaaagtgtaaggagacgggcactcaccgaggagcatgcacgtgatagttttgaaaacctcctatttagcgtttgccggtttagagaactcactggaagttacccgcaaaatataactgttgtaagctatgattttaaggaggaaaggtttgcgcaattgcacagatctgctcttggattccctgaagggagattcttcttcttaggtaccactgctacactgactgcaagggagtctgctgtcaagggtgaagccgctgttagatctcagttccaggaagatccttatggatgcttaggttctcttcatatgaagaggcttaagagggatccatttcaccgtgccattccatatccgaatggttgccctgagctgaagggtctgttctcatactgtggtctggtgccttaccctgggcagcttccttggacccaatagctcgaaggatatacgaaccttggactatacaaccttctttcattgcctcggctctgaagtctgaactgacaaaataactacttgtgaaatgtgatgtattcttcctgaatcctgactaagaccacatttacattagtgagattgtttttttgtaacggtgtatatcacatgatcaatatatgttttttcagtgtgatttggcatctctgtactaggaaacttgaaattattagtgaaaacaatgttctctctctgtttttttttaaagataaatgttctcaatctactgg

SEQ ID NO: 17983 - DNA, 2651 bp, Oryza sativa
  ref <308>: DATABASE ACCESSION NUMBER: AK068397
  ref <309>: DATABASE ENTRY DATE: 2001-12-06
ttgggaacagaacagaacagatgaaacttgacttcttccttccgatgctctctcttcttcaacctctgtatctctcttctcttctccaatctctagctatgtcttcttctccaacctactgctgattctcagtcttgattccttttcccccatttgtatccccaaatactcatgtatcgagtgttggaggaagaattgtttgcttgtgcaggaattcactaaatcacatggagtggattcgtaacactagcctgacagggtgaatacatccattcttccttttttcagataaatctggttgactaggtaggtaggtgagaaattcagtattttccatccaattcactggcccgtaagcctttcaaattttgccatcaggactgcgaatttcttcattccgtgctacttccctcagttttgagtgtgtcatccgtctgtgttcgcctgtcagctggcactgccactcttgctaggtgtagccgacacctgccattgccgctcagccggaaaacattttcccctccacaagagaccaaatctatgcaatcagatcatcaagaaccagatcgccatggctgaaaggctcagaatcaactctggaggagtttatactacgattaccaaagaaaagcacaaaattgagagcatgctagaacaaacaagcacaagagaatgtacgggacagtggcgtccatcggcgggcagggagcaggaaacaaactccatcccaccgaatttcgcttgactttcgcttgactttgccgctgtttttctgatctaaaagaatccaaagaaaaggagaaggggatccttgttgggagcagagccatcgccattgccatggcgctgaaccgattcacccaatggctgaggccagtgagcatggtgcatgtggcgacgatggacgagctctcgagtaccctaggagccagcgctggcgagcgcagctgtggaacgccgggaacagccactgccaccatggaagcagtcgtgcggagcccacagcagaacggctgaggaagggcattcgatatagttaccgtgccatctgacggcagtgggtgcctgtccactggcaggaggagctgtcgctggaggctagagctgcagacggacgacgacccccaagagctgcttcacggtcctcgtgcggtgctactgttgggatgcccgaggcaaggggccagcgggctgaacggcaacaccagcgatggggtgaacagatggacgtgtcagcaggcagacggacggacggacaaacttagacagacgatgcgctcgaaccgaaaggaagtggcacggaatgaagaaattcgcagtcctgatggtaaaattgaaaggcttatagatcaaatggtaatttcttaaagggcggcaaattggatggcaaatactgttacaaaggatcttcagtttggtgcaatttatgttcagcaagttctatcatgtgaagtataatctccatgcctggaacagtgctgaatgctttatctgtttctgtacagtaaaatggggcttggttgtaagccctttgtttgtgcaaaataatcttcacgtcctttttatgtaatgtaaatgatcaaaactctcatgcatgttatatcttacgacgtttgcaatgacctcagggaacttctacatacaaagagcagaagggaagagacctatgacaaacttcagagtgttttaggtgactccttgacaagctgtgaaatagaatctgctacggaggaaatgtcctcttgcctccaagcttctactttgttgccacattctgcggtggaagagatgtttaacgtagaggttgtcgaggagcaatccaggtcttgtggtggtttgtcagttgcaatggacaactctcttagtcctgcgcacactcttattcagatccagtgtggtgaccataaaggcctcgtatatgacatcatgagaacactcaaggactgtaacatccagatttcgtatggacgattctatgccagccagaatgggagctgtgaggtagatttgtttgctgtgcaatcagatgggaagaagatcgttgaccagcacaagcaaagagcgctgtgttgtcggctgaggacagagctccaccgtccgctgcgcgtggcattggtaaacagaggccctgacacggaactgctggtggctaacccagtggaggtgtcgggcaagggtagaccgctggtgttctacgacatcacccttgctctcaagaagcttcacaaacggatcttcttggctgagattggtcggcatgtggtgggtgatagggaatgggaggtttacagggtgcaccttggtgagggagatcattcttcattgcggagcaagattgttgatggagtcaccaacatgctcatgggctgggacgacactcctccatcctaatcctactagtagtagttctagttagtttttttatggaacacacgtcctttgccttgtacatagttggtagtggctgctgtaaattgtgtgccttgttaagtcgttcgtggtagaatgcgttggcagtagctagctttgactaatcaatcagcagctaatttcagtctgtttagttagggagcactcccctctagttgtatcactatcaaaactgaatagtgctcaagttatctaacaggaggaaatgcttactcctaatt

SEQ ID NO: 17984 - DNA, 1100 bp, Oryza sativa
  ref <308>: DATABASE ACCESSION NUMBER: AK068398
  ref <309>: DATABASE ENTRY DATE: 2001-12-06
gaagcaatcaagcaaggttatagtactaaattcttttcgtcttctctgctcttagcatctcttcctcctcctctgttcatctcctccatccacacagtctaggtagcacggcaatggcaatggccatgaacagtgtgctggtgctgatgctcgggctcgcaatggcggcgacatcgtcggcggcggtctacaaggtcggcgacacctccggctggaccatcctcggcaatgtcaattacactgactgggctgtcaagaagaccttccatgttggggacaccatagagttcaagtacccgcaggggattcacaacgtggtggaggtgaagaaggcggactacgacagctgcaccaactcgtcgccgatcgccacgcacacctccggcgacgacaagatcgccatcaaggccgccggccaccgcttcttcatctgcggtctacaaggtcggcgacacctccggctggaccatcctcggcaatgtcaattacactgactgggctgtcaagaagaccttccatgttggggacaccatagagttcaagtacccgcaggggattcacaacgtggtggaggtgaagaaggcggactacgacagctgcaccaactcgtcgccgatcgcctccaagcgcggcgccgccgccgcgccgtcccccgccgtctcgtcgtcgccgccggagtcctcctcccccaccacggacagctcgtcctcctccacgaccaccgctccggcgcccaacgccagcgccgccgccggcggcggcggcgctaaggcggccttcgctgccgtggcgttggcgctggtcgccgccacggcgatgctacagtagaatcaatttcgatatatgatccagtgttcgtatgcattgatcgatgcatctatctccggttgatgattctctctctctcgccatgatcgatgcatctatctcctgtcgattctttcaccgtggtttgtgttgatttttgatttcttgatcgatttcagatatatgtggattgtgttcagacactctactgttttcccgcgggtttataaccgtttttttttttttgttgttgttgtttttttgacttcgatgtaaccatggacacattttgt

SEQ ID NO: 17985 - DNA, 1870 bp, Oryza sativa
  ref <308>: DATABASE ACCESSION NUMBER: AK068399
  ref <309>: DATABASE ENTRY DATE: 2001-12-06
ggccgtgccaggtagtatacgcgattcctttccatttttcccccacacgccaagtccgtccatctcgccaacgcgagacatggcctccaaactccccgacctcggcggcggcggcgtggaggacggcggcggcaagaagtggccggggttcgtccagttcttcttcgtcctctccgtcgtcctctgcgtgctcctctacgccccgcggttcatcgtgctcacgcccacctatggcctcgacttcttcccccagccgccgcccaacgtcaccacctcgcccgccggcgtcgtgggagatcataatgctggcgaagtggtggttcttgacaaccagctgcgctcgccgtgctcgtcgctcgccggcgacaccatctgctgcgaccgctcggatttcaacaccgacgtctgcttcatggccggcgacgtgcggacggacccgtcgtccctgtcgctcctgctgttcccgaagcagccgccggcggcgaacgccaccgtggaggagaggatacgtccgtacacgcgcaagtgggaggcgctcatcatgagcagggtagaggaggtgcggctccggatggccccgccggaggaggagcccggccaccggtgcgacgtccggcacgacgcgccgctactcgtcatgacggcggggggctacaccggcaacctcttccacgcgttcagcgacgggttcgtgccggcgtggctgacggtgcaacacctccgccgccgcgtcgtgctcggcgtcctctcgtacaacccgtggtgggcgggcacgtacggcgagatcatctccggcctctcggactaccacgtcgtcgacctcctccacgacaagcggacgcactgcttccccggcgccatcgtcggcacacgcttccacggcatcctctccgtcgacccggcgaggctccgcgacaacaagaccatcgtcgacttccacgatctcctcgccggcgtgtacgagaccgcaggagacaccgtcgtcgtcgacgacgttactcagccggcgccacggcggccacggctcgggatcgtgtcgcgcagggggacgcgggtgatcgagaaccaggcggcggtggcgcggctcgcgaggtcggtggggttcgacgtggacatcctggagacggcgaacgggctgccgctcccggcgtcgtacgcgtcggtgagcgcgtgcgacgtgctggtgggggtgcacggcgccgacctgaccaagctcctgttcctgcgccccggcgcggcgctggtgcagatcgcgccgctgggcgtggcgccgatcgcgcgcgggtgctacgcggaggcgtccgcgcggatggggctgcactacgagcagtacgacgcggaggggcacgagagctcgctgagccgcaagtacggcctccgcgacgtggtggtgtccgacccggaggccgccaagcgcgacaaggggtggggcttcgtcgcccgcgtctacctcggcggccagaacgtcaccctcgacctctccaggttccgacacacgctcaccaggctgcacgcgcgcgccctgcgcgtacgctcgttgcacccagcgccgtagacggattatcggatagcagcggcagaagcagccatggatgaatccatcggtttctcgagcggatagacgtacgtgacaagtgctccattgcaaccagttgtttaggcgattgctaaggcgacggccggagattggccatggtgctgtaaggatagccgtctggctctgcagcgcatacagttggactcgaaacgtataccagttggtagctttttaagggcgaggtgccaagttaggatataactactactctctggatattggtaactattaaggcattaaatttatttcttggaatacaatttttgttttgct

SEQ ID NO: 17986 - DNA, 2525 bp, Oryza sativa
  ref <308>: DATABASE ACCESSION NUMBER: AK068400
  ref <309>: DATABASE ENTRY DATE: 2001-12-06
ttgaggcgatcgatggaataataatcgtgtagcgctaagcgaatcatttctctttttagatagtttggatgtctaacaatgcccatgattcatgatcttttaattgaactaagaaaaattaatccatggtggatctgcttggcatcaaaaggcatgggggactccaaggagttcgccggcgagctgttcgtggcgctggcgcggcggaggaacctggagccggaggacggcatcaccaaggagcagctcaaggagttctgggaggagatgaccgaccagaacttcgactcgcggcttcgcattttctttgacatgtgcgacaagaatggcgatgggatgctcacggaagatgaggtcaaggaggttattatactgagtgcgtcggcgaacaagctggcgaagctgaagggacacgcggcgacgtacgcgtcgctgatcatggaggagctggacccggacgaccgcgggtacatcgagatctggcagctggagacgctgctgcgcggcatggtgagcgcgcaggcggcgccggagaagatgaagcggacgacgtcgagcctcgcgaggacgatgatcccgtcgcggtaccggagcccgctgaagcggcacgtgtccaggacggtggacttcgtgcacgagaactggaagcggatctggctcgtcgcgctgtggctcgccgtcaacgtcggcctcttcgcctacaagttcgagcagtacgagcggcgcgccgcgttccaggtgatgggccactgcgtgtgcgtggccaagggcgccgccgaggtgctcaagctcaacatggcgctcatcctcctccccgtgtgccggaacgcgctcaccacgctcaggtccacggcgctcagccacgtcatccccttcgacgacaacatcaacttccacaaggtgatcgcggcgaccatcgccgccgccaccgccgtccacacgctggcgcacgtcacctgcgacttcccgaggctgatcaactgccccagcgacaagttcatggcgacgctggggccgaacttcgggtacaggcagccgacgtacgccgacctgctggagagcgcccccggcgtcaccggcatcctcatgatcatcatcatgtccttctccttcacgctggccacgcactccttccgccggagcgtcgtcaagctgccgtcgccgctgcaccacctcgccggcttcaacgccttctggtacgcgcaccacctcctggtgctcgcctacgtcctcctcgtcgtgcactcctacttcatattcctcaccagggagtggtacaagaaaacgacatggatgtacctgatagtcccagtgctcttctatgcatgcgagagaacgatcagaaaagttcgagagaacaactaccgcgtgagcatcgtcaaggcagcgatttacccaggaaatgtgctctctcttcacatgaagaagccgccgggtttcaagtacaagagcgggatgtacctgtttgtgaagtgccctgatgtctctcctttcgaatggcatcccttctccatcacttctgcacctggagatgactacctgagtgtgcatatccgtacactaggtgactggacgactgaactcagaaacctgtttgggaaggcttgcgaggcacaggttacttctaagaaggctaccctttcaagacttgaaactacagttgtggcggacgctcagacagaggatactaggtttcctaaggtccttattgatgggccctatggtgcaccggcgcaaaactacaagaagtatgacattcttttgcttattggtcttggaattggtgctactcctttcatcagcattctgaaggatctgttgaacaacattaaatccaacgaagaggtggaaagcatacatggttctgagataggcagcttcaagaacaatgggccaggaagagcttacttctactgggtgaccagagagcaagggtccttcgagtggtttaaaggagtcatggacgatgtcgctgaaagtgatcacaataatattatagagatgcacaattacctgaccagcgtgtatgaagaaggcgacgcaaggtcagctttgattgccatggttcagtcacttcaacatgccaaaaatggtgtggatatcgtctccggcagcaggattcgcacacattttgcgaggcctaactggagaaaggtgttctctgacttggcgaatgcccacaaaaactcacgcataggtgttttctattgtggatcccctacactcacgaaacaactcaaggatctttcaaaagaattcagccagacaaccacaactagattccacttccacaaggaaaacttttaagaccgtaccaaaggacgtctaaacagactgcatatacttgtataggaaagaaatacgatagcattgggatagcaaatatagtcttacaagttttgctctacgatggattgtacaaaatatatgttgaaagctagtgtcaccatcgtgcatagattctggaatgtttacagatatatgtattggaacagtgggaatgcatgttagaaaaattgagttcc

SEQ ID NO: 17987 - DNA, 3149 bp, Oryza sativa
  ref <308>: DATABASE ACCESSION NUMBER: AK068401
  ref <309>: DATABASE ENTRY DATE: 2001-12-06
ggatcaatctcccgtacgtgcgctgctccttctctctcccgtgccgctgctccttctcctccgccgcttcttcagatcgatcccgtgctactgctgcttcctctcctcttcctcctcctcctccaggcggcgcaaatcgaggtgggacagggccgacgggatcccggaggacgtagagatggggatgggtgagatcgaggcggccggcgagctcacagcgacacggatcgagactgccggcgagctcccggcgccacggatcgagacggccggcgaactcccgaagggggcgcagatcgggatgggtgaagtcgtggtcgtcatcgccgtcattcgccggtttacctggtaagactacctccatggctgcgccgccgccgctgggctcctgctcgagctccccgcgaagggggtcgtgggaggaagggcgaggccacgacctccacaacgcggccgcgccgttctcccccacgccgcgcgccctcgagttgtcagatagttgcagaagaacgggtggccaaagtatgctccgcggacttggtttggtcgcgcgtgacgcctagctggctgcgaatctccgacgtgtcgagcgatggccgaatgacacgtcggagcactgtgaatggctatggtccaacatgccaagaggcccacgatctgcgatctgtaccatttaatattttcatcttctgtttggcttccggcgacggcgattgccagtctttgctcctcctgtctgttctgtctgctactgtttcttttatgcaaagttgcttggtccacagcactaaataaagccatggtatctatgatattcatggcattctttcatccgacgaacaattcctgcaagtagtagtcatatggcaagggccaaggggcatgtctgccagactgccacctactaataaccagtaaaaattatcacttcattaagcgccaagatccgtgcctggggatctcggactgtagcggcagaagaagaggtggtaatgcaatggccacagcctgtaaaactgggagccggacatggttttccggcctcgagattcgtgtggcgggggcgagatggacggctaccgtttgctcgctgaatcacgttgactcctgttgcgcaaagcagctccagctctgccaacacgagccacgccagcgaaagctgacgatgccattgccagctgctaatcagcggcggtccggccttttttcagctcacttcttctcccataaaacgtagtctcccgtcacctcgcttgcacttctctaagcttccacccacccacgtacgtacgcacgcagagcagcaagaaatggatgcggtcgccggcgccgggcagctcgttggcctcgccgcggccacgctcctcacggcggccttcctcgtcgcagtgaagatggggtggcggcgccgccgccgccaacgggaggtcgcgccggagggtagctgccgggttgttggcggcgatgggggtgaccggacggacatcgtcattgttggtgccggggtcgccggatctgcgctcgcctacacgctcggaaaggatgggcgacgagtgcatgttatagagcgggacatgacggagcctgatagaattgttggtgaactgctacagcctggtggctatttgaaattgatggagctgggtcttgaggattgtgttgaagaaatcgatgctcagcgtgtccttggttacgcattgttgcaagatgggagaaacacaaagctttcttatcccttggagaagttccattcagatgttgctggtaggagctttcacaatggacggtttatacagaagatgcgtcaaaaagctgcatctttgcctaatgttcatttggagcaaggaaccgttacatcattgctcgaagaaggtggcacggttaagggtgttcaatacaagacaaagtcaggtgaagaattaaaggcctatgcaccattgacaattgtatgcgatggctgtttctcaaacctacggcgtgtcctgtgctctccaaaggttgatgtgccatcctgttttgttgggttggttttggagaattgtcaacttcctcacccaaaccatggccatgttatcctggctaatccttcacctatcctatgttacccgataagcagcactgagattcgttgtttggttgatatccctgggcagaaggtgccttccatggcaaccggtgaaatggcaaaatatctcaagactgtggttgcacctcagattcctccagaactccatgattctttcattgcagcaattgataaaggaagcataaggacaatgccaaataggagtatgccagctgctccacttccaacccctggcgcgctgttgatgggtgatgcattcaacatgcgacatcctttaactggtggtggaatgaccgttgcgttttctgacattgttgtcctacgcaatcttctcaagcctctcggcaacctgcacgatgcaccttccctgtgcaagtaccttgaatcgttctatacactgcggaagcctgttgcttctacaatcaacacactggccggtgctctgtacaaggtcttctgtgcctcaactgaccaggctaagaatgagatgcgagaagcttgctttgattacttgagccttggaggagtcttctcaaatgggcctattgctcttctctctggcctcaatcctcggcctctgagtttagtagcccacttctttgctgttgctatctatggcgttggacgcctaatgctccccgtcccttcacctaaacgcatgtggatcggcgcgagactggtttccggtgcatgtggtatcatcttcccaatcattaaagctgaaggtgtgaggcaaatgttcttccctgctacagtccctgcatattaccgggcccctcctccaatggagtaagaatctccatgttagcctatggtgtttgctgttctttagttcttttgagctgtcgagtgtgctcattagagtagtctgttcttcctataggaaattgggatgtgtatcgattgtcaatactaagttgtatatccctctgaacttgctaatgcgtcttgctcattatctcttttagaatatttgaggtgctctgcttgtctctactgcaccgttggaatgagctagttccttgtttttatgggcacacttcctaaatgccacgcttttttg

SEQ ID NO: 17988 - DNA, 1030 bp, Oryza sativa
  ref <308>: DATABASE ACCESSION NUMBER: AK068402
  ref <309>: DATABASE ENTRY DATE: 2001-12-06
gcttcttccttgctgctgttcctaaggcacttctccctttcccagctaaatcatccaagccatggctaccgatctaccattgctagtgtggatcagctctgctgcggctactgctgtggcggtggtggttgctgcagctacggctgcggctgtgtagggggaacagatgcttggttgctaggtgctaaaaaaaaaggaaagccaagtattgagggattcacctttgcctaggtgacaagttcgtccatggctgtgctcccgtgttcatcctcgccgatgcattggcctttcctcttccttgggtaaatcacattccctccttgctgatttctcttctcctcttcctagccgacatagtgatggtatgagtatttggccaagaactatttggctactaattataggggattcaagatttggtgcttgcaatggatggggcgcaatcttgcatttcactgatttgtttgctcctcactccctacttctctcctcctcctctcctgggctgctcactcctcactaattggttggagctcatatgcatgcatctgctgccatggctgtggtcatgctttgagtgcttgaccaaggtgtgatagagtcttgaccaaagtggatggagttgtgctactatctttgtggtcttgtgtgaagcttcctatgtggagctatgtgattggtggataattaatactgctggtgaattgaggtccctttggtgagattaattctttatatgagatgtgcggcttctttgtgttaattagccggatgacgaacccgacttaagtgaggggtgccagacggtattagctgatctaggtgatctaggtatctcagtgaacggttgaatatacaccactttgtgtatgggtctgacggcaacatttatttacatattaccttttgtgcataaaaggggtcaagctatgtatgtcctgtgcaaccgtatattcaaatatatgatgtattgtattattagtgtaagtttatgtatacatgatgactgtttatagtgatgtttgttcgt

SEQ ID NO: 17989 - DNA, 1029 bp, Oryza sativa
  ref <308>: DATABASE ACCESSION NUMBER: AK068403
  ref <309>: DATABASE ENTRY DATE: 2001-12-06
gacaccagtaccaccacacagctagctagctggtatagagtacagcgcactagctagagcggtagagcctccagagtgctagccccatcagccacagtagtgttgagcgagctaaagctagcatacccctcctgcttaatttccatggcgccggtgtcggaggccagccccctcgtccaccaagacggcggcattattgcctcctttgcggtttacgccggcgcaccgtgctgcagtgcgcggggtaggatggccgagacagacggcgacgacgatgacgacgactatgactgcgcgcctgccgcctgagtcgtcgtcgtcgggtgaaagaagagctagctaatgtagtagctagtgtgcatggtacctgaagattaattagcagctacgaagtcatgctgacatgctgtagtactgtcttaatagagttgccactgcatatatatgctacttatttggtcgcacgcaagtaggtactcacttaattaagtatcagtttatggtaattagcttctactaatatatatatgtacctccccgagtaaccgtagtctaagctatgaggcagtacaaagtgtgtggtttttgtaccgggaagctagaggtcatcgtgccgataggcaaactgcgctgcaagctatatatatgcacataatacagaagcagttagtcaagtcgctagcaggtagcagcctagcagggcgcatgtactgtggttgttgatctccgttgcaataaattaaactgatatctacgcacttgactacttatttgtttgcatgatatatgcaccctggagacccaggagctggccggatcacgtactgtacgcaactacgcatgctgctagctatagctatgctttcaatctggtgcaattcccttctgtctagttaatttgaatctgatactgatagaaatgctaccactctaggctatcagtttctcgtgttgtatttttacttgaaagacatatttggatgatacacacgcaccccatatgcatatctaaactttggttttctaatt

SEQ ID NO: 17990 - DNA, 1654 bp, Oryza sativa
  ref <308>: DATABASE ACCESSION NUMBER: AK068404
  ref <309>: DATABASE ENTRY DATE: 2001-12-06
caaccccacctccaaccccccgcgcagccgaaggaatcctcgacggcgacgacgatggccgccgcgacggagaagacggccgaggagatccgccgcgagctccaggagctccagcgccagcaccgcgagatcagcgagcgcctccgagacccccgcggcctccgccgcggcgcgcccgccgctgcaggacccggcgggccccgcccacttcgcggattccctagaccagctgtggatttggtggaccagtctgcgcctaagcggaggattctatctgcagtggttaaagtggaggatactgaagctaaggaggatgtcaagaaggaagcggaggcagaggggccggagggcggttcggctgctgctgaaggcggtgagaggagggatggtgggttcaggagggatgggagccagcgcatgccgaggagggagtttgatatgtcattgccagaacctctcccgagggaatttcccaaggatgaggatcaaagccttgtgaagaggaacaagaggatgctggggaagcttcttgtcggtacattagagaaatttcagcaagaggacaaaaaactgtccaacacagaggcttatatgcgcagatcagaggttcagcgaaaggctgatcaaaaggctcgtgaggaaagtgaaaggttgcggcagcaagagcgagagcaagcaatagagaagcgtaagcgtgatatgatgctgcgtgctcgagtagctgctaaggcagaagaaaagaggttggagctgttatacatgcagtgggctgagcatcacaaaaagctgtccaatttcttaaggttatttttattcctggtccaaaagtatccatattgacaattaaattgagggaagatgcgtttctgattgtgcaaatcttgatgtttgatgttcataggggtttctatatccattttgctaaattacacattagtatctttttgaacattattgttgtttgtcaggacaactgcggaaccaccaatttactacatgccagctaaaccaataattgatgatccggctattgctgaggagaacaaggaaaaggcatttcaagaatggaaatctgaacgcagggctgagctaactcagtttcaaaagcaagtcgaagaacagtacatgtctaatgttgagaggcagttggaaaggatgcagaatgcgcggaatgcacggaggggtaatggtccttcaaacatgcaagaaatggacaaggagctggacacgcacagggcggagcatggtccaaaaactcgacgagttcttgagggtggcaatgacgatgaggatgatatggacgatatggccgtggaagatgagctgatggatgaagtccttggcattaacgagccaatcagcgatgagcaaaccaagccgtctgaagaagctgctgatggtgttccggtgtctgaggaagtgcaataggtaatttgttttgtattgttgcgaggtaggcatctaggagttccacatttgatatccttcagctgccctcattttctgacgcttgttgtatgtctgttgacgcttgagattttccccgctgttatcaagccatatattgttgcgggatgtattgccgttgagcgatatactctgttaatcattgcatcctttgcgtttctagtataaatcgagcaatttactgatg

SEQ ID NO: 17991 - DNA, 1646 bp, Oryza sativa
  ref <308>: DATABASE ACCESSION NUMBER: AK068405
  ref <309>: DATABASE ENTRY DATE: 2001-12-06
gacctcgagctgcccggagcttggctgtggaggcggccatggcgcgggtgggcaagcacggcgagtcgtcgccgccgtccgaccgtaggccgctccacttcgcggcgttcctgctgctcgccgacgcggcgctcgtcgccctcatcgtcgtcttcgtcccgtataccaagatcgactgggacgcgtacatggctcaggtggacgcgtttgtggaaggggagagggattacaccaagatcgagggcgacacggggccgctcgtctacccggccggcttcctctacgtttactccgccatcaagcttctcaccgccggccaagtcttccccgcgcagattttgtttggtgtcctgtacattgtgaaccttagccttgttctgctgatgtacgtcaagactgaagtggtagggatgcctgtgttctctcctggtttgctcttagtttagcaatactcatctgatcactttgctagttcaagcaggacaatttgatcgaaccgcggaactattttgggttgtattaaacatcctccatgactgatgtgtgcctaatgttatttctgaacctccctgtttacccataatttttgacagcttccaaggtgggctttaggtttgctttgcttgtcaaagagggttcactccatctttgtgctccgccttttcaacgattgtttcgctatgacgtttctccatgctgccatggttttgattatgtatcacaagtggtaccttggtctagtaattttcagtgcagctgtctccattaagatgaatgtgcttctttttgctccatcgttattactactgatgctgaaggccatgagcatcaaaggagtcttctttgctttattaggggctgcagcactacaggttttgttgggtatgccattcttgttatcacatccagttgagtacatctcacgagcattcaatcttgggcgtgtcttcatccatttctggtctgtaaattttaaatttgtccctgagaagttctttgtatcaaaagagctagctgttgcattgttggttcttcacctcactactcttttggtctttgcacactacaagtggcttaagcatgagggtggcttgttccatttcttgcattccagattcaaagatgccacatcaattggacagttaatttttgccaagcccaaactgtcaactcttaacaaagaacatattgtaacggtcatgtttgttggaaatttcattggcatcgtgtgcgcacgatcattacactaccaattttattcctgagtacccctatgccaatggaaagaaatgaaaaaacagtatcgacaagcacggcacggcaatatcatacagttttaactttgagataggctttagttgtttcttcccttgttatacaggcaagatcaagaaggggtatggaaatctgaagttgtaattcaacacactgtatttttgatatgtcaatgctcttgctgtcagtaggctctagtttcctggatgatcatttcgtcctaccgaacatgtaccatagataacttgttaacaacatagcagctgctctggcaattctttgtacgtccattgagtaccattgatgttatcttgcagaatattctgaaaaataaaaatatatagacaggcccagatctctggcattgtggc

SEQ ID NO: 17992 - DNA, 2581 bp, Oryza sativa
  ref <308>: DATABASE ACCESSION NUMBER: AK068406
  ref <309>: DATABASE ENTRY DATE: 2001-12-06
gggttcttccccgcatctttcttctcctccaaagcggatggagaatttacacctacatctgttttcaaggggttgatgaaatcgactagaaagcatgcgccaaagcttgttgttgggatagtgcttcttggagcaggagcattcttcttaaatcgggctgagaagagtagtcaattatttcagcagcaagaaataaccacaagtattgaggaagttacctccactgcaaagcccatagttcgtgagatgcgaaagatcccacaacgagtaaagaagcttcactcttcgacatattatatttgcttctggctagtgttgtgtttgtaccattatttcagaaaatacctggaggtagtcctgttcttggatatctggctgctggtgtcctaatcggtccctatgggctttccatcatccgtcatgtccatggaacaaaagcaattgctgaatttggagttgttttcttgttgttcaacattggccttgagctttctgtggaaaggctaagctcaatgaagaagtatgtctttgggttaggctctgctcaggtgctggctactacagcagctgttggtatgatagctcaccgttttgcagtgctaccgggaccagcagcaattgttattgggagtgggttggctctgtcctcaacagctgttgttttgcaggtactacaagaacgtggggagagcacatcacgacatggacgtgctacattttctgtgttattattccaggatttggctgtggtggtcctgttgatattaatacctcttatatcacctaattcttcaaaaggaggggttggtttccaagcaatagcagaagctatgggaatggctgctgtaaaagcaatagctgctataacagccataatcgctggaggtcgtctgttgcttcgtccaatttacaagcaaattgctgaaaataggaacgctgagatattttcagcaaatactctccttgttatttttggaacaagtcttctcacagctcgggctggattgtcgatggcactgggagcatttttggctggtctattgctagcagaaacagaattctccttacaggttgagtcggatattgctccttaccgtggtcttctgttaggtcttttctttatgacggttggaatgtctattgaccccaagttgcttctgtcaaacttcccagcaatctctgtgatattaggtcttttgattattggaaagacaatgttggttacatttattggtagagtatttggaatttccaccatagctgctgttcgggttggtctgttgcttgcacctggtggggagtttgcttttgttgccttcggagaagctgtcaatcagggtcttctatctcctcaattatcgtcattattatttctagtggttggcttttcaatggctcttacaccatggttagctgctggtggccagtttttggcatcaaaatttgagcagcatgatgtgagaagtttattacctgtggaaagtgagacggatgacttgcaagaccatattataatattgggatttgggcgtgttgggcagataatcgcacaactcctgtcagaaagattaattccatttgttgcacttgatgttcgaagtgatcgggtggcagttggacgcgcgcttgacctaccagtatatttcggggatgcaggaagtagagaggtactgcacaaagttggggctgagagggcctgcgcagctgctattactttagatacccctggtgcaaattatagagctgtctgggctttgagcaaatattttccaaatgtgaagacattcgtccgagcgcatgatgtggatcatggtgttaacttggagaaagctggtgcaacagcggttgtccctgagaccttggaaccaagtctccagttggctgctgctgttcttgcacaggcaaaactcccaatgtcagagattgcagcaactgtcaatgagttcaggaaccgtcatctgtcagagctcacagagttatgtgctacaagtggaagttctctgggctacggatactcgagagtcatgtccatttccaaatcaaagaccgtcacctctgatgatgagagtgaaactgttgatggagcattggcgatttgagctgatgcgttagtcacctcccttagactgtacagtagataatctgtcatcaaagataatttgcgtatagaaaagtagtagcaaaataattcacgcaatgacgattcccatttttgaaaacttagcattacccctttttttaatgtatggtaggacataggatattacttatcttctaccatcggttcatttatttgtagcccttttactccgttagcaagtaatttcttgatggagaactaggacgatgcttgcaccttacatggagaacactgagaatttcacaagtggcctccaaatggcgcatgatggataagtcgtagtcgtctcttatgaggaatccatacaaccaagattttgggttcagaactaaatattatgattttgttagtactcagagctgatgttggaaacaagtggtgtcgggtttcttttgatattgcattatatttttaacagagcttgtttattattgttcttgt

SEQ ID NO: 17993 - DNA, 902 bp, Oryza sativa
  ref <308>: DATABASE ACCESSION NUMBER: AK068407
  ref <309>: DATABASE ENTRY DATE: 2001-12-06
gactagtcttcacgctccacatcctcctccatcgccgacggttcaatcatgtcgtcgccggcgaccgccgccgccgccgccgcgtcctgtggcgtcctccgccaccaccatcctccggcttccccgcggcctcctcccaccaccaccaccaccacctcccgcctcctcctcgcctcgcgctcgcggggcctccagcggccactccgagtcaaccacgcgccccctcgtcgcctcccgcccacggccgcgcgcgcccagagtgccgccgcagcagggtaccagccggagtcggagttctacaaggtggaggcaatcctgaggccatggagggtgccttatgtgtcatcgggtttgctgcaaatggggatcagaggcgtgacggtgtccgacgtgcggggtttcggcgcacagggcgggtcaactgagaggcatgaagggtcagaatttgcagaagatacatttattgataaagttaagatggaaatagtggtgtccaaggatcaggttgaagctgttgttgacaagataattgaaaaggcaagaacaggagaaattggtgatggaaaaatatttttgatacccgtgtcggacgtgatcagaatacgcaccggcgaacgaggggagcgagcggagaggatggccggagggctggcggacaagctgtcctcagcaatgccgatctcatgagagagcatgtttcctgtaggtaccactactgcactcccctgttgattagtgatgatgatgatcatgcctgtgtgaactccagcagcaataataaagctggaacgtaatgcccctccagtccagggctccaggcatcttacactgaaaatgttgttgccagaaacaaactcatgaactggatttcattatgaacaaagatgggggaaattcatgtg

SEQ ID NO: 17994 - DNA, 2712 bp, Oryza sativa
  ref <308>: DATABASE ACCESSION NUMBER: AK068408
  ref <309>: DATABASE ENTRY DATE: 2001-12-06
gcccctctctctctctcctcgcggctgcaaatcgagaggaagaggaagacgagaggagaggagagcgcgtggcgtcgagaggaaaagccggagccattgagccgcaggcctcctcctcgcgcgcgagcgcggccggcatctccggctcggatcgagcttgaaggagaaattggggggcttgagctgaaagatcttggtacaattctcccgcaaaatgcctggaattatcgtggatggagttgtcacagaggaggcacaaaacgaggtgaactcctcgcagaacaaggacaattcgtccgccccaagatcgccggtggcttcgaaaagcatgcacagcgaggcgctggagatgcatgtggagggttccggcgccggggagccatcgattgagcagctctacaacaatgtgtgcgagatggagagctcaagcgagggtggatccccctcgcgggagagcttcggctccgacggggaggaatcgaggatcgactcggagcttcgccaccttgttgctggggagatggaggccatgaaggtaattgaggaggaggaaggggaagggagtggtaatgccgctaatgcggtaaccgcagctgagaatgggactcccgtcaaggcgatgtcttcgaattcatcgaagaagtcgtcgaaaaaggctgcgaaatcacagcttgaatctgagtcttctgttggtcctaatggcaaggcatccaccgaggaaggtgaggccgaggtcagcaaacccggaagccgagttggccgtcgacggaaagctagtcctaatccacacaatgggactgaagatgctgggcttaataatccagaccttggtccatttcttcttaagcatgcgagagatttgattgcctccgataatcctcgtcgggcactgaaatatgctcttcgtgccaccaagtcattcgagaaatgtgctggtggaaaaccgagcttgaacttggtaatgagtttgcatgttgtggcagcaatctactgcaacttgggaaagtatgacgaggctgtacctgtactacagcgctcccttgagatccctgtaattgaagaaggtcaggagcatgctcttgcgaagttctctgggtgcatgcaattgggggacacctatgggatgctaggccagactgcgctatcactgcaatggtatgccgcagggcttgaaattcagaagcagacattgggggagcaggatccaagagttggagagacttgtcggtacttggctgaagctcatgtgcaggcattacaacttgatgaagcacaaagattgtgccagaaggctcttgatatccacagggagaatggtgagccagcctcattagaagaaacagctgataggaggctgatgggtcttatctgtgacacaaagggtgatcatgaagctgccttagagcatctggtgatggctagcatggccatggtggccaatggccaggaaactgaggtagcatcagtagattgcagcattggtgacatttatctctccttgggccggtatgatgaggccgtgttttcttatcagaaagctcttactgtattcaagactagcaaaggggagaatcatgcaacggtggcctctgtttttgtgcggcttgcggatctatacaacaagacagggaagctgagggagtcaaaatcatactgtgaaaatgcccttaaaatttatcagaaacctattccaggaacttcattggaagaaattgctaccggtttaactgatgtttcagccatttatgaaaccatgaatgagcatgagcaagcactcaagttactccagaaggccttaaaaatgtacaacaattctgccggtcaacagagcacaattgctggaattgaggctcagatgggcgtcttgcactatattttggggaactatggagaagcttatgactcattcaagagtgcgattgcaaagctccgcacttgtggtgagaaaaagacggccttctttggtgttgccctgaaccagatggggttggcatgtgttcaaagatactcgataaatgaagctgcagaactgtttgaggaagctagagctgttctggagcaagaatatggaccttatcatccagatactttaggagtgtacagcaatcttgctggaacttatgatgccatgggaaggctggatgaggccattgagatcttggaacatgtagttgggatgcgcgaagagaagctgggcacagctaacccagacgtcgatgacgaaaagcggaggcttgcagagctactcaaggaggctggtcgggggagaagcaggaaggcaaaatccctggagaatctgctcgagaccaacccatatactgtcacgaagagaggtacagttgcagcatgaggcacacactgctttgcgaggagaagcttgatgcaagcatgacgctaaggtgtatcaaattgggctgtttttcttttttcagatttggtgagaggggtaattgaaaataggatttgttttgagaatctagaaatgtcaaatgttctgattaattgttgtaaagttgcaaagtatgattcgctaccacttgttccctgctcatggctcttcaccgtgcttgggaagtaaagcgctgcttccatgctatacgcagctgagcttttataactttatattgtagacagtgtgagactgaacagcttggttggttgatattgcagcagatatcatgcataataaattgtacaggcatattacggtcc

SEQ ID NO: 17995 - DNA, 2149 bp, Oryza sativa
  ref <308>: DATABASE ACCESSION NUMBER: AK068409
  ref <309>: DATABASE ENTRY DATE: 2001-12-06
gatcacagcatccatcgccgccggccaccaccaccaccaccgccgccgccgtcttactctctctgtctcgagctcgagcttgttgttgttgatatggcgatggtgttgccggagacggcggcggaggggaaggcgctgacggacgcgtgggactacaaggggaggccggcggggagggcggccaccggcgggtggggctgcgcggcgatgatcctcggggcggagctgttcgagcggatgacgacgctgggcatcgccgtcaacctggtgccgtacatgaccgggacgatgcacctcggcaatgccgccgccgccaacacggtcaccaacttcatcggcacctccttcatgctctgcctcctcggcggcttcgtcgccgacacctacctcggccgctacctcaccatcgccatcttcgaggccgtccaggccaccggcgtgatgatactcacgatctccacggcggcgccggggctgcggccgccggcgtgcggcgacccgaagggggcgagcgcggagtgcgtggcggcggacgggacgcagctcggggtgctctacctggggctctacctgacggcgctgggcacgggggggctcaagtccagcgtctccggcttcggctccgaccagttcgacgagtccgacgtcgacggcgagaggaagaagatgatgcgcttcttcaactggttctacttcttcgtcagcctcggcgcgctgctcgccgtcaccgtgctggtgtacgtgcaggacaacgtcggacgccggtgggggtacggcatctgcgccgccggcatcctcgccggcctcgccgtgttcctctccgggaccaggaggtacaggttcaagaagctggtggggagccccctcacccaggtcgccgccgtcaccgccgccgcctggagcaagaggtcgctgccgctgccgtccgacccagacatgctctacgacgtcgacgacgccgccgccgccggccatgacgtcaagggcaagcagaggatgccacacagcaaggagtgccggttcctggaccatgcggcgatcatcgacaggtcggcggcggagtcgccggcgacggcgagcaagtggaggctgtgcacgaggacggacgtggaggaggtgaagcaggtggtgcggatgctccccatctgggcgaccaccatcatgttctggaccatccacgcccagatgaccaccttcgccgtcgcgcaggccgagctcatggaccgccgcctcgccggcggcttcctcatcccggcgggctccctcaccgtcttcctcatcgcctccatcctcctcaccgtccccttctacgaccgcctcgtcgtccccgtcgcgcgccgcgccacggccaacccgcacggcctcaccccgctccagcgcgtcttcgtgggcctctccctctccatcgccggcatggccgtcgccgcggccgtcgagcgccaccgcgccaccgcctccgcctccgccgccgccgccgcgcccacggtgttcctcctcatgccgcagttcctcctcgtcggcgccggcgaggcgttcacctacatgggccagctcgacttcttcctccgcgagtgccccaaggggatgaagaccatgagcacgggcctcttcctcagcacctgcgccatcggcttcttcttcagcacgctgctcgtcaccatcgtccacaaggtcaccggccatggcgcccgcggcggcggctggctcgccgacaacctcgacgacggcaggctcgactacttctactggctgctcgccgtcatcagcgccatcaacctcgtcctcttcaccgtcgccgccagggggtacgtctacaaggagaagcgcctcgccgacgccggcatcgagctcgccgacgaggagaccatcgccgtcggccactaatagtgaccgatcgatgcgtcagcatgacatacgcaagctagctaccagttagctgcacgcgtcgtgtatgtacgtcgtccttgtaataactttggttttttcttttcttgtattttgaatttttcttcttcttcttcttcttcttcttcttcttcttcttcttcgtgtattgtattcgacgtatttcgccgggtataatttgggtgtattctcatcgcacgtataattaattaattaaccaactacgtaataactacgtggagtt

SEQ ID NO: 17996 - DNA, 2842 bp, Oryza sativa
  ref <308>: DATABASE ACCESSION NUMBER: AK068410
  ref <309>: DATABASE ENTRY DATE: 2001-12-06
ttaagttgagtacatctgtgaattgctccaataaaaacgaatctaagctatcacagaatgaatccgatgatgatggaactggcagtgatacttccttgaagaacacttgtgtaagacgtactcgaagtggtggtgttgtccccaaaaaacaagaggattctagtgaatctgaggaaccgatcatactgagaaaaaatcatcaaagaggaaaatattctgggaaaagggctggatctacaccaaggaaagttaaagctcccaaaggcaatagaaaggaagtcaaggcttccagtttgaaatcttcgggtccaagtgagcagataaatacaggaagtcttcgtgaagaaaaacaaaaaataagtgatcatatcaagggcatgcttctagatgctggttggacgattgatctgagacccaggaatggcagaaattacttggattctgtgtatatacctcctagtggtaaaggatcttactggtctgtcacaaaagcttatgctgtgttccttgaaggtatggaatctgagaagaagggcagagctaaagatcagcgaccctcaaagaaatctgtaggtagccctgggaaaagtcatgtttcagaggaaatccttagcaaattaaaaagaatagtcgttaataaacgaagaaccaaagtagaacttcagaagttgaaaaagaggaaacatggtttactgaaaaagcagaaaacttccaagcgcaactcaaggggttccaaaaataaaatttcaaattctagaaagttgcatttaggcagcgaaagaaaaaagcgaggtggttgtgctctacttgctcgtggatcaaataaggatggtggaagcagcactaacggttttgttccatatgaatggaaacgtacagttttatcctggttgattgatcttgatattattgatatcaatgcaaaactgaaatgtgtggatgaaacccactcaaaagttttactggaaggtgtaaccactagggatggaattaactgcagatgctgcagcaaggtctttacagtacttgaatttgtggctcacgctggcgggccagtcagcaaaccttatagaaatgttcttgtagatgggctggacactgaccttttgcattgtctcattaatgcatgggataagcagtctgattctgaaaggcaggcctttttccctattagcactgagactgatgaccccaatgatgacacatgtggtatttgtggtgatggaggcaatttgatctgctgtgatggatgtccctcaacattccacatgagttgtctagaacttgaggctcttccatctgatgattggcgttgtgctaagtgctcctgtaaattttgtcaggaacattcaaggcaggatgctcaagacattgctgaggttgactcttcactctgtacttgttcccagtgcgaagaaaaatatcacccaggttgctctcctgagactactaacacatccaatgtctccagtcaggcatgcgatttattctgccaacaaagttgcagactgctgtttgagggattgcgtaatcttcttgctgtgaagaaggatcttgaaccagaattttcatgcagaattattcagcgtattcatgaaaatgtaccagaaacagttgttgctttggatgagagggttgagtgtaactccaagattgcagttgctctttcgttaatggatgagtgctttcttccgattgttgaccaaagaactggcatcaacttgatacgtaatgttgtgtacaactgtgggtcaaattttgttcggatggacttccatgggttttatatttttgttttggaacgtggagatgaaataatagccgcagcatcggtcagaatacatggaaccaagttagcagagatgccattcattggtactcggaatatgtatcggcgtcaagggatgtgccgcagactgctagatggaattgaaatgatcctcagctccctcaatgttgagaagttgataattccagctatcgctgaacttgtggacacctggacatctaaatttggatttagttcacttgatgtttctgaaaagcaagaagtcaagtctaccagcatgttagtttttcctggaacaggtcttcttcaaaagccattgctaaagaaaacttcacctggggaaaattcaagctctcaagaagttgatggtgttttctctgagctcgagtctgggaaaacttccaatgtggccaatgaagactctctttgttctgcaaatgctgagactcaaggttcggctgccccatgttatggggacaacagcaaagatgctagtgcttgcaatgattgacatgcttcctttgcattattttgtccctgtcaaaaggtgcaccctggtagtttcaagcattgacagatactattgaggacatgaagcacaccgatccttcattgttactattattctcttttgactcggcatgcggttcgtcggttggcagaagtagcctggatagagagggcgagtttttgaagatcccttgcagagcagcagcacctcggttctgctcaatattgatgattcaattgactctttggtttcggtttgacttgaaaccagcctgtgcagtgttggactccgatcacctaactttaagtggtttacctttacctgtaaagtcagcatgtagaactgagatgatagttttattccgtgttttttttttctggatggttaacttagtaccaaaggccaacgtgtgccgcaaaatcttcgtacatgtttctttacctgctatgtgacagtagctttgtttttgctagcccatttttttgcagccagatctcatctgtaagacactaatgcatgggcaagcagaaaaaaaatctcag

SEQ ID NO: 17997 - DNA, 1175 bp, Oryza sativa
  ref <308>: DATABASE ACCESSION NUMBER: AK068411
  ref <309>: DATABASE ENTRY DATE: 2001-12-06
gaatttctctcgatcggttcgatcccatgaccatgtgagggggatgatgccggaggcggctctgagctccggcaagccgatgccgcgggtcggcatgggcacggcttcgttcccgctcggcgcgaccgacccgtcgacggtgaaggatgtcgtcctgcgcgccatcgaggccggctaccggcacttcgacacggcggccgtgtaccagacggaggccatcctcggcgacgccgtggcggaggcggtgcgcgccggcctcgtcgcgtcgcgggacgagctctacatcacgtccaagctatgggttgcccacgcgcaccccggccatgtcctgccatctcttaggcgtgcgctccggaagatgcagatggagtatctcgatctgtacctgattcactttccggtgagcatgaggttggctgaagatccggagtcaatgacatattccaaggatgaccttgtgatgatggacatggagggagtgtggaaggagatggaggagtgccaaaggctaggactcaccaaggctattggtgttagcaacttcagttgcaagaagctcgagacattgctctccttcgcaaccatctctcctgcagcaaatcaagttgaggtgcacccctactgtcggcaaaataaattgagggagttctgcaaggagaaaggaattcagctctgtgcctactctcctttaggtggaaagggtacaccatggagcaacaatgctgtcatggattgtcctcttctcaaacagattgccatggagaggggtaaaactattgcccaggtatgcttgaggtgggtgtatgagcaaggagattgtgtaatcgtcaagagcttcaacaagagcaggttaagagagaatctaggcatctttgattgggagctcaccaatgatgatcgtcacaagataagcaccctcccagagtggaggggaactcttgacatcttcgtccacaaaaccggtccatataaaacagttgatgagttttgggacggcgagattactggtgacaagactttttctaatggtccctgatcaatgctagcccagccaatgaatggactgctcaagaagaattcaaatttcgtgtaccagagtccaacatacttttcctcatggtgcacacatgttatgtccttttgtgaatgaaagtatactagtcgtcaaaatctcc

SEQ ID NO: 17998 - DNA, 1594 bp, Oryza sativa
  ref <308>: DATABASE ACCESSION NUMBER: AK099054
  ref <309>: DATABASE ENTRY DATE: 2002-08-28
gacctccttctcccccaaattcgctagagccatggccgccgccgccaccgccgccgtccccctcgacgaggccaaagccaaggaggttctccgccaggtggagttctacttcagcgacagcaacctcccccgcgacaacttcctgcggaagacagtcgaggagagcgaggatggcctggtgagcttggcactcatctgctccttctcgcggatgaagaagcacctaggcctggacttggacgtgaagcaggagaccatgccggaggagacggtgctcgccgttgccgaggtgctgcggcgttcctcggccctccgtgtcaccgaggatgggaagaaagttggcagatcaattgagttgtcgaaactggatgagatcatggagcaagtggactctaggacaattgctgcatcaccatttccttacaatgtaaagctggaagatgttcagtctttctttgctcagtatggcaaggtgaacagtgtgaggctacctcgacatattgccgacaaacgacacttctgcggcactgctttagtcgaattttcagaagaagaggaagcaaatgctgtattaaagaatactcttgtttttgcagaagcagatctggaaataaaaccaaagaaagaatttgatactgaaagagaggctaagaaagaagcttatgagaagtcacaacctactaagaatggtcatgatgagggatatccaaaaggtctaattgtggccttcaagctgaagataattcaaattgatggtggcatggcagaaaatggtggggacaaagagggtgaaactgatgatgccaataaatcaagaacagggcatgacgagaaaatccctgaaaacagtgatatcaaggaagacttgtcagatgatgttgagaagtcaaaagaggcagctgctcaatctgttaagaaaggagaaagtccttcagaaaatgcggatgatccaatttcaagggaagattttaaagaagaatttggcaaattcggcacagtgcggtatgtggacttcagcataggggaggattcaggatacattcggttcgaggattctaaggcagctgaaaaggcacgtgcacttgcggctatttcagatgaaggtggtttgattatgaagggccatcttgttactttggaacctgtgtccggtcaagctgagaaggattattggagtgcgataaagggcggtcaaggaaaatatagagacaatagaagtaacaggggaagggactggaagaataacaggggcgggaggcacttcggtgggaagcgtggtcgccactcggacggccatgaaagggcaaataaagctcgaaaagtcgatgctgctgcttaaaggcctcgtcgtcttatactagtaacctcagcttatgagctctagtgaggaacggaaatgtttgctccgttgcttgcttccacaactttgggagcaaaccttttgtgttgtgtttcttgtcgtgagctatgctctttggaagtaagaaacggtgaactcatgatgaaacggaaaattttgttcggtcaaagcttgggatgaatcctttacatgtatctgatatatatactaatacttccgtcatctgaatatctg

SEQ ID NO: 17999 - DNA, 4412 bp, Oryza sativa
  ref <308>: DATABASE ACCESSION NUMBER: AK068412
  ref <309>: DATABASE ENTRY DATE: 2001-12-06
gagatttccccccgttctcgggccattgcctcgcggtgcgacgagccaccgggaatccgggatctccgccgttcggggaccgagggggagaataggggagaacggagaaggtctgcgggctcaaactcctacccaggcagatgacgctccatggagtcatggcgcatttgaggtatgccggaaggttttttttaccaagcgacctgggaattgaagcagcggagaagaggctccagtgcggcaggctgtccgaaagggcttggaacctggtagaggtacgatttcttcaggagataacctggggtggtggcacgggactctgccgtttcactgcttcaagctcaaggtggctggcggcatctggcagctgcaccagtgttgttcatggcggaggtggtgttggcaggcttatgtttggcagcaacaccaatctgtgtgaagctcctcatcaacgcttcgacgtaccttggcgtggacatgacacatgagctccatgaactggagaccaccatcataccacagttcgagctggtgatcgaagcagctgagaaaggaaaccacagagtcaagctggacagatggctccaggagctcaaacaagccttctacaatgctgaggacctgctggacgagcatgagtacaacatccttaagtgcaaagcaaaaaacaaggattctctagcgaaagattccacccaggtgcatggctcttccatcagcaatattctggagcagcctatgcatgctgtgtccagtaggatgtccaatctgtggccagaggacagaaagatactttgccagctgaatgaactgaagaccatcctggagaaagccaaggagttccgtgagctgattcacatacctgctggtaatagtcttgaaggtcccagtgtcccaacaaccattgtccctgtagtgacatcgctgttgccgccaagagtatttggtcgtgacaaggatcgtgatcgcataatacatcttcttactaagccaatggctactgtttctagctcagtcggctactctggtttggccattattgcacatggaggagcaggaaaatccacattggcacaatatgtttacaatgacaagacggtgcaagaacattttgatgtcaggatgtgggtctgcatctcacgcaaacttgatgtccatcgtcatacacgggagattatcgagtccgcagaaaatggacagtgcccacgtgtggacaatcttgacaccctccagtgcaaattgagggacatacttcaaaaatcagagaaattcctgcttgtgttggatgatgtctggtttgatgaattcaacaatgaaacagaatgggaccagctgcttgatcctctagtttctcagaaagaagggagcagagttctggtgacttccagacaagatgtacttccagcagcacttcgctgcaaggatgtcgttcgtttggaaaacatggaagacactgagttcttggctctcttcaaacaccatgcgttctctggaacagaaataaaaaatccacagctgcgtggaagactagagaagattgcagagaagattgttaataggcttggacattctcctttggcagctagtaccgtgggttcccagttgagcaggaataaggatatcaacttatggaaaagtgctctgaatattgaaaatttaagcgagcccatgaaagctctattgtggagttataataagttagattcacgtttgcagaggtgttttctctactgcagcttatttccaaaaggtcataagtataaaatcaaagagatggttgacctttgggtagcagagggattaattgattcacacagccccggggacaagagaattgaagatgttggtagggattacttcaatgagatggtgtctgggtctttctttcaaccagtttctgaaagatatatgggtacatggtacattatgcatgatctgcttcatgatttggcagagtcactgactaaagaagactgcttcagattagaagatgatggggtgaaagagataccaaccactgttcgacatctatctgtacgtgttgagagtatgaaattccataagcaaagtatctgcaagcttcgttatttacgcacagttatctgcattgacccactcatggataatggagatgatgttttcaatcaggtactgaagaatctgaagaggttacgtgtactatatttgtcattttacaacagtagccggttgcctgaatgtattggtgagctgaagcaccttcggtatttgaatatcatcaaaacattgatttctgaattgccaagatcattatgtactctttaccagttacagttacttcagttaaacaaaaaggtgaagtgtttgcctgacaagctgtgcaatttaagtaagttacgacgtcttgaagcatttgaggacagaatagatgaattgataaatgctgctctgcctcaaattccttacataggcaagctaactttgctgcaacatattgatggatttttcgtgcaaaagaagaagggatatgagttgcatcaactggggaacatgaatgagctcggtggtaatttgcgtgtgatgaatcttgaaaatgttagtggaaaggatgaagcctcagagtcgaagctgcatcagaaaactcatcttagaggtttgcatctctcctggaatgatgtgtatggcatggatgtttcacatttggagattctagaaggcctgaggccgccatctcaattggaggaccttacaattgaaggttacaaatccgccatgtacccaagctggttacttgatggctcctattttgagaatctagagtcttttacgcttgctaattgctgtgggataggaagcctaccacccaataccgagatctttaggcactgcctgacacttacccttgagaatgtcccgaatatgaagacactatcttttcttccagaaggtctcacaagcctatcaattgtggggtgcccactgcttgtgtttactactaataacgatgaactagaacaccatgattatagggagagcatcacgagggcaagcaacctggaaacacaacttgttttgatttgggaagcagattccgattcagatattaggagaacattgttgtccgaacactcatccatgaagaagctgacagaattgatggatactgatatttcaggaaatcttcaaaccattgaaagcgctctaaaaatagagagagatgaagccttggttaaagaagatatcatcaaagtatggctctgttgccatgaggagaggatgagattcatttattcaaggaaggttgggttgccgtttgttccaccatcaggactatgcgaactcaatcttttctcctgtagtattacagatggtgctttagctatttgccttggtggactgacttcgcttagaaatttgttcttaaccgaaattatggctttaactacgcttccaccggaagaggtcctccaacatttggggaatcttagatacttggtcattcgttcctgctggtgtctcagatcgttcgggggcttgcgatctgctacctctctttcagaaataagattattttcctgtccttctttacagttggcacgtggcgcagaatttatgcaaatgtcccttgagaagctatgtgtatacaactgtgtgctttcagctgacttcttctgtggtgactggccacatctggatgatattctcttatctgggtgcagaagctcgtcgtccttgcatgttggtgatcttacctccctcgaatcattctcactatatcattttccagatttatgcacgctggaaggtttgtcttccctgcagcttcaccacgtgcatttgatagatgttccaaagcttactaccgagagcatctcacagtttcgcgtccagcgttcgctctatattagcagttctgttatgctcaaccacatgctctctgctgaaggtttcgttgttccagagtttctctctcttgaaagctgcaaggagccatccgtttcattcgaagaatctgcaaacttcacatccgtcaagtgcctgaggttatgtaattgtgaaatgaggtcaccaccaggaaatatgaagtgcctatccagtctaacgaaactcgatatctatgattgccccaacatatcatctataccagatctgccgtcctccctccagcatatatgtatatggggttgtgagctcttgaaggagagctgcagagcacctgaaggagaaagctggccaaagattgcgcatatccgctggaaggaattcagatgaattgtgcttcagaatcacaactagagagaaacggaaaggtgaaggttacatcaatgcattgtcagaagtattttcttttctgtattatttatttcgttaacccatgatcatgcaaacacattatttacttcaatgtttccttgtttatttattttgaacag

SEQ ID NO: 18000 - DNA, 1353 bp, Oryza sativa
  ref <308>: DATABASE ACCESSION NUMBER: AK068413
  ref <309>: DATABASE ENTRY DATE: 2001-12-06
ggcttcctctcgtcgcccccgcaatttcgcggtctcctcctcctcctcctcccctcgtctccacctcccaatccggcgattccccaatcctccaccacctcctcacccacccccccgacgaccacctcccccacctcgcccaaccacgcggcagaagcaagtcaagccaagccgtacggcaccccacccccaccccgcgcaatgccgggcctcgccgccgaccaggacaccgtctcgctggtgcgccgcgtctcccgcgccctcaaccgccgcctcaccgacctcgtcggcctcctcttccaccacaagagcgccggatccctcggggccgtcgccgggttcgccatcgctgtcgtgttcgcgtggaagttcctgcggtcgtcgccggccaggccgcgccgcccccccggaccgaagcggccgctcgtcggccctgctgcccccgattccgccgctcgcgatgcggccgagcctgccaatcctgggaagctgacgacacggcaaatcgtggtgaagcgactgggcgggtgtagaaaggtgacttgccaactgcttggtgttgtctttgaggagataactcctcaggagcttcagacacatgccactgttagaccttcagtggtggaactactactcgaaatagccaaatactgtgatttgtatctgatggaaactgtacttgatgataagagtgaggagaatgctctattggccctggagagtgctggacttttcaagactggtggcttgatgaaagaaaaggtactcttctgcagctctgaagttgggcgaacttcatttgttcgacagttagaggcagattttcacattgacacaagcctcgatataatttcccaactatctcggttcattcggtgccaactctttgtttcctcaatagaaggaggacaacttgcgggtaatgtatttaactctccaagccttgagcagttcttctcatgaaaccagagcataatgggggttcgtatctaaacgtggcgactacagcagcacgtgtttcaagctttgaaggtgtcatgtgattctgtgacaccaatctagtagtagaatcctcaggtacataatggaggcatatgcggttggcacatatgttgtgtgctatgttgtgcctgttgttcccatctttctcatagctgtatcttagcctcatagatagcgagaactataagttggatgagtgcagttcatggccatctaatggtgttgtaaaatgtaaattgaatgccacaagtctttttttttttgggtttattagtttctgtagctttcattccatgacgagcgaactagtacctctatcgcaatagaagcaactgtagctgatgattccgg

SEQ ID NO: 18001 - DNA, 2392 bp, Oryza sativa
  ref <308>: DATABASE ACCESSION NUMBER: AK068414
  ref <309>: DATABASE ENTRY DATE: 2001-12-06
gttgtcagtgggacgtggcccagctcacctcgtccccctccggccatctcccctctcctccaccaaaatcctcctccgatccaaatccaccaaccctcgccgccgccgccaccgccgcctatgccgccgccgccgtcgccggctgcctagggttacggcggccgcagctcccccccacttcgccggcgcgatggggaacacctgcgtcggccccagctccgcggcggaccgccacggcttcttccactccgtctccctcgccgtgctctggcgccccggtggccgcgccgagccgtcgcagccgccgggttacccgcctcgggagtcgagccactcctccgtcacctcgtccacggcgcccgagcgcgtcaccatcgccgactccgacctctcctcctccacccccaacaagggcgggaataagcccaaggtgaggcgcgtccagagcgcggggctcctcgccgactccgtcctcaagcgcgactccgagcggctcaaggacctctacaccctggggaagaagctcgggcaggggcagttcgggaccacgtaccagtgcgtggagaaggccacggggaaggtgctcgcctgcaagtccatcgccaagcggaagctggtcagcgaggaggacgtggaggacgtgcgccgggagatccagatcatgcaccacctcgccggccacccgagcgtggtctccatcgtcggcgcgtacgaggacgccgtcgccgtgcacctcgtcatggagctctgcgctggcggggagctgtttgataggatcgtgcagcgcgggcactactccgagaaggcggccgcgcagctggcgcgggtgatcatcggtgtcgtcgaggcgtgccattcgctcggggtgatgcacagagacctcaagccggagaacttcttgtttgtcaaccataaggaggactcgccactcaagacgatcgattttgggctttccattttcttcaagccaggcgaaaattattcggatgttgttggaagtccttactatgttgcacctgaggttctgatgaagcattatggccgcgaggtggatgtatggagtgctggtgtaatcatttatatcttgcttagtggagttcctccattttgggatgaatctgaacaagggatatttgaaaaagttttgaaaggagatcttgatttttcatctgatccctggcctgctatctcagacagtgcaaaggatttggtgaggaaaatgttaaaccgtgatcccagaaagagattgactgcacatgaagctctatgtcatccttgggtttgtgttgatggagttgctcctgataaacctcttgattctgctgtcttaactagattgaagcaattttcagcaatgaacaagctaaagaagatggcccttagggtcattgctgaaaatttatcggaagatgaaattgcgagattgagagaaatgttcaaaatgttggacactgataatagtggtcagatcacattggaggaactaaaaactggcttgcggagagttggtgctaatttgaaggattcggaaattacaaccctaatggaagcggctgatattgataatagtggttcaatagattatggggagttcattgctgcaactatgcatctgaacaaagttgagagagaagataatctttttgcagcgttttcatactttgataaagacagcagtggttacattactcaagatgagctacaaaaagcctgtgaggaatttggcataggagatgcacatctggaggatatcatcaaagatattgatcaggacaatgatggccggatcgactacaatgaatttgtaacaatgatgcggaaagggaataatccactagggaaaaaggggcaaggccagctaagttttggtctaagggaagcattgaagcttggttaatggaataactacccctgaatgtagaatggagtgctatttagtaaaggacgaagactgaattcaagaaagcagaagatcaaagacaaacgttggtgttactcctttatcaacactctgtgaagatacaaactaactttttgggttccatcagccggacacacaagaaagccacgtacttgggtttcttcaaagagttcaacatccgtggaccctccaaccgtatagggtgtttttttttccttttttaaataggcacaactcacaagaatagcgtgtgtgttgtttcatactttcatgtcctccttttccgttctggaaacccttgtaggatgctctgctgagacggtgaagctttgacacgcttggaacttcggattggagagttggacgagattcctttgcattggagagttgtatagttgctagtattgaaatgttgtaagaattcgtaggttgtaacataaacagtaaaatgaatgaaatggttgttttagt

SEQ ID NO: 18002 - DNA, 3413 bp, Oryza sativa
  ref <308>: DATABASE ACCESSION NUMBER: AK068415
  ref <309>: DATABASE ENTRY DATE: 2001-12-06
ggctccgcttcttcttcttagctcactccaccccccggcctcaccgcggccggccgcaacgacctccatccaccacctcccttctccaccttccacgccccttctagaagcttcgggaagaggcccatgggcgcctccgccgcccgcctcgcggcgctgctcctgctcctcctcgccgccgccgctgccgtcggggagtgcgtgtacatcccctacaacacgtcggcgggggtggtgggggggaagctcaacgtgcacgtggtgccgcacacccacgacgacgtcgggtggctcaagaccgtcgaccagtactacgtcggatccaacaactccatccagggggcgtgcgtgcagaatgtgctggattcgctcgtgccagcactgctcaaggatgagaaccgcaagttcgtctatgttgagcaggcattcttccagagatggtggagacagcagagcgacatgattaaggatatagtgaaggggctcatcagcactggacgattggaattaataaacgggggaatgtgcatgcatgatgaagcgaccgtgcactacattgacatgatagaccagactacgctcgggcacaggttcatcaaggaggagtttggtcagattccaaggattggttggcagattgatccgtttgggcactccgcagttcaggcttacctcctaggcacagaagtaggattcgatgctttttattttttccggattgattaccaagaccgtgacacacggaagggaacaaaagagctcgaggttgtgtggaggggctccaagaccttcggctcatcagctgacatctttgctggcatcttcccaaaaaattatgaaccacctcctggtcagttttacttcgaagttgatgatacttccccaatcgtccaggatgatccccttctttttgattataatgtggagcaacgggtggatgactttgttgctgcagctatagcacaggcaaatattacaaggacaaatcacgttatgtttacaatgggcacagacttcaaatatcaatatgcagaaagttggttcagacagatggacaaattaattcactacgttaataaggatggccgtgtcaatgctctgtattccacaccttcgatttatactgatgcaaaacatgctgaaaatgtgccatggcctctcaagactaatgattttttcccgtatgcagacaacccaaatgcatattggacaggttacttcacaagcagacctgccttaaaacgatacgttcgtgttatgagtggatattacttggcagctaggcagttggaattctttaaagggagaagcaactctgatctcacaacagatagtttagctgatgctctagctcttgctcagcaccatgatgctgttacaggaacggagaagcaacatgtcgcaaatgactatgcaaagagattatcaattggctatacacaagccgagaagctggtttcatcctctctctcttgcttgagccagtcaggctcaaaatcacattgtccgtcccaaacaacgaattttgaacagtgtccgctcctaaatattacatattgccccccttccgagatggacctttctcaagggaaaagtttggttgtgcttgtgtacaactctcttgggtggaaacgggaggatgtccttcgcataccggtcatcagtgactcaattgttgttcatgattctgagggaagagaagttgaatcacaacttctgcctatagctaatgcatctttgtacatgcgggagaaacatgtcaaggcttacctaggcatgttaccagctgcaaaacccaagttttggcttgcttttccagtttctgtaccacctcttggtttcaatacgtactttatatcaagcgggaagaaatcagcatcagtctctttgatgtccactctgcactcatctcaaggaagtgaaaatagtaacatgcaaattgggcaaggacagttgaaacttcaatacaatgcagctggagcattatctctgtactccaatagtaagacccaggttgaagcaaattttgagcagaagtacaagtattacataggacaggatggaaatggaagtgatcctcaggcttctggagcatacatatttcgccctaatggcacagttcctatcaagactgatggacaggttcctctgacagttctccgtgggtccatattggacgaagtgcatcagcagattaatccatggatatatcagatcaacagagtttacaaaggaaaggactatgtggagactgaatttatagttggaccaataccagtggatgatggaaatggaaaagaactatccactgaagtcgttacaaacatggcaacaaacaaaacattttacactgattccagtggacgtgacttcatcaaaaggatacgggattaccggtcagagtggaagatcgaagtgcaccagcctatcgctggaaactattatcctgttaatcttggcatttatgtggaagatggaagcagagagttatctatacttgtagacaggtctgttggaggtgccagcataaaggatggacagatagagctaatgctacacaggagactacttcatgatgatggtcgtggtgttgcagaggcattaaatgaaacaacctgttttgataatcaatgtgaaggactagttattcaaggaaagtattatctcaaaattgatccacaaggtgaaggagctaggtggcggcggacatttggccaggaaatatactcccctcttcttattgcttttgcagagcaggatggaggtaattgggtgaattcacacgttacaaaattctctgcaatggatccggcctacagcttgcctgataatgttgcattgcttactcttcaggaacttgaagacggaactgttcttcttcggttggctcacctatacgaggctggagagcacaaggatctttcagctctagctagcgtcgacctgaagagagtatttccagacaagaagattgtcaagattgttgagacaagcctatcagcgaaccaagaacgttcagccatggagaaaaagaggctgaagtggaaggtggaaggccctcctgctgatgaaaagatcgtccggggaggccccgtagatccttccaagctcgtcgttgatctgggccccatggagatacgcacattcctcatcaatttcgccccgcagtccggcaaacagttgatgtgaggggtgacatggccttggcaccaatgttttatttttagcttgagttcttctcatggtgatgagcaataagaaataatgtggccatggtgattggtgaccgaatgcagagatgcactggtagcatccaaccactgagccctgtttgtagcttgtaaatgaatttggcttcaccttaagttgagctcggtttcagtgaagataagtgactgaaacttttggtctcc

SEQ ID NO: 18003 - DNA, 2904 bp, Oryza sativa
  ref <308>: DATABASE ACCESSION NUMBER: AK068416
  ref <309>: DATABASE ENTRY DATE: 2001-12-06
ggcagccgcgcccggatccccacctcctcctccccctcctcctccagatcacaccaccgtcgtctccaacctccaatccattgagataggcttcgccagggtgccccgcgagcgagcggaggtgggcttaggtctctagggtttggcggggcgcaccccctcgtggtctctcgtcgtcgccttcgcctgttcggggggctagggttgcgtcgacggtggggggtgggggtgcgggtgcggggggcgggcggtcgatgcggcgatcgcgggcgatcgggagggtgtagcggcggcaggggaggggggatctccttggcggtttgttcggagatggccgccgacgcgctctccatcatcccgggcgccgtgctgcgcaacctctccgacaagctctacgagaagcggaagaacgccgcgctcgagattgaggggatcgtgaagcagctggcgacgtcgggagaacatgacaagatatcagcagtgatcgctctgctcaccaacgatttcaccatgtcgccccaagcgaaccatcggaagggcggattgattggtcttgcagcagtcacggttggactcaccagtgaggctgctcaacatttggagcaaattgtgcctcctgtgcttacctccttcctggaccaagacagtagagttcgctactatgcgtgtgaagcactatacaacatagcaaaggtggtaagaggggatttcatcatctacttcaacaaaatttttgatgcattatgcaagctttctgcagactctgatgctaacgtgcagagtgctgctcatcttcttgacaggcttgtcaaggatatagtaactgagagtgaccagttcagcatagaagaatttataccactcttgagggagcgcatgaatgtgttgaatccttatgtgagacaatttttggtggggtggataacagtgttagacagtgtgcctgatattgacatgcttggtttccttcctgattttcttgatggtttatttaatatgctgagtgattccagccatgagattaggcagcaagcagatgcagcactttctgagtttctgcaggaaattaaaaattcaccaaatgtagattatggtcgtatggctgaaatacttgttcggagagctggttcttctgatgaattcactcggttgacgtctatcacatggattaacgagtttgtcaagcttggtggggaacaacttgttccttactatgcagatattttgggagccatcttgccctgtatttctgatcaagaggagaagatcagagtggttgcgcgtgaaactaatgaggaactttgtgctataaaagctgatccaactgaaggatttgatattggagccattctctcaattgcaaagagggaattgaatagtgaacacgaggctacccggattgagtcattgcattggttttccactctcttagttcgatatcgtgctgagttcttggcatacttgaatgacatcttcgatccactcctaaatgcactctctgatccttcagatgcggttgttctattagtgttggaagttcatgcgcgcatagctgaagagtctcatcactttcatcatcttgtatcctacttaatccacacttttcacaacaatcatgttctactggagaaacgtggcgcattgatagttcgtcgactttgtattcttttgggtgctgaaaaagtttatcgagagttctctactattcttgagaccgaaggtgaccttgaatttgcatccaccatggttcaggccttgaatttaattttgctcacatcaaccgaacttgctgagctgcgttctcttcttaagaaaacattggttgattcttgtggcaaggacttatttcaatctttatacgcttcttggtgtcactctccgatggctacaataagcttgtgtctacttgcgcaggcatacaatcatgcaatttctgttatccagtctttgggagaggaagatataaatgtgaagtttctcgtgcaactagacaaattaatccgtcttttagagactcctgtatttgcttacttacgtttgcagcttcttgagcctggaaaacatacctggcttctcaaaacactttatggtctcctgatgctactgcctcagcaaagtgcagccttcaagatcttgagaactcggctgaagactgtgcctttcagtgaaaatttgaaacgcacatcttcaacaaatccatactctcagattctacaagtgacagaagatggtaatcgaaatcacgacactcagagctacaatgcaatcaatttcccatcccggctccaccagtttgagagcatgcagcagcagcacagagttcatctaaagaatcaactgcaatcccaaaaatctgcttcagctatagtattatcacaggaaattcaaagatacgaagaagcacattcctcttcgacatcagagattggcaggcccccttcgagaacatccagaggcatttcatgatgcattttggttgattgtgatgtattatacatttgcaagacgcatcgtcacaaatttgttggggctttggttagtctcctttatttttttttcaaaggaggttcatagggtacatagagtgtaatctttttgtttggttcctagatttttgtcatgggatggcaattatttgttggagaaagctcgtttccctctttcagctattattttcccttttcttttagctgtttcactgctcatgtggtttctgtaatttttcaattgaaggccaatgagcaaaatagtatttggagatatgtcacgactgttctgcttatcaatctccaataaattagtgatgcaatgtaaatttttgttcctagctcttgtgatccacgccatctgtaattttctaccacatgataatcgtgaacttttaaaattggtaatttacttctt

SEQ ID NO: 18004 - DNA, 916 bp, Oryza sativa
  ref <308>: DATABASE ACCESSION NUMBER: AK068417
  ref <309>: DATABASE ENTRY DATE: 2001-12-06
gatgctgcatcgccacaccccattatccattcctaacccgaagaaaccgagaaggagagctccatctcccttatccatctcaacctcaccgccgaccgtgaagacgacgaccgcctccagcgccattacgccgcggtcgtttcctcttctcttgcgtcccattatcacctctccacgccgattccatccctctaagtttcaccccatttcatgcagtggtttggtgggaacgcaaacctcgccggcgatgctctggagcacgcaccgggcgccgccgtggcggcatcgtcgtcgttgccatcgatctagactgagccggagcgagccaccacgccaccagcttcacctcgaccgcctctccatttacccccaagaaacccatccaatggcgcagcgatcttggagatcgacatcgtcttctccaactccgttcaactgcttccatcatcgaatccattctctctgatcgagcagccgacgtcatccctggagttgtgccatgccgccatggagcttcgccgtcgctgtggctctgcagacaaccccagccttgtctagcatctcgataattgcttaatcggtgaagaagtgaattaggtgctgacattttccagtttcaaggtttagacttagtctttgagtgatgcgggtaatcgactgcttcttctaagacttaaacttaatggggtaaacccctagtcggtgtgcattgggtagacaagcttccgctgttctattatttatttggccggtcggctggtgtaactaaagtagatgtagtttataatcgttttcatcttatttatgtttgctatgtataaccatgcttttgatgaaagtgtgaatctagtgcacatcgaactagattcacatgagtatgagttaagaatatttgagatgttacagatctttagcc

SEQ ID NO: 18005 - DNA, 1146 bp, Oryza sativa
  ref <308>: DATABASE ACCESSION NUMBER: AK068418
  ref <309>: DATABASE ENTRY DATE: 2001-12-06
gactctccacactccagccatgggcgacgcggcgggcgcatggcggcgcactgggcggcgctctacggcggcggagttaatggtggcgcggcggcgggggcggagggaacggtgtcgagcccgacctccgggggctcgccggtggcgggggggagcccgacgagggggggcgcggcggcgctgccggggatcgagggcgggcgcgtcgcgaagcccgcgcggcggcgctccagggcgtcgcggcgcgcgcccgtcacgctgctcaacaccgacacctccaacttccgcgccatggtgcagcagttcaccggcatccccaccccgccctacgccaccgccgccgccgccggcggcccggtcatcagcttcggcgccggcgagtacggcggcggcgccatgcccgtccgcccgtccccgacaccggcgtccgtcatgtcgttcgaccacctcggccaccaccaccgccaggcggcgtcgtcgctgcagagccagctgttccggccacagcaccagcaccaccaccagtacggcggcggcggcgacgtcgggtacggcggcggcggcggcgacatgtttctccacgggttcgagtcgtcgtcggcggaggagaggctgctgctgcagagcatccaggcggcgcagatgctgccggcggcgaggccgacgaccacctcggctaacaacgctaatggctacaacttcggatgattaattagccaacctcgcacttgattagtttgggtaattaaggtaagcatcaagtgctaattagagagagagaaattgaattaaagatgccattagttaaggctctttaattacatgatcaaccaagcatcatatggattgcttgattatttctcctcttttgtctgcaccatgatgttgttttaattttaatttttaaggttttatttttgttggcctttgctgtagagagatatacccagattagcaaggctgattaagttctttattaatacagtaattagtggtagcttagctagatgtgaaatggaatgaaaagcatgtaaatattttctcaacacagtactttggttaattttggtgtgtagcaagagcacttttggtgatcaccactagtgcaaaaacttgatatttagtgaggaatctttctccctttct

SEQ ID NO: 18006 - DNA, 3570 bp, Oryza sativa
  ref <308>: DATABASE ACCESSION NUMBER: AK068419
  ref <309>: DATABASE ENTRY DATE: 2001-12-06
gggtgtactgaccgtacaatcctactactcgtacgcctcggctgtactttgatcccaccaccaccaccaccaccactgagatgacgcgaggttcgcagttccacgcatcccaccatcaccacaccacgacgacgacgacgatgccgcagcgcgcgtgagcgatcacaaaaacgcctccgtcttccggcctttttcccgtgagtgagagagctcgcgcgcgcgcgcgtgcgttcgcctactacattctttcccctccaaccttttcgaggtagtatatttttcctcgtcctccccgtgctcttgattctctgcctcggtttggtattttggcctttttgatcgggagggcggggggccaatttgatttgccgttcatttcgatttgatttgatccgatctgatctgtagaatagacatcacatcaggggtatggaggttggcgtgagcgaagctttgaatcccgggtagccgccggagagattgcgtcctctcgccttccctccctttgattcctgctcgcccgccgctcgtctttccgctctcgccgagacacggtgttcggcggccgcgcttgtttggtcgctgcctttttatgccaaacccatccgctttgagagattggcctgtcgttttcctgttgtttggtgtaagattccgtcgctcttgaaagctcacgatgcgaaaagaggggcgatttttttatgtttttgatttatggtattgagggtttttttttttttgcttgctttgttgatggattcaggaggaggaggaggcggtggcgattgatggaatctgatcgaatgccgcttcaggctgggtcaatcgagctggctgcaacgatcggaggtttcctatcccctcgtgaaggtgtcaaatcagtatccttgtgccggatggtttggggataattttcgtagtgagttcataatagcgtctcatttgggattcctctggttgattcagttccctttgcaagtttgcgggtttgttcacggatttggttggcttgagatcgatcttcattcattgggagatggatgatgatgactactcctgggtgcggcgcaccaagttctcgcactccattgttaaatccaactctggcagggagcagtttggtgcattccttgatccgtttgacagttccactgcatggaggcagaaaggattcagtggagagctcatgattcatggacataatttacagccgagggcaaaaggagcagtctcaaagtcacctaggccttcaatcccgttggcgaaatcaccagtttcacaggcagagcggaagctgaaagctaagttttcagatggtgaattgaaacaacgggggaaaattagtgatggctcgttgcgagaagcatcgaaagagaaggatcgcaaggttgggcataaaggagaaggccttagcctggatatttcttgtccaattctggatcggacagttcaggatgacagttcagacacgcttgacttctctttccactcagaagagcaaagtttaaggttgctgagagtatgctcgagtccagctcctttctattcgaaggatacaactacgtttggtgattccaaaatacatagtacgtctgttaagattgttggagagggatcgaagccgaggaggagagcgaaatccccaatgccgacccgtgtcatctctgaagtttttaaggaggccaaagctgccactaagaggttctctagcccacagcggcaaaggaaatctagttctccacattcaccacgttcacccgatgatagtccccggtttggctttccttcaatgagaacaccgggtaacttgaaagctaggagggcctcgtcctggccaaggaactatgacaatggagtggccaaggctgttgcattggatatacttgagagatggacaattgaccgctcacagttactcattggtcaaagatttgcatcaggggcatatagtcgtttgttccatggaatttacaaggagcagccagttgctgtcaaatttatcaggcagcctgatgaagaagaagatgcagaattggctgctaaacttgagaagcaattcactgctgaagtaaccattctggctcggctccatcatcgcaatgtcattaaggtaattacacgaattccaatttaaaattttgtctggtattctatttctttctttgaagaagcgcatgctacagggctacaacattgtgtaatctctgctgctctatctatttattcatagaactgttcataattagaatataattcatgtgatccataacatttacacttctgtacctttcttttggcaatatgacccttttaacatatacactcaatattttaccagagccaaaggacatatacgaggaatatgtctattgttatgcgattgtgattactaagtatatgagaggtatatgctatcaattttaaatcaattatctacctactgctttagctttcagctgaagcaatgttatcatatttatcaaatggctcaaatacatgacatactctggtggagacgctcaattttatatgtaaccttagaattattcagaataaaagaacccaaagcattttcattgtgttgtctagattgctcctgcagtttattaaccatgttgattctttaggtctcatgtaatatgctacaagaaagacatttttttaatccttttttttttgtttagctgattggggcatgtaatgctccaccggtcttttgtgtcatcactgagttcctgtgcggggggtctttgagagcttttttgcgcaagctccagcgccaaaagcttcctttggagaagatcatttgcattgctttggatattgcacatggtttggagtacattcactcgcaaagagtaatccatcgtgatgtgaaacctgagaacatcttgtttgatggagaatgttgtgcaaaggttgttgattttggagtggcttgtgaagaagtatactgcaactcattggaagatgacccaggtacttacagatggatggcaccagagatgtataagcgcaaaccatatggtcggaaggttgacgtctacagttttggcctcgtattgtgggaattgtttagtggctcgatcccttatgaagagatgactccattgcaggcagcttttgcagttgttaataagaacttaagaccagttgttccttcaagctgtccggcgcaacttcgacttttgatcgagcaatgttggtcttgtcaaccagagaagagacctgagttttcccaagtagttcagatcctcaaaaatctcaaggaggccctggatagagatggaacgcttgacaagatcccaagcaccaactgccaggaacctcctgatcagaacaagaagagactgtccaattggatccaaagactctcgtacagtcaggccgatttctccggacctccaccgccaaagttattgtaattatatgcattcctctcttccataaatatcgtagcatctgctagatgtctctgtaaatcataaggttcttcttggtgtataaactccgcacatttttttagtggacagttcattcttgtttggcttagtaattttgcctgcaacc

SEQ ID NO: 18007 - DNA, 2022 bp, Oryza sativa
  ref <308>: DATABASE ACCESSION NUMBER: AK068420
  ref <309>: DATABASE ENTRY DATE: 2001-12-06
ggccgtcatcgtctctgcggcgtgctcctaccatcgccatcctcctcttgctcccgccgcggcgcccaccaagcactcaggcaggatgggataccgtctgccacctgctgcctggcgccgccctcctttccgttttcctctgcatcctcttcctccgtgtgcggcaacagcggcgggcgtccacggcgacgccgtcgacgaggcggggaaacgctaggggggaagatctgcacgggctgcaccgctgcttcaaaggatcgtgatcgtttttctttatcagttcaagagctgtcagtgtaacttggcagctctcattcgcgtgcgtggtacctctctgcttttcttcttcgcttccagccttccacatcactgctcatctcgctattgttggtccatctttgttgttggttcatcgtgcatctttcatcgaagagtacaaatggcgcacgcgctcatttcacagctttaccctggggattcagacaaaaagattctcgcaagggtttctagactttggcattttcgtgatctgaatgatgatacaaacatcctgcatacagaccttgtcttacttgatgaagtgggcaatagcactcatgttcagatgtatcgaggcgcaattgaggttctgaaacctctcatccatgaagggaacgtctactacattgagtcgttcactgtcaaagatgcaaacagaacttatagaccagtttcaaatgacttcatgattttattcagtaaatggacaaccttagaagaatgcattgacatcccagctgatttccctgccataacattttcattgacacctttccaagaaatcccctctcttgttgataaaaacatattctatgttgatattatgggcgtcattactgagatcagttccacatctactgtgcgtccaaggtcaagggatgctgatagtttaaaaagaacattgcagatctgtgatgcaagcaactcaacactgcctgtcacactgtggggagatcgatcaactgcagaaaatatataaggatggccaaactaaaccccaggttgtcgtgtttgttggaacacttgtcagagattatgcagggataggcttaacaataactggtagctcaccatgcaaatggtatatcaatctggacatacctgacgtgctcgaattgaaagaaaggttcagtgtcaactttcagccaatcaaatgggttgaaaatgctgctcctgcattcaaccaagacactccagaggaaaaaaccattaaagaaattctaaaactaaatccgcacaaatataagatctattctactccatgattttttatatgcatttcatacttttgctttgttttgtataaccgacaattctctttctctacagcgagcatgttttattgtcaatgttactatcaagagcatacatgatgaaaactgctggtggtacaattcatgtgaccgatgctgcagaacttcaaagccatatggttctacctatagatgctctagctgttgttatataggaatgccagtgccaagatacaaagttgtgctcactgccacagacaatacttctgaagctgcatttgtcctcttcggacgaattgcacatcgcctaatacacagaccagtggagtctctaatcgaagaaaatccacctgactttatcctagctgagatccaagctcttgtagatcaagcctttgtatggaatgtcagcttcactaagcacacagttaaacggaatcaagaatccttacaggtcaatagcattgtatcatctggtgccccaaaacagcacttcctgcctatctcatcgtctgcttcaggaggcacctcaactatcgtaccactgagccctggcacttcactccaaacaccacccgcagcaagcgaaagcagtattgaataacagtcatcaaccagaggaaagcaaagtgcatctctacagccaagtctatcaacaccaacaaaatatgttgttagccctgcagcagatgacacaccaactagcaagtccaacccctcaggatccacc

SEQ ID NO: 18008 - DNA, 1942 bp, Oryza sativa
  ref <308>: DATABASE ACCESSION NUMBER: AK068421
  ref <309>: DATABASE ENTRY DATE: 2001-12-06
gcggtcccctttttctcctcctctccccttccaccgaaaccctagggatggcgtcgccggcgtctcggtgcgtcctgctggatccaggtgtgcccgacgtgttctccatcggtccaacggaacaagggtgggcgtctatcgacttgaagaagaagaggtaccaagggtgagggaggtacggccccttgttggcggagagcgtgaagctctatgcgcgcctcgccgaggagcacccgactctctctcggttggccgtctgcgccgacaagaatatcatccacttcatcgtggcggaagaactcaagaagaagcaagcttccaaggccgccgaatcttcaccccccggcctcatggtgccggatctggcgattcgcgccatcgagttcgacaagatcgacgagatctcaggtgtcactgcccgcgtcgaggtcgcagacaagaacctcatggtcctctccctgtccttcgtcttcacatctagcaagcactacctcctctatgatgccattcacgcatccatgtccatgatccccatcccgaattggtgctgcgatatctacttaccgtcgaaccctctccctgtgcggtacggtgatgagtacgccctagtcctctttgccaagaactatccctacaagagagaaggacgatccacctgcattgacttgctctacctgtggacgcctccaaagtcgtcgtcaccttcaacgtcgccaccaccgccaccaccgcctccgccgccgcgagagaagatgtacccgaatccctccggtgaaccgtggcacaccaggaaaccgcgcttctcgaaggagacgccagcgtccttctgccaccacgtcaagttcacatccagtagccatgctttctgggctgatctcaccaagggcgtcctgtgctgccgcatcaaggacctcttggacagcttcttcgtccattttgacttcattgagttgccccctgggtgcaagtctgacgcccttgatgactccgatactgggccagcggagatgttccgaaccatgggctgcagcactggggacttgatcaagtttgtctccatctccttcgatgattctgtgccggaggacgacaagacggtgacggagtggacactggacatgggtaccttgcagtggaccaagggcgaggagctgcgcttcggaactctgtgggaactggatgacttcaagaaggatggattaccggagaccgagccagtgtaccccctgctgagcatggaggaaggcgatggtggagacctttacttcatactgtccaggccaatcatgcggtgggaggaccctgcggtgcaccacgtctgccgattcaacatgacaagcaagaagcttgtgtccaaccctctttcctggcgcccagataagattgttccttctggtttgttgggctgtgaattcttcagacaccttgatagtcagcgccttgttcctgacaataggaagatggatgcgggcaaagtgcaatcctgggtcgagatggagtcagcattggaggaagttgatgaaagcatgcagagagagatatcacggaagcaaatggtgtggtccgggagccaggtagatttgttttgtgtcaagagcactgatgctgtaccaggagggatcacggatgctgcacaaggaggagtatcagacgggctacagggaaagctgataaagccaagggagtccaacaagactttgcgtccggccaggcaaatcaaggcaaatcctcgctattatggaccagaatgggccgtgtaatgtgagctgtagacagctgtgtggtgttgcgagtgagagaggaaagaaatgagtgggtaggtgagattcagatataaaccgatgtaaccaactgaagaaactaagaactggcaacttggaggcgatggcggcggtggctcaatcctgttggattggagcagagtaatcaaaattggttgcct

SEQ ID NO: 18009 - DNA, 1157 bp, Oryza sativa
  ref <308>: DATABASE ACCESSION NUMBER: AK068422
  ref <309>: DATABASE ENTRY DATE: 2001-12-06
ggaaatctcctctcgccctatcggttccgcttctcctctcccctcgccatgtcgcttgccgtggccactcccgcctccgcccgcctctccccgctcaccacctcctcccccgaaccctgccgccgccgccgcctcctcctctccgcagccgcccctctccggcgcacccgtctccggcgccgcatcgccgtcgtcgcgtccgtccccgaccccgcggcgcggccggcggagtacacgccctggctcatcgccggcctcggcaaccccggcagcaagtaccacggcacgcgtcacaacgtggggtttgagatggtcgatcgcatcgcgcgagacgaggggatcaccatgaacacgatccagtccaagtcgctgctcggaataggttcgattggggaagtgcctgtcttgttggtaaagccacaatcatatatcaactacagtggggaggcaattggacctcttgctgcctattatcaagtaccattgcggcatatccttgtgatgtatgatgagatgagtctacccaatggtgtattgcgtcttcaacggaaaggtggtcatggtcgccataatggcctgcagaacgtaatggaatgtttggacagttcccgtgaacttcctcgtttatctataggcattggtagcccacccggcaaaatggacacgcgtgcttttcttctgcagaagttcagttcagaggaacggctgcagattgacactgctttggagcaaggggtggatgctgtgagaactcttgtgttgaagggttttagtggaagtattgagagattcaatctggttcagaagtacaagttccacagtgtttgagaattattaagaggcttggatatacttgctgaggacgcataaatacgcatcatcaatatcattggaagtgtcggacgtggtactttgcacaatctacgtaagtgcactaagttgcttctgcagtatcctataattttgaggatgctaagaaacttgcagggtgtatataggtagagtacttttgcattctttccttagagcaattttcattagagaggtagttgtgacctctaattttgttcatatgtaagctacttattaagtataagaggtagcatatacaatacaccacctctacactagctttattacactaaccccaataatct

SEQ ID NO: 18010 - DNA, 1081 bp, Oryza sativa
  ref <308>: DATABASE ACCESSION NUMBER: AK068423
  ref <309>: DATABASE ENTRY DATE: 2001-12-06
ggcgcgcacacgcccccgccatggctctccccaccacctcccccctcgccgcggccgcagcgaggccctgcgcgttcccgacgccgtggagatgtcgctcgccccctcttcgccgcctcccgcacgtctcctgccaggcgaaccgagggggttctcgggacggcaattcgttgagcacctcggcggcggcggcggcggcggcgtcgccgccgccgaggtggcgtgccgcggtgtccgcggcgctcgcggcggcgattgtgtccgcggcgccggcctacgcggatcttaacaagttcgaggcggagcagcgtggggagttcggcattggctccgctgcgcagtttgggtcggccgacctcaagaaggccgtccatgttaatgagaacttcaggcgggcaaacttcactgctgctgatatgagggagtcaaatttcagtggttccacattcaatggtgcctatcttgaaaaggctgttgcttatagagcaaattttactggtgcagatttgagtgataccttgatggatcgcatggtgctcaatgaagctaaccttacaaatgctgtgcttgtacggtcagtccttacgcgtagcgatcttggtggagcaatcattgaaggtgcagacttcagtgatgctgttattgacctgacacagaaacaggctttgtgcaaatatgcaaatggaacaaaccctttaacaggggtcagcacacggaaaagccttggatgcggcaacagtcgccgaaatgcatatgggagcccttcctcccctcttttgagtgctccaccacccaaacttctggaccgtgatggtttctgcgatgaagcaactggtatgtgtgacgcaaaataaaagaagaattatccagcatactgcagaaattgagcactgaatgctgtatatacattggagactgaacaaaagacaaagcagatcggttcaggattcagagaaattgttctcgttttgcgaatgttgtagcattgcagagagatcaggtaaactaggactgtagacaagttatgtgtactgaacgactgatgccgtatatatatgtatatcaaagtgttgccgaattc

SEQ ID NO: 18011 - DNA, 1225 bp, Oryza sativa
  ref <308>: DATABASE ACCESSION NUMBER: AK068424
  ref <309>: DATABASE ENTRY DATE: 2001-12-06
gaaccgcaacccaacccaacccaacctgcgccgtgccggccggcgagaggcttctcccgcggccgcaccgccgtggcgctgtccgatcccctgtcccagcaccctcgtcgcatgtccaggtcagggggcgcagcaacccatctccggtaaacgccatggggttcctcgaggactttcaagccagtgttgaagcattgccagctatgctgcaaaggaactattcattaatgcgggagctagataaaagcttgcaaggtgtgcaaacgggaaatgagcagcgctgtcagcaagaaatagaagacattaagcatggacttgaatctggaagtattacatatgacccggcaaagcttaaattttctgatgaagcaatcgaggagcagaagcattgtgttcgaattgctgatgagaaggtggctttagccagtcagacttatgacctggttgatgctcatatccaacagctagatcagtttatgagaaaacttgaagaacttcgacaagaaaaggaggcagctacaactgctgctgctgctgctgctgcggcggctgctagtgttgctacaggtacgcctgttgctgctactgtaacagctagcgctggtacttcaactgctgacaatactccaaaaggtggaaggtctagcgaaagaggccgagggggtcgaaagaagactgctaaggtgcccactgagcaaccagcaccagccatagatttagaactgcctgtggatcctaacgaaccaacatattgcctctgcaaccaagtcagctacggagagatggtcgcatgcgacaataatgattgcaagatcgaatggtatcactttgggtgcgtcggcgtgaaagagcatccgaaggggaagtggtattgcccaagttgcattggattccaaaagaagcgaaaaggaaagtgaaatgtgatcaacccttgataggaggtagcttcttgatgataagtggtgatggacgtgggtaacaaaaacatagtagctggtactgtgaaatactgttgtagcttcagtgatgatgtacatgttacccctgtgttaccgaggaaatgctgtaggcgtcttagagttagggaccagtcaatcatgaagagcagttgtgcctgtattggtgtatcttcattgcctttttttggtggatgtgtaggttgtaattgtaatctatccctcccatgtgggcttgatgcaatctacacataaatctgtttataact

SEQ ID NO: 18012 - DNA, 1961 bp, Oryza sativa
  ref <308>: DATABASE ACCESSION NUMBER: AK068425
  ref <309>: DATABASE ENTRY DATE: 2001-12-06
gcttgattgttcaacaacattcaacgaagcttggtctcttcgggttgatttgctaacgaaacttggtgaaaaacatgcattacatgattttgtgagcacgttgtcgatgagatgctcatatttacttgtgaacaaggaatatgtcaaagagatcctttctgaaactcctgaccaaaaatctactgggaatacaaaacttatgtcatcatgcatggatcttttaacggcagtatctagtttcttcccttcacttttgtctggacttgaagatatcattgagctcctgaaggaggataatgaactacttaaagagggtattgctcatgtttctgtcgaaggctggtggcaacattcgtgaacaactagcttcatcaagttccattactcttctactagagcggctatgtttggaaggaacacggaagcaggcaaaatactctgttcatgctttggctgctataacaaaagatgatggcctgatgtctctatctgttctttacaagaggcttgtggacttgttggaggaaaagaaagtgcatttgccatccatcttacaatccttggggtgtatagctcagatagcaatgccaatttttgaaacaaggggagaagagataataaattttataactaaaaaaattcttgactgcaatgatgattcgggcgacgtttctgctcataaatctgaatggagtgatagtactcaaagttgtttattgaagatttatggcattaaaactttggtgaagagctgtcaaccttgcaaagatgctcaagcacatccgggaattgaaaaattaatgggcatccttaagaatatccttacatatggtgatatttctgcaaatatgatttcaagcactattgataaggcccatttgaggctggcggcagcaaaagctgttctccgcttatcaagacaatgggaccacaaagtgcctgttgatgtattctatttgactctcaggatttcacaggatgatgttcctcaggtgaggaaattatttcttagtaaagtacatcaatatattaaggaaagggccttggatgcaaaatatgcttgtgctttcttgttagctatggatgattatcatgccccacagtatgaagagtttaagcacaacataattgaggttgcgcagatatgccagcaagttaagatgcgccaactttctgtccaagcggaaacaaatgtgctcactgcttatccagaatatatgatttcctatttggttcatgccctctctcatgatccatcatgtcctaacattgaagagcatgaggatgttgaagcatttggtccaatttactggcgattgcatctgcttcttttgatcctcctgggggaagagggtttgcagcacagtgtaccaggcatgaaaaaggagagcttcacaacaatagtatctatatttaaaagtatcaaatattcccaagatgtggttgatgttaacaagaccaagacactgcatgctatttgtgatcttggtatccttattggaaagaaattatgtcaagagcagataaatatatcagaagctcaaacagtttcactgcccagtcaactttatgcgccagttcagaaggatcagaatgaaaattctgtggagagtgatgagcagatatggccgggttgcgagaatgtgttggcccattttgaggctcttatgacagcaaagtctgctgaggttgaatctcccaaggataagatgcttatagatgagactgatgaatttggtaatgaagttcctctaggaaaaattgtgaaaattttaaaatctcaaggagcaaaaaaggctgggagaaagcagaagacaaaatctggttcaataaacatggaaaaagatgatgatgtcttgggactggttagagaaataaacttggacaatcaagaaaatttgggggaatcagaaaagagcaaaccaaagaaaaagcggatggatgcaaaagagagtaatgac

SEQ ID NO: 18013 - DNA, 1565 bp, Oryza sativa
  ref <308>: DATABASE ACCESSION NUMBER: AK068426
  ref <309>: DATABASE ENTRY DATE: 2001-12-06
ggctgaaagctcctcccaccagtttcctctcctcgctgggcccgggtggatggcgccggcgacctttccgacggtctccgccgccgatttcggcggctctgatgaccaatcccgcttacttcgaggtgggaagatacttgggtggctacggtttcatgaacatcacaagttatccatcttctcaatttggagggcttccagatgttgctggtattcaaaacctcggtcttggatattcaccggaagagattgagcgattgagagctcaagatgttggagaaggagaagttaatattagactttatgagggaagagtggttcaaggtccactgaagggcacagaagctctatttaaggtatatcctgggtcccgttctggtgcttctgaagctgacttgatggcagttaatgagctaagaactcatgcttttcttcagaatgatgctagtgacatctgcgagaacattcagtttctgttaggagcctttgagacggctactggagagcagtggcttgccttccgtgatgacgggagatatagtgctgcagactatgcaaaattaaccagtgaaagaaaactgaaggagcaatctggatccatatcgttctggaatccttacgatcgagcatacaaattggaactaaagcgatactttgttcttaagctgctttatggagctatgtgtggccttgttcacatgcataatcatgatagactgcaccaaagccttggtccctcttctgttgttctcaatactgtagcagagaaaaatgggcgctatttggttccgcatctccgtgatttagctttctctgtagatattgggtattcgtctgttggttctggagcattgtcggatggactgtggcgtcgagcatctgctgctggagcatcaactcctctggagaagcgagcttttggaatagctgacgacatatatggagctgggctacttcttgcatacatgtcatttattcccttttgcgagcaggaactatggatggcatttcattgcagagacttttggagaatacgttccgtctcgacatttatgctgcaagagagtactttctggcagatgaccggttgtccgaagctgtagattttctagacttgggtgatggtgccggctgggagttgttgcaggcaatgctaaatccggactatcgtaagcgtccaattgctgaagctgtactgaaccataggtttttgactggggctgtcttatggaactaatcagcaacaagattccacaaggtcccggcgaaaaaaaaaaacaagattccacaagcaaattcatgatgtaccgtacattcaaatgtttgcattgtatggaaaaaatttgtacgaaatgtccaagcatttcatgaaatcagatgcttctgtgtgcttaaactaccgggagcgatgtatatagtcaatgaatcgtgtgtgagaatagcaacatgatcgatttcttttgcggggttattcttgattatgttctctgactccctttttattttcagatttgtttatatgaacagtttatactctgtaacggcagctttgagagtttgagact

SEQ ID NO: 18014 - DNA, 1406 bp, Oryza sativa
  ref <308>: DATABASE ACCESSION NUMBER: AK068427
  ref <309>: DATABASE ENTRY DATE: 2001-12-06
gatttcctttccagtggtttcgcgatggcgagcacgccggagccggagacgacggtgggaggctacgagctgcgggagcggctgggcggccggccgccgtccacggtggtgtggcgcgccgtggagcggtcgagcggatcccccgtggtggtgaagcaggtgcggctgactggcctccccagcaccctccgcgacagcctcgactgcgaggtccgcttcctcgccgccgtcacccaccccaacatcatccgcctcctcgacctcatccagaccgagagcaacctgtaccttgtcctggagctgtgcgagggaggagacctggcggcctacatccagcgcaacgggagggtagaggagcgcgtcgccagcaatttcatgagacagatcggtaattcacctagtaatatttgccatatcaatttcatttctagccctagtagcatctcttttctcttgttgccccccaatctatcacattacccgcaaccttagttagttgtgttacaaatttttttttttttggatcaaagggccttagtcctccatttccattaagagaaatgtcacagtttacagtagagttgtgttacaattacaacaagaagataatcatgtgtaagaaattatgcttgcccaacaccttgtggtaggagctggcttgcaagtgctccgcagacaccatatcgtccatagggacttaaaacccgaggtccacaaatctctctcttttcatctcttaattacttgtgttattaagctctaactgatttgagacaccattgttgactgataaaactgttgtatgccgcagaatatcctgctctcttctcctgacagcaatgcgatcctcaagatatctgattttggcctgtcaagagttcttcgtcccggggaatacacagatacaaattgtggcacttgtttgtacatggccccagaagttatgctgtttcagaagtatgatggtggggtagatttgtggagtatcgccgcgattctcttcgagctcttgaatggctatccaccattccgtggtagaagcaatgtccagctgcttcaatgcataaaccgaaccgtgtctcttccattctcagaagtcgttatttccaagctacgtcctgattctattgatatatgcaccagacttctgtgtagcaatccagtgaaaaggttgtccttccaagagttcttcagccacagcttcctcagaccatagacgccttactgaagagcctatgcaagcttagcaatatcatctgaagttcaggattagttgaattgtttgtttgttgtacttggacatatgcaggtacctctttgtgttcaaaaccttgttttcctgtagtcttctctgtagcctgtagactttttacacgaaaaatgtgaatataagttgggagttctgt

SEQ ID NO: 18015 - DNA, 3085 bp, Oryza sativa
  ref <308>: DATABASE ACCESSION NUMBER: AK068428
  ref <309>: DATABASE ENTRY DATE: 2001-12-06
gagctcaacctctcccgatctctttctcttcctattcttttatgttaccaaattagaagcaagaaaagctataattttagtattaaggtgaccataattttaaatgtacatatctaatttctattctatctaaattgttcctgtatttataattaaattgacaattttagatccaatgttttgctatacataagtaatatgtcattgtggtcttcttaacgtctggtattctcggaggcattcggatgggcgatttctggtgatcttcaatggtgactccggcaccgccgggagggtggaatttctctcccggggatgcaacctgcgatgaagcttggcattgtttccgaccgccggttcatttctcctctaagttcagctcggttcctttccggttagtggtggatctacctcgctcaaattttcgtttaacaacttcttcggtggccttagccctcagggctgtgattggtggttcgcctgctgatctctctgtttcccttctcaaagatcgttctttctcttttttttgtctgctccaaacaagtgggtttatggatttatcgtttgagatcttatacttgcaatgattttgttctgcgcttctttctttggagaaatggtggaccaaattggtagtgggaacttgatgtttagagtcgtgaacaagagaaagaatgggtttttgtggctcctaagaaacgtgtttctgattctttgaggcaacctggtcgttcttatgctcaagctactcagcagcgggttattcctatgaagagtgtttttgatagattaaaggagtccttgaaggtgactggcggtgatactccggcaatcactgttccggtgaccaaagttccggagactaagctggtggctaatcccaaaattcaaaatgttagaggtaatcgggatcaactttctaagcaagttttaaattctaatttaatttgtgggcgttgctcagagaagggtcattctttgtctgtttgtgttgggccctttcggtgccgaatttgtaagagttcgggtcatgctgcccgtttctgtagctcaaagcaatctccctctgagggtaaattgccaaagtctgtttctaccccccgcattaatgcagttgctacggtcctaaactcccggggtaattgcaatcttgtttggagacctaaaaagcttgcgccggttatctcgtagccttctcgccttctccaatctactgttgagaatattgttcaagcctccccagcccaaagttccatgccaatggcagacctcaaccctaaccctcatcgtttccgccatcaaggtcacattgtgcatttgggaggaaatttgcgtgtccctagagttgatctcaccatccctcaaaggcctgttcgagttttgtgttgctttggtggagccgccggtgtcggagcaagattgggatcaccaccgcatgctaattcttcatcacattcttgatgagcgtctttttgaggtcagaaatagctaccgtcatgcttctgcggtgggtatgtatcaactccattctgctatgcatagagatgccctggtccatagtgggccgtttgtttatgatggagtgcattcggtaacttttgtgaagcatgatcaaggcccaaattggagagcatctcaatgccatagagagggttggttccttttcttggattaccaccttgactttattgattgggaccatctaaaccttgctacggctacatttggccaactttctttttggcttgaaagggatcagatcaaggggagagttctgataagggctaagttaaaggataatgattttgtgcctccaaaaattgtttttgcatgatccggtgggtatgggcggaggaggagaatcatggacagtttccgtgtttttgttggaaggggatttcattaacatggctcctgatgaagatctgccccctgcgggcccccaaccaaatcctaatggtctagatgatgatgatgatcctaatgtgggcaacatttggcagatggggcagcctcctgttggtccaggtgactgggatgatttggtccaacagcagcaagctgcagaggctgaggtagaggatgcttggggctaagactatccaatgggccaagtaatggaggtaaatcctgatggtctgcttgctttggtacctattgtttcagaggatgctagcccttctgttcctgctgttgctatgcctaatagggggaaaaaggttcaggacccagtccaagacccgaagatccaggaattcttagctaacttggataaactgactagaagtgaatatcctagacacccttatttttatccaatgtctggcctgaatgagaagattgacctcttgtgcaaagaaaagggaaccatgcaccaatttcttgcttctagttctgttcctgctgccatagatgtggtcaatccttttactgctcttgttttgcccaaaaagacaatgtttgatttttctcccttagtgggtcaagagacaagtgtttgggctccggattcaacaaagtctgatgttggccccctggaggcctagacccaagctgctatggaagtacttgatgtcatgcccttgtctattcagcctcccttcagcccagtttgtgaagcaccagctcttcctgtgttacctaaggctccaattaagaaaagagatgtcaaaactttgctttataacccttacaggaggcagagtgcaaggttgcagcagaataaggaggaagcagaactgcaagtggatcccagaatggacattggcaagccaaggggtaaatctgcaaagaaattgaaagagcttgcaggcttgcagatgggagtggacatgtgcggcttaactcctgaggaggaagttgaatccagcatggggagtgagagaagaaagaagatgcccaggcctgacatggaggaaaaatgattttagttttcagatgtgttttagtagacctgtacttcccttttaattatcatgtaagggtctgtatttggaacttcccttttaattatcatgtaagggtctgtatttggacaagagcttttcagactttgtcatattttggttcagttgtatgcact

SEQ ID NO: 18016 - DNA, 2991 bp, Oryza sativa
  ref <308>: DATABASE ACCESSION NUMBER: AK068429
  ref <309>: DATABASE ENTRY DATE: 2001-12-06
ggcctttgcttgcttgctgctatccccttctctttctgttgtgggcttgctgttctccatgtcctcctgttgatggttgcttgtgttcgagtttttttctttttttttctttttttttcttggagaggatgtggttgtgttcatgataggttggtggtctgtgatctgtttgggtagatcttttgtcctctttttcagatatttcgtggatgctagagctgcctgcggtagccaattcctgtttggctacttcttcgttgccctttattcccttccaattttattccgtgattttctgttcttgtgcgtagaattgtttctgccaagcttgagtaaatccatggcagaggtcaaagcttagcttttttcagattatacgatttgctgccagccaaaggagaaagggaaaaaaacttagaaattttctactagttttctcttgttgtgttcattagatctcagagattaacctaatttaaggaatacatgttgtaaatcctgctctgggaatgttaagtggttgggtgtaaggaagcatcttgttttgcatcgagtttatggccaaaaacaatcattgatgcttcctctaaggcggtgtatgttttcctctgttctccatttgatgtgttcttgatccattttcgtctcttgttttcttctgttcttttagatggcctccgattccttttgataagcacatgggtacatgttcttgtttccaacagtccatgccggtcgtggtagaccgaaaaaataatccataaaaatatatcctttttctgaaatgtttttcccgtgcttttctattcctttttcatctcccactttgatctgatcaaggcttgttgtttcatgtgtttcaaaatacttcacggaaaggataagaaaaggagaaatttcacatgtttaagtttcttttgatccctacttgtttcaaagcagcatgaaaataccgtttcagctaatcccgtgcatcgcaaaatgttttcatgcttcggctttgactaattcttccgttagtactttatttatgatcatgtctgaatcatgatacctttatgctgtgtagtatgattatgtcacaacaaaagataaccatgtcctatatgactgttaattgcgtgctcttaactctgtgagaggattgcaggagatatgtctgatcagataaagatctctctgtttcaccaaacacatgcaaaattaggctctggcccttgcttcaataggcaaacctaattttactcgcgcgataatctcctggtctcctggctttctagatcttagaatgttttctgaagggaaacaaaccagtactgcctctttatttttggtaatggcgtaattgccgcattaggatgctgcggtaaccgtagtcgtgttgcgcatgtattctcagttaaggaggtagtagtaacacttattgcgtttagacgaagtaatcagttgcttaaacttggttttgatttctgtaattaacatcagcttcttctcttgcttgtgtgcaggtgaattactacttgagtagaagtggtacaagaagagtcgtcgtctacctgtgggcgaattatttcgaggttgtgcgttgcgatgatgggaggtggtctggtgatggaccagggcatgatgttccccggcgtgcacaacttcgtggatctcctgcagcagaacggcggcgacaagaacctcggcttcggcgcgctcgtgccgcagacgtcgtcgggggagcagtgcgtgatgggggagggcgacctcgtggacccgccgccggagagcttcccggacgccggtgaggacgacagcgacgacgacgtggaggacatcgaggagctggagcgccgcatgtggcgcgaccgcatgaagctgaagcggctcaaggagctgcagctgagccggggcaaggaccccgcgggcggcgtcgtgggcgacccgtccaagccgcggcagtcgcaggagcaggcgcggcggaagaagatgtcgcgcgcgcaggacggcatcctcaagtacatgctcaagatgatggaggtgtgccgcgcgcaggggttcgtgtacgggatcatcccggagaagggcaagccggtgagcggcgcctccgacaacctccgcggctggtggaaggagaaggtccgcttcgaccgcaacggccccgccgccatcgccaagtaccaggccgacaacgccgtcccgggcttcgagagcgagctcgcctccggcaccgggagcccgcactcgctgcaggagctgcaggacaccaccctcgggtcgctgctctcggcgctcatgcagcactgcgaccctccgcagcggcggtacccgctcgagaagggcgtccctccgccgtggtggcccaccggcgacgaggagtggtggccggagctcggcatccccaaggaccagggcccgcctccgtacaagaagccccatgacctcaagaaggcctggaaggtcagcgtgctcaccgctgtcatcaagcacatgtcgccggacatcgagaagatccgccggctggtccggcagtccaagtgcctccaggacaagatgaccgccaaggagatctccacctggctggccgtcgtcaagcaggaagaggagctgtacctgaagctgaaccccggtgcccgccctccggcacctaccggcggcatcaccagcgccatatcgttcaacgccagctcaagtgagtacgacgtcgacgtcgtcgacgactgcaagggcgacgaggccggcaaccagaaggctgttgttgtcgccgacccgaccgcgttcaacctcggcgcggctatgctgaacgacaagttcctcatgccggcgtccatgaaggaggaggccaccgatgtcgagttcatccagaagaggagcgcgtctggcgcggagcctgagctgatgctgaacaaccgtgtctacacctgccacaatgtccagtgcccgcatagcgactatggatacgggttccttgaccggaacgcgcgcaacagccaccaatacacttgc

SEQ ID NO: 18017 - DNA, 1393 bp, Oryza sativa
  ref <308>: DATABASE ACCESSION NUMBER: AK068430
  ref <309>: DATABASE ENTRY DATE: 2001-12-06
ggtgaggtgaggtgagttgagttggggattgattgattgattcggattgggaagaagaagaagcaggggagcatgggcagcaagtcgtacccgacggtgagcgatgagtacctggcggccgtgggcaaggcgaagcgcaagctccgcggcctcatcgccgagaagaactgcgccccactcatgctccgcctcgcgtggcactctgctggcaccttcgatgtgtcgtcgaggaccggcgggcccttcggcaccgtgaagaaccccggcgagcagtcccacgccgccaacgccggcctcgacatcgccgtcaggcttctcgaccccatcaaggaccaacttcccatcctctcctacgccgacttctaccagcttgctggcgttgtggccgtcgaggtcaccggcggacctgaggtccccttccatccgggcaggcaggacaagcctgagcctcctcctgaaggccgtcttcctgatgccacacaaggttctgaccacctaaggcaggtcttttctgcgcagatgggtttgagtgacaaggacatagttgctctttctggtggtcacaccctgggaagatgccacaaggagagatctggctttgagggagcctggacgtccatccctttgatctttgacaactcttacttcaccgagcttgtgagtggcgagaaggaaggccttcttcagctgccaagtgacaaagccctcatggctgacccagccttccgtccactggtggagaaatatgctgcggatgaggacgccttctttgcggattacgccgaggcccacctcaagctctctgaactgggatttgctgaggaataagaagcctttagagagcgggatatccgcaaaagattaatgccgatttgtattttgcgccttagagtcagtacgatcaagactgtcgtggcggttgtaataaaaattagtgtgctttgggccatctttttatgtgattccaattgtctttctcttcattcttgctttgatgctctttgtctggacctctagaccgccgtattgtactgtggagtttcaaagttaccaagctatttgctgtcaagataactatggattgaattccccttgatggatgaaccaactgttgttgtttgcccgttcttcagctttcgtttgtgcggccatcgatcgccatgcgttgcttaaacccatttctagctcccctaccctgctgcatccgccctcttctgcgcgatcgttggattgcgagtggttggctggttgcacgacttgtggagaccgaaacaaataatttttggtcaaattgatcggtggtactgtcggagcatctattttttctttagcttagatcgtataattgtaggattgggatttgtatattaatatatacaggtcgattaaaact

SEQ ID NO: 18018 - DNA, 1443 bp, Oryza sativa
  ref <308>: DATABASE ACCESSION NUMBER: AK068431
  ref <309>: DATABASE ENTRY DATE: 2001-12-06
ggttttgaacaaaatgagggaataattgtgatggctgcgacaaacttgccagatattcttgatccagcacttacaagacctggtagattcgataggcatattgttgtccccaatcctgatgtgcggggacgccaagaaattctcgagctctatttgcaagataagccagtatccagtgatgtggatgttaatgcgattgcccgcagtactcctggcttcaatggagctgaccttgcaaacctagtaaacattgcagcaattaaggctgcagttgaaggtgctgacaagttggctgctgcacagttggaatttgcgaaagatcgtattatcatgggaactgagaggaaatcaatgttcatatctgacgaatccaaaaagcttacggcctaccatgaaagtgggcatgctattgttgcactcaacacccagggtgcccaccccattcacaaggctactatcctgcctcgtggctctgcccttggaatggtcacacagcttccttcacaggatgagacttctattagcaaaaacagctgctggcacgtcttgatgtttgcatgggtggcagggttgcagaggagctcatttttggggaagacaatgttacaactggggcaagaaatgatcttcatactgcaacagagcttgctcagtacatggtatcaaattgtgggatgagtgatgctattggtcctgtgcatgtgaaagaacggccaagtgttgagatgcaatcaaggatagatgctgaggtcgtcaaactcttaagagaagcttatgggcgggtcaagcgtttattgaagaagcatgagaagcaattacacgctttagcaaacgccctgctggagcgtgaaacactcaccgcagatgagataaacaaagtggttcatccctaccaagaagagccgcagctttctttccaagaagaggattttgcgctaactcaaaggaggacctttttgttgcatcaaggcagtagacccagctgtaaatccatgtacagtagtaattggcgccttagatagcacaaagcctcttttcatttctcccatcttgcaaatcggggtgcatcacatggagttttgcaccacgcaaactggcaggaagttttaaaagatgggaagaccggttttgcaaggtgttgcacgccgaccgattattactgtggcgaggctcattgtggcgcccatctttgcccagcagcaatgctcctgggttgagaagttcatactcagcttagttaggaaaaaaggtgaaagtgtaatttttttgggaacttgtaacattgcatgtttggcgttgtagaattgtgtttgtgatatatatatttgcatatttgcaaatcacatttttcttagactctttctacccaattaattttgtaattaaaacgtgcatacaacagatggtgaattggtgatacccggatctcagatgaatccttcg

SEQ ID NO: 18019 - DNA, 1849 bp, Oryza sativa
  ref <308>: DATABASE ACCESSION NUMBER: AK068432
  ref <309>: DATABASE ENTRY DATE: 2001-12-06
ggtagccacgcacgcgaggccgcccgcgagccacatatcgcgtcgcgccgcgccgtgcacatcccccccaaccccaccccaatcaggcacaatcacggcgcgccgtggccgaggcatcatccaatcaaggcgaggccacctcgacctcgtcctcgtgccgtccgcccccttcggcgagcgcgagcgcgcgcgcgagggtgagagggagggagggagcaatgccgctggcgctggcgcagctgcaggacatcggggaccgcatcaccgaccgcctccgcccgtggagccgctccgcggagttctgggtccgcgctgccgacatctacaccagctacaaggtgtgccagctgcgcgcggggttcgtcaaggatgaggaggagcgggaggccatgtgggagcagcagcacgagcttggtgcccagaagatgtactccctctgctccgagctcggcggcctcttcctcaaggctgcacaaattctgggaaagcccgatttggcgccaatggcttgggtgaaaaggcttgtaaccttgtgtgacaatgctccagccacgcccattgatgtagttagagatgttgtggagaaacagtttggcaagagctttgatgacatatttgaatgctttgatgttgagcctgttgggtctgcttccattgcacaggtgcaccgagcaaggcttaaactatcaaaaacagatgttgctgtcaaggttcaacatccaggagctgaaaaactgatgatggttgacatccggaacatgcaagcatttgcattgttcttgcagaagtatgatatcaattttgacctgtactctgcgacaaaggagatggaaaagcagatatgctatgagtttgactttgtgcgcgaagcaaaggcgatggaaagaatacgagaattcttacgcgtgaccaacaagaaaaagcctccagttatagtgcctcgtgtgattcctgaaatggttagcagggaggttttggtaatggagttcattgaagggacaccaataatgaatcttggcaatgaaatggctaaaaggggcattgatcctggtggtaagattgcaacaatggcaaagcagaaaattttaacagatcttacacttgcctatggtcaaatgattttgaaggatggttttttccatgcagatccacacccaggaaacatccttatctgcaagaacacagaggtagctttgcttgattatggacaagtgaaagcaatgccagaggatttacgacttgcttatgcaaatcttgtaattgcaatggctgatgatgattttttgaggactaaagaaagtttcagggagattggtattgaaacatggagtatagctgataatgagctagaagaattatttcaattatcccttagaatgtttgatactagattaccaccaggagtaactgctatgtcacccttcgccgaggattcttcactaaataaagttggagtgcagagcttccctgaagagctattttcagtgcttcgaactatacaacttttacgtgggttgactgttgggatgggcctcagattctcatgtgctcagcaatggaagcctattgccgaggaagctttgttgaagtctgggagactaaaagctgcaagatcaagaaggccgcggagaagttttgtcaggagactgttttcgagtgacaacgagaaccaaggaacatgatattacaattgtttcatataacaaatatcatgtattttgaagtgacattaataacaggctcaagcccaattttttatgatgcatatatgcatataagactacacatatttcctttgtgccatatggttttgacacgataatacttttatattttggaaggtagactc

SEQ ID NO: 18020 - DNA, 1064 bp, Oryza sativa
  ref <308>: DATABASE ACCESSION NUMBER: AK068433
  ref <309>: DATABASE ENTRY DATE: 2001-12-06
tgccggcagcaagtgagcgcggggagagagacagaagccggcggcggcggggcgagatggggaagaagcagaagaagcccaggaaggggaaggagaagacggagcggaagacggagcggaagacggcttcggcgtcaacacctacaccttcgtcacccgcgacgccaaggccaggtacgtcaagttccactggaagcccacctgcggcgtcagctgcttgatggacgacgaggccacgctcgtcggcggcaagaaccacagccacgccacccaggacctctacgactccatcgccgccggcaacttccccgagtggaagctgttcgtccaggtgatcgacccggaggaggaggagaggttcgacttcgacccgctggatgacaccaagacatggccggaggacgaggtgccgctccggcccgtggggcgcctcgttctcaaccgcaacgtcgacaacttcttcaacgagaacgagcagctggcgttcgggccggggctggtggtgccggggatctactactccgacgacaagatgctgcagtgcagggtgttcgcgtacgccgacacgcagcgctacaggctggggccaaactacctgatgctgccggtgaacgcgcccaagtgcgcccaccacaacaaccactacgacggcgccatgaacttcatgcaccaaggtctcccctgagctccgcgccatctgggtcaactacctctcccagtgtgatgagtcgttgggggtgaagattgcgaataggctcaacgtgaagccaagcatgtgaagaaactaaggcacaagaatgcatcatctcttgttaattaattggagtactaccaaccaaataaggccagacaatgtcagatgcacgcatcttctgttgtcattgggccatcttttgtatgcatcctattgttaattactagtacatgatatccaagtgatcatcagcaaggctacagaaattctgtaatacgataaattaaaagaaaccaaaatggagcctgcatatgtgtaacttaattaatgtactggcgtattaatgccactgctgcatgttgtaatactc

SEQ ID NO: 18021 - DNA, 1412 bp, Oryza sativa
  ref <308>: DATABASE ACCESSION NUMBER: AK068434
  ref <309>: DATABASE ENTRY DATE: 2001-12-06
gaggagtggaacaagaggaagaggaaggaaggaagctagggttagctagctgtgcatggaggagcctggccctgaggaagagaaggaggaggaggaggcgcgcttcgacttcctcgagtggatcggcccggacacctccgccgccgttttcaccttcctagaccaccccgctgatctcgcccgcgcctccgccgtctcccgttcctggcgccgattcgttgttcggaatggcttcagcaagatccaatgcctgcgcctttgccctgaagcttcaaacttcacccgtattattaccaaacaagccattgcctctgcttctgagtcggatgcggagcaccagcacagggcgtacatgcatctcagctatgcccttctcttggatgacccccaggactgcatcatccgctgcatcggtgcctccaccaccgacaatatccctgaggagaccatacaaaacacccttgtgcccaccgattgggtggccatgatgaggccctcttattggtccagcgccggccacttcgatcctgctgtgcccgaatgcctcttttacaggcttcgctccgatctatgcctcgttcaacaaatcaacatacagccattcagagctttcttccagtatggtgatccaatatactccgcaaaatatgtccgcttccagatgggttacccaaagacacctctaccatctcaattacttgtatctcatgataatgaaggccagttggctgctgatgacaactatatctggacgtacacatctccacaatttccaatgctgcaggaaagtgtccttcagtcttttaagcttccacgcgcagttctatgcatcggtggagttgtgaagattgagtttcttggtagggttcagaaacaggaaatggatgatctatattacatatgtggggattccactgccgcgggaactaggagtagatccttacaagaacggtgtggtcctcaagtactatccagatactcgcagatctggcgtgtgccatggtgagtcatcaggggatgatggtcgcaacagcccctctaagtggcgcaactttaccacaagaatcttgcactcaagctcagctcgacgattaggatggaaccaggccatcttgaacaggctgtttggcgcgcatgatgcatctgaggaagaggaggaagagacttaagaggatatatatggaaattcattttgtcccatgtgatgtatgctcactgtgtttttaagatccttttctcctttttttaacaagatgagaatgcactggtgccttgtatgtaagagatgctgtgagtgcatccttgttgaatgctactataatacatgctgtatacatgaacaaggattaatgagcggagcatagaatggagaagatgctgctactctactgcagttctgttgcatatggttt

SEQ ID NO: 18022 - DNA, 2751 bp, Oryza sativa
  ref <308>: DATABASE ACCESSION NUMBER: AK068435
  ref <309>: DATABASE ENTRY DATE: 2001-12-06
gaatccccattttcatttctcctcttctctctgatctctcccccgatctaatctcccggcgagcgagcgagtggaatcggcggcgatcttggcggtgacggcgttccggcgaggtggagcacgcgtgcgacgacgagcaccgagcggcttccatttgcgccggctggggggagcacgcacgagggcggcggcaagccgtgccgggtgtcggcggtccggcgaggcgggcgcacaagcggcggcgagcaccgatgcggcccggacctcgtcggcgggggggcggagcccgaaggcagccgccaagccgacgcttcccgtccccggcgagggaaagtgaggaggtgaagtggcggcgatgccgcttcccggagaaattccggtgggtttagaggcttcgaaaccctaattaatcaataaattgatctgtgaaggggtttctaaactaaattgtttttgaatgctcgatgtaggcgttgaacaccggcggccacggcagctcatacgggaacgcgacgccggcgtgcgcgttccgctggtgctcccgttccaccgccatggtccggagccacgcttcctccgacggcgacagacagcatgaggtaccccctttccgcccccgacgattacgccagcgatgccgcagccgaagtacacatctccttgcggcccggcagcccgcgggtggccacggacaaattcagggtgttcttgactgagcagtgagcacccagtcgccgttgctgggtagccaggaaaatactctcaggtggtcgtcgttgctcacgccgatgatacggagctcgccgccgccatcgtcgtcaccggcgacgaccctgaacttgcacttgcgggaccactccctcatgtggtctgggaatacgacgatggagaacctcgccgtgagctcgtcaagggctaggcggctaggaaggcaccgaggctgccgcggcgtctcatctccgacgtggggacggcgaccatctggtagcgccgcgtaagtggctcgcagacgatgaggccatcagggcagcagcggctgtcggagtctcggcgatcgtccaggaggcggtgtccgggacgaagtcgagtgagaggcggcagccgtagacgagaaccggcctggagacgtggacgaacgccgcatgggagaccgcgccgccaacggcgtggtattggccgacgaggtcgggcccgtggtggacacggaagcggcggaggaagacactgcaccgtcggcggcatcaacgacgacgacgcggcgctagcgcttgcagacggacgcggcgcggatgaggcaggcggcggatcggagtggaggcgcagcaggacgagctcgaggactttgtcggagatgtcgtcgaccacccacgtagccacgtaggcctcgccgtcgccggcagcaacaagacggtcttcttcctccgcgccgccgtgctccggttcttgcaagttgcgacggctcattctcggatccattaaccttgatcttcttctcgcgtttgtttatggcttgttatagagtataccatatcgtgcatcatggtagtattttatactcactccgtttcaggttataagactttctagcattacccacgttcatatgaactaggaaggtagtccgcgcattcgcgtgggcatatattttaagatgtgtttgagatatttacagttataaggatggaatattaactgtagaacacctctcatgcttcaaaaaacaaatctccgtataattttttctgtcagcatagcgtataatttttccaacctagctttataccatacactatttggttaatcccaataagtaattatcaatagtctttatcatataaaataagaaggaaaaattagtttgttttaaaaaaatatatctaacaaattaagtgtaaattgaaaataaggtgtttttgtctttaaattgaatgttagtggacatttttctaacaaatcttaaaaaacttttatcgctaacaaatgttttttattgtaccatcaagttagacctccttttgtttgttgtatattgatgcaatttgttgcatacttacatatgaatcaataaacatagaggagatatacatatcctagtcctcgcttccctacgatacgtgtgatctatggtgctattttttttaaaaaaaaatagctaatcaacatgaatcttaaaattgaaatctaatagtaagaaatataacttttaaaccaactatatactgctaccttagttgctaccttagtgtaacttatatatgcaataatttttggaggaattcataattccatggcgtaccatagagaaaaatccattaacatctatgcacttaaaaaaagatgcaatggttaaatataatttcgcatgcatttttatttttgaagtgtggtgtattatgaatgcgcgcttgaatatctatccatggtatattaaaagtgcattaaatactatctaaggttgattacatggtaatataatatagtttagagcacttacacaaaagattatttgtgttgctcagcttatttgagcatactaatttcaataaaattatgaaggtactgtatttttatcccgtggtttatacgatttatatatgagttagctttttttttttttatttagctatgcatgtttgcaaaacaatgtatgctagtgcaacatgttttaattgtaattcagttgacatgtaaaagactaatggcgtgtgttccttcgaattttttattcaatggcttgcactatttatatgt

SEQ ID NO: 18023 - DNA, 2235 bp, Oryza sativa
  ref <308>: DATABASE ACCESSION NUMBER: AK068436
  ref <309>: DATABASE ENTRY DATE: 2001-12-06
gctcgctctcccccgtgccgccgcccgccgcatcctcaggtctcactgccatcgccgccgctccacctcacacgccggccgctgctccctgcctccggcggccgccccgcagccgctgccggcctgaatcggtttcatggctcctcatgagcctgcccccaagctaaccctctccaatcgatgctgctgcccaacgacgaagacacccgcctagagttccagattgggattttccccagcttcagcaccccttgagccaagcatggcttgtctcccccgagttcctcctttctgatcatccccttttctccctacttctgtgatgtgatttgattggtactctcttgtgtgatagcatgctctgaattgtgatgcttgtgaactaatcctagcgaccaacttgatgatgctataatcaggattgtacttactgtttctagggttctagataaattggcttgctagggttggacgaataaatttctgtatgccatgagtgaatgaatgaatgctgatgcaagtgcagtactggaattagaaaagctaatgaaaatcacactaacataattaagtccttgtatatgcttgcatgatgaaataactgaatttggcacaacagcaggatcatattctagaataaatcttattgaatgatgcagtaatttacatggtactatactttgaaaatcatgccaagatatgtactatagagaatggaacaccttgaatacagatagatggtaactgatttctttggatgatttactgctactgactgtatgtcatgactataatttactagattagagttgttgatgcagggaaaaaaataaactattgattaactaactatttactgtggttttattctgagagtatgattttaaacattcgttctgctacacaaatgatttggtagaaaaaaaaaacttatatgttctgttaagttattgaaatttagtagaactacgactatttatcactatatgcatacttagatgtacttctattgtctcttttctgtgtttcgtagtaaagaactagatacatatgcaaacttaacccagattcataaccaactggtttcgcatgctattctacaattcaaatgattaataatttatgatggttcctctattaagtctgggttgattttcaatacttttaaatgaaatcagattaatatacacataccctaacctttccaagaatatgcacagcttagattttactttgtttgtatgaccaaaatctgaaagttctatattttttttttaagtgcacatgcatgatcaactatctgaataaaattcatgtctttctttactaatttcccgttcctggttatataagcagttacattgtgagtttttgactgtgtacataggcataggtagcttagtttcagctacagagattgagcagattacattctattgctgtctcaaaaggtttctgatggacattatggtgttacaactatcttaatttccaagttcttaacgtatggggcaaactgaaaagtgatctgtgctcatgccagatcctaacaggggacaaatgaagtgcagtgttaaagttgcaatggcatttcaaaaaaaaaaaaaaaaacattcatctttgatttcttgactggggctcatgtcgtggccacctccatcctcctggttgccaaccgctgaggaggcgcggtgcagcccaccgcttccatctgagattgttgcgtgggcgactggaagcggccagaggttgagttcctgctggacaactgtgggcgaagaggcaaaatggctgacgaaggccagcggtggctggagattgatgatgaagcagcagtctgtggaattcctcttctccatagccacttagcccctcctttcaagataacttctgtatgtttgatgcccctctaataatagcttaggattttttgagatatcgatagctacaaccagtgctcgttccatcattcaatgacctgtaacaatttcaaaataactatgttgggcaccagatgaacccaggcagaggttctttggatgggtttttgtacaccacaagggtctatctgcagaaaatttaacaaaaataaactggccgtgcatcttactatgttcgctatgcaatggagtttatgggggaaagttcagttgctttttgttccatgtaatatcctcgaattgtattccgaaaccaacttcttaatataatgggcagagctccaacctttacttc

SEQ ID NO: 18024 - DNA, 2120 bp, Oryza sativa
  ref <308>: DATABASE ACCESSION NUMBER: AK068437
  ref <309>: DATABASE ENTRY DATE: 2001-12-06
gactacactcttgcaatagcagagcagggtatataaaatccggcggcgccgtcggggccaccttcaccgtcgcgctcctcgccgccgcgctgctcctcgccctctccttgtacgcctcctccctgccccgcgcgcctaccacgccctcctcctcctctaacctcgtcggcctcaccctcgtccgccgcgccaaggagaagggcgcggtgtgcttggatgggagcgcgccggggtaccatctgcagagaggctccggcactggatctcaaaactggctccttcacttggagggcggaggctggtgccggaatctgaggtcatgtgcttcacgtcaaaaatcggtgttgggttcatcgcaatacatggaatgccagattgagtttgctgggatcttgagtaatgacaaatttcaaaacccagatttttacaattggaataaagttaagataaggtattgtgatggggcatcattttctggaaacgtcaagaacgaattgcagaatggcacaaaattctttttccggggccagcgtatctgggaggcagtaatgagcgaacttctactaaagggactcaggcatgccaaacagctttcaggcttttctaacaggatgctctgctggtgggctagccactttcattcactgcgataatttccgtacactgctaccaaaggattctagggttaagtgtcttgcggatggtggatttttcctcgatgtagaggacatttctgggcaaaggaccatgcgagcattctacaacgatgttgtccgtcttcaggatctgcgtggaaggtttccccattgtggtccaaacatggatctgggccagtgcttcttcccaagtgaagttgtaaaggacatcatcaccccagtatttgttcttaatccagcgtatgatgcttggcaggtgcaacatgtgttgagtccagtagcatctgaccctcaacattcatggctagaatgcagactggatattagcaagtgtgattcgaaccaacttgaaattctccaaggttttaggaaaaagttacatgatactataagtgaacttaagcacaaaaaggactggggcttttttatcgactcatgctttatacactgtcagtcgttgaactccttgacttggcattctccatcttctcttagagtcaacaacaaggtaatgctttcatcctctaaaaagaaaacagaaagaaaaaaaatgtctacagttcaaggaacattatatattatgtcaaattgacaaattgtaggttagcctgtgttgagggctagcctttgcaaatttatggtgaccgtcagctgacttaacatctagtatttacagtgatgatgttcttgagattatttatgtgttttaaactattcgatgtacaagaaagaaaggtgtcctgttagtcacaagataagagtgactctataaatagtttgccgaggattcagcctataaaaaaacaggaagaagctcctcagcagtcagctgtgctactgctgtacatgagtacatcgtctaagccccataaatatattatttaatgtaacatcacaggacatccctttgtaggtcatctgttgtagattgcatgtctccactacggcattacctcatgttagtttaatttcctgcacatgatacttactgagctaaccatgaaggtgtcagtattcctccaatcttcttggtttacttcttcaatattttgctcgtggtctaacgttgaatctgctgaatagaccattgcagaggcggttggagattggttctttgacagaagagaggtgaaggaaattgattgtgaatatccctgcaacccgacttgccacaacttggtttttgccaagcctttcaaggcatgatgaagttctaaacacgtttctctttttgccatgatattgtaaaacaggaaattttatatcaatcatcggtcatcatgtaatcttcagactcgtcgggtgtttgacacccaaaatcatacatctgagatagttagactggccgaattttttttccacgcaatttatgtaggattataagtagtttattcaaaagtagaattgtatgtgctgtacttcacaacttgttttctataaaataaacaaaaagtgtatttcttg

SEQ ID NO: 18025 - DNA, 1285 bp, Oryza sativa
  ref <308>: DATABASE ACCESSION NUMBER: AK068438
  ref <309>: DATABASE ENTRY DATE: 2001-12-06
ggcgtgccaagttgtgtgtgtgtaccgcggcatggcggaccagctcatctccacggcagaccacgacacgctgccgggcaactacgtgcgccccgaggcgcagcgcccgcgcctcgccgacgtgctctccgacgcctccatccccgtcgtcgacctcgccaaccccgaccgcgccaagctcgtctcccaggtcggcgccgcctgccgctcccacggcttcttccaggtgctcaaccatggggtgccagtggagctgacactgtcggtgctggcggtggcgcacgacttcttccggctgccggcggaggagaaggccaagctctactccgacgacccggccaagaagatccgcctctccaccagcttcaacgtccgcaaggagaccgtgcacaactggcgcgactacctccgcctccactgctacccgcttcaccgctacctccctgattggccatccaaccccccttccttcagggagatcataagcacatactgcaaagaagttcgggagctcggattcagactgtacggagcgatatccgagagcctgggcttggaacaggactacatcaagaaggttcttggtgagcaggagcagcatatggcggtgaacttctaccccaagtgcccggagccagagctgacgttcggactgccggcgcacaccgacccgaacgccctcaccatcctcctcatggaccagcaggtggccggcctgcaagttctcaaggaaggcaggtggatcgccgtgaatccacagcccaacgcgctggtgatcaacattggtgatcagctacaggcgctaaccaacggaagatacaagagcgtgtggcaccgtgctgtcgtcaactctgacaaagcgaggatgtccgtcgcatcgttcctgtgcccctgcaacgacgtgctcatcggcccagctcagaagctcatcaccgatggctccccggccgtctaccggaactacacctacgacgagtactacaagaagttctggagcagaaacctcgaccaagaacactgcttggagctcttcagaacaacacctacagacacatcttgaattcttgatctagtcgagaactggtttgtagtactcggttgtaggtgtaggtggtgtttgggagagggggtggtgtttgggagagagcccgacttattgttttgtgagaggatctcccaaacacccccgtagtttctcggttgaagttgtttgtagtactcggttgtaggtgtactggaacgagccgttggaatgagtaatcaatcaaatcaatcggtgcaacgc

SEQ ID NO: 18026 - DNA, 1608 bp, Oryza sativa
  ref <308>: DATABASE ACCESSION NUMBER: AK068439
  ref <309>: DATABASE ENTRY DATE: 2001-12-06
gctctttcttttcctctcgctctcccccgtgccgccgcccgccgcatcctcaggtctcactgccatcgccgccgctccacctcacacgccggccgctgctccctgcctccggcggccgccccgcagccgctgccggcctgaatcggtttcatggctcctcatgagcctgcccccaagctaaccctctccaatcgatgctgctgcccaacgacgaagacacccgcctagagttccagattgggattttccccagcttcagcaccccttgagccaagcatggcttgtctcccccgagttcctcctttctgatcatccccttttctcgctacttctgtgatgtgatttgattggtactctcttgtgtgatagcatgctctgaattgtgatgcttgtgaactaatcctagcgaccaacttgatgatgctataatcaggattgtacttactgtttctagggttctagataaattggcttgctagggttggacgaataaatttctgtatgccatgagtgaatgaatgaatgctgatgcaagtgcagtactggaattagaaaagctaatgaaaatcacactaacataattaagtccttgtatatgcttgcatgatgaaataactgaatttggcacaacagcaggatcatattctagaataaatcttattgaatgatgcagtaatttacatggtactatactttgaaaatcatgccaagatatgtactatagagaatggaacaccttgaatacagatagatggtaactgatttctttggatgatttactgctactgactgtatgtcatgactataatttactagattagagttgttgatgcagggaaaaaaataaactattgattaactaactatttactgtggttttattctgagagtatgattttaaacattcgttctgctacacaaatgatttggtagaaaaaaaaaacttatatgttctgttaagttattgaaatttagtagaactacgactatttatcactatatgcatacttagatgtacttctattgtctcttttctgtgtttcgtagtaaagaactagatacatatgcaaacttaacccagattcataaccaactggtttcgcatgctattctacaattcaaatgattaataatttatgatggttcctctattaagtctgggttgattttcaatacttttaaatgaaatcagattaatatacacataccctgacctttccaagaatatgcacagcttagattttactttgtttgtatgaccaaaatctgaaagttctatattttttttttaagtgcacatgcatgatcaactatctgaataaaattcatgtctttctttactaatttcccgttcctggttatataagcagttacattgtgagtttttgactgtgtacataggcataggtagcttagtttcagctacagagattgagcagattacattctattgctgtctcaaaaggtttctgatggacattatggtgttacaactatcttaatttccaagttcttaacgtatggggcaaactgaaaagtgatctgtgctcatgccagatcctaacaggggacaaatgaagtgcagtgttaaagttgcaatggcattcc

SEQ ID NO: 18027 - DNA, 952 bp, Oryza sativa
  ref <308>: DATABASE ACCESSION NUMBER: AK068440
  ref <309>: DATABASE ENTRY DATE: 2001-12-06
gttacgatggctcattgtcagatatctggtcttgtggagtaattctctatgtaatgctcgtcggataccttccctttgatgaccgaaatcttgttgtcctgtaccagaagattttcaagggggacactcaaatcccaaagtggctttcacctagtgcacgggatcttcttcgaaggattcttgaaccgaacccgatgaagaggatcaacatagcagggatcaaagagcatgagtggtttcagaaggattacactcctgttgttccatatgacgacgatgatgacaattatcttgactcagttcttccaatcaaagagcaaattgatgaagcaaagcaggaaaagcctactcatatcaatgcttttcagttgattggaatggcttctgcccttgatctttcaggtttctttgaggaagaggatgcgtctcaaagaaagataaggttcacatcaacacattcaccaaaagatttattcgacaagattgagaatgttgtgacggagatgggattccaagtccagaggggtaatagcaagctaaaggtcatgaaaaatggcaggggttcaaagaacctcaggaatccatcatcattcttggtctgtactgaggtagtcgagctcgggccatccttatatgttgtcgaattgaagaaatcccatggagatcctatattgtatagacagctatgtgagaggctatcagatgagctaggagtgtgcaagacagagcagattcagaggacggagtcgctggaggatgatctagagagcttcgacagcggatcttctttgcctggtttttgaagaattgccgccctggatcattttggttagagttagaggaacatgctctgttcttcatacaagcgtaggttaggatgttgtatagtgtacaaagtgagtggtgcaagttagccaccgatgtttaatataaggattgctctcttcttgcc

SEQ ID NO: 18028 - DNA, 1855 bp, Oryza sativa
  ref <308>: DATABASE ACCESSION NUMBER: AK068441
  ref <309>: DATABASE ENTRY DATE: 2001-12-06
gtgggcacagcacatcatcatcagtagcacagcacaaatacaggagcggcccggctatggcaatggcttgtgcagcactagtgccgttgctactgttgcttcttgttgtgctctctggctctacatctctcgctgaccacagtgcaggtgtagatgaggtcaactacatcgtggtgctaaccagcagctggctcaagccaaattccgtctgctccagcctgatgagcccacaccccaacgtgaccaactgggtcccgttgagccgaccgtacgggccgtgcagctcctcgccggcgaagggtagggcggcgccgtccaccgtcgacggcatgctctggtcggaccagcaccgcgccgactacatacagtggaggctctccggctcggtcgccggcgtgctgcagccggccgacgacgtgccggtgtcaactaactacgaacagcagtccatagaaggagatcttaactatggcacgtactaccctgcacctgcaccaatgtcatcaaaggcgatgaatccggccgccaccggcggcggcggcggcgggccgggagtgacccagacgatggtgctggacacggcgagcgacgtgacatgggtgcagtgctcgccgtgccccacgccgccgtgctacccgcaaaaggacgtcctctacgaccccaccaagtcgtcgtcgtccggcgtcttctcctgcaactcgccgacgtgcacccagctcggcccctacgccaatggctgcaccaacaataaccagtgccagtaccgcgtccggtaccccgacggcacgtcgacggcgggcacctacatctccgacctgctgaccatcacccccgccaccgcagtcaggagcttccagttcggctgcagccacggcgtgcagggcagcttcagcttcggcagcagcgccgccgggatcatggcactcggcggcgggccggagtcactggtgtcgcagacggcggcgacctacggccgcgtcttctcccactgcttcccgccgccgacgcgccggggattcttcaccctcggcgtgccgagggtggccgcctggaggtacgtgctgacgccgatgctcaagaacccggccatcccgcccacgttctacatggtgcgcctcgaggccatcgccgtcgccgggcagcggatcgccgtgccgcccaccgtgttcgccgccggcgccgcgctcgactcccgcaccgccatcaccaggctgccgccgacggcgtaccaggggctgaggcaggcgttcagggaccggatggcgatgtaccagccggcgccgcccaagggcccgctcgacacctgctacgacatggccggcgtccgcagcttcgcgctgccgatgatcacgcttgtgttcgacaagaacgccgccgtcgagctcgatccgtcgggcgtcctcttccagggctgcctcgccttcaccgccggccccaacgaccaggtccccgggatcatcggcaacatccagcttcagacgctcgaggtgctctacaacatccccgccgccctcgtcggattccgccatgccgcctgctgagtccggccgccgcccccgacgtctcgatcgggactctactactacaggccggagctgctcttgctccggtgataccttttaattttcataaagctcgagcgctcgcgtctttaatttgattcctcctatttatttttgcgtatgcgtacacgtgctacaagatcagctggctggcgtcatgtatgagccagattagcggttgctttgatatgtactcttccatccatgtgggtatatatatatatatatatatatatatatatatatatatatatatatgcacgaagaaataaaacttaatttgtttgcctatc

SEQ ID NO: 18029 - DNA, 3029 bp, Oryza sativa
  ref <308>: DATABASE ACCESSION NUMBER: AK068442
  ref <309>: DATABASE ENTRY DATE: 2001-12-06
gagtggcttacaataataattaatctctcgtcttctctctccgcctcccccgcctcgaaaccctcccctcctcctccgcctgtcgccggccacctcgccggctccggccgccgtgattcggcggggcctgcgccttgcctaggcctccacgttcccctccggtgccacctcacccgctggggtatggctcattgacgtggcggcccgggggacgtgacgcgacccagttggaattcgaaatcaccgccggagatgatgatgagctcgtcgacctcgaggagggaggcggcggcgaagagctccgagctggggcgcgccggcggcgtggatcccccgaggccctccgcggcggcgatggcgcggagcggggagctccccaaggtctcggcggcggcgacggccgcggtgcggcacgaggggtggatgctgcggtacgggcggaggaagattgggaggtcgttcgtccgcacgcgctacttcgtcctcgacaacaagctgctcgcctactacaagaagcagcccaaggacaacatggtgccagtgaaggcgcttcaaatagatggaaattgcagagtggaagacagagggcttaaaacacatcatggtcaaatggtctatgttctgtgcatatacaacaagaaagaaaaggagaatcatatcacgatgggtgcgcatgatatcgaggatgccctggtctggaaaaagaagctagagctccttattgatcagcaacaagacactatgacggctaaaaaccgcaaagcttttgcttcactggactttgacatggagtttggaggcccattatcattctctgatcgtgacagtggaccggaagatgaagaagagccccggcctactttgcttcgtaggacaactatcgggaatggccctcctgattcggtacatgattggaccaaggagcctgatattgggctgtcagatcagaatgacaccaaccatgcttactcaagaaagaactggcggctacttagatgtcagaatggcttgcgcatctttgaagaacttgtggaggttgaataccttgcaagaagctgtagccgagcaatgagagctgttggtgtggtggaagccacatgtgaatccatttttgggctaataatgagtatggatgtaacacgatatgagtgggattgtagcttccagtatgggagtttagttgaagaggttgatggtcacactgcaatactatatcatcggctacagctgaactggttttcaatgttggtctggccccgggatctttgttatgtacgatattggcggcgcaatgatgatggaagttatggtaatctttggatgtctccttgttggtcactttcatcattctgaagcaacttgtttgattcaatgttcttaaacctgcagttgtactgttccgatctactgagcatcagaattgtggtccccaaccaggatttgtgagggcgtttattgaaagtggaggttttaaaatttctcctctcaaatgcgtcaacgggagaccacgcactcaagttcaacaccttatgcaaattgatctaaagggatggggcgtcaactatttttcatcgttccagtactactctttgttgcagatgctcaactgtgttgctggtacaaagattgcgtgagtacttttcccaaactgatgatattcatccagttccgaggattcctgtgatgagtactatggctactgtgtccaaattgaaaaaggataagaaactccaagaaactgacttaaagacaaaacaagctgattttggacaagtcgataacaaaaatttggatatgatagatgaagagtcagaagaagatgatgactatcaagttcctgaagctaatcttgaggaggcacctaccagatctgacagtgatgctaagtacacagatccaatagatttgtcttgtttttcgggcattattcgtcgggatgcaaatgagaaaagccgtaactgctggacagtacctgatagcaagctctttaaagttcgtagtgagagctttccacatgacaaatcaaaggttcccgcaacaaagtaccttatggagcttgtagcaatcgactggcttagggacataaagcgaatggatcatgttgctaggcggaaaggatgtgcagctcaggttgctgctgagaaggggatgttcacctttgttgtaaacattcaaattcctggatcaagccattacagcttggtcctctattttgttacaagaaccttggaaaaaggatcactgttacaacgttttgctgatggcgatgatgatttccgaaatagcagattgaagctcatcccatctgttccaaagggatcttggatagtgcgacagagcgtcggaagtaccccttgcttattgggaaaggctgttgattgcagttatatgcgtggtcaagagtacatagaagtagatgtagacattggttcctcagcagtggccaatggtgttctgggcttggtgtttggcgtcgttacgactttaatagtttgacatggcttttcttatacaggcaaacacatacgacgagctcccggagcaacttctaggtgctgcacggctatccaatatcgaacccagctcagcaatagttcctgtacttgataaatagctcttcaagggaatgaaatcaattgaagcagattctttaattctttgctcggaactccattttctgttgattagctgcagcagtttgcagtttgagacggcaaaagtgtcatttcaggactggaagcgcgaccatatcctccaatctgtctttacagttttcagatttttctgacaccatgctagtaggtatagataacatatagtatgtgattatacggcattatacatacagaaaaaaccaattcatgtacaactcaacgtggtaccttgctttttttttttttctctttgtagccaattgttgtcgatctgacacctcaattagatgctctcttcctctcctggatgtaaattgaactcgttatcacttgcttggcctttgagattcctatatacttcttagttttatattc

SEQ ID NO: 18030 - DNA, 772 bp, Oryza sativa
  ref <308>: DATABASE ACCESSION NUMBER: AK068443
  ref <309>: DATABASE ENTRY DATE: 2001-12-06
gaggggtggatgagggagtcgatcgcagagatcgtgcggcacatcggggaggcgccgttcctggtgcacctgttcaacgacgacgacggcggcagcgggcggggaggcgcggggcgcgtgacggtgcggcgggagacggcgtcggcggagagctggcccgacgtgcggcggcggtggggcccgggcgggatgcggcgtcccgacggaatcatactggtcgagcagatcgccgcggcggtcgaggagggcggcgcgtccgccggcgccggcgccgccgaggcggcgcggcaggtgtggggcctggtggtgcaggcccgcgggatggagtgcgcgtcgtgctacgtgctcgacacctgccgcgtccgctccccggcggggctctgcacccacttctgcctcgccagggcgcagtgcttcggcgaccccctcgagctccagctccgcaacgcctggctcaaccgcctctccggccgccggtagccaccgccgccgccgccgccgcggcgtactaatgtactaaagctaccggccttgatgcgtccgattcttgctgtgaagaagagcaaacgaagcgtgcagattgcaacggaagaacatattcagattctttctttgttttctttcgttccggtttctcccaaatgcggatttgtacagattattggttgcgaatttgcaatttgctacctcgattattccaacgaggagcgattcatcctgtcatcgaggcattgccccatgtactatgacaacgtatgacaacaattttatg

SEQ ID NO: 18031 - DNA, 1689 bp, Oryza sativa
  ref <308>: DATABASE ACCESSION NUMBER: AK068444
  ref <309>: DATABASE ENTRY DATE: 2001-12-06
ggttttccccaataatgccaaacatcacacgctaagcctgcctgctctgctaattcccctacgcaacacaatccccttctctccttccccggaagaagaacaaagagcagctgaggcgagcaagcaaaggcaacaccaagaaagcatccaagatctctctctctctctctctctctctctctctctctctctccctcccttccacaacgctcgcctctgttcgtcctcctcatccgcaaccaccccgaaggcccaaccaagatccacagatggattgttccaatggtgaggttcagcatcagtggatggaggatgtcaagtcaggaggagcagtcccatttcttgaccctgacaactgccccaatggctgggctactcccccaggggacacattcatggtcagaggccctgattatcttgcaaccaaggtgaagataccaggtggggagtatcttctaaagcctctcgggtttgattggatgaaaagccccgcgaagatatgcgagattctgaataacaagagtcatcgtgtgaggaaagccatcgacggcgaggttttgcgtggtaatcagcctttcgtctgggctttcaacctgcaactgcccagcaaggataattacagtgctatattctactttgtgtcgctggagccggtaccggaaggctcacttatggatcagttcttgaaaggagatgaggctttccggaaatctaggcttaagctaatcgcgaacatagttagagggccttggattgttcgaacagctgtgggagaacaagctatttgcatattgggtagggctcttacgtgcaagtatactcagggatcaaacttcattgaaatcgatgtggatgttggatcttctattgtcgcaaacgcaattgttcatttggcgtttggttacgtgcagacgctaacagtagatctagcattccttattgagggtcagaccgaatcagagctccccgagagacttcttggagctgtgaggttctctgagttgaatccgggttcggctggtgtgtatgaagtgccatctgaggagcaacaagaaagtgcgccttttctgccggcaagattgtggcagggtttttcaaacatgttacataaccctggaaattccagggagccatcctctacttcacaaagcactaatgggagtttacacaaagaagatgcggatgagaatactagagaaagtttgcacaaagaagatgtggatgacaatactgctgggagcttgctcaaagaagatgggtacgagagtgctaccgggagttttgacaaagaagatacagaagaggactctaacgggagtttgcacaatggagatgctgatgaaaacactaaatgattttcttgaatctcctaccagtggaacttgatgcagctgcactgtcgtcgaaactccaaaaaggatatcttcattagttggggttaatatattagtccaccattgtgttgcaattcgttgaaacgatgatcaggctcaggtagctattctccatgttatcatgaccctgactggggctttcttgtgtgcccccacatctgttgtaaaaattatgcatactccattaccctgtacatattacattcaaatgcagaaattgttatgtgtgtcccattctcgtctggaaaaaaatgtaaactgaatggaatcaaatgcagagaagatgggggtattc

SEQ ID NO: 18032 - DNA, 1804 bp, Oryza sativa
  ref <308>: DATABASE ACCESSION NUMBER: AK068445
  ref <309>: DATABASE ENTRY DATE: 2001-12-06
ggtagcatcatcctttttgggtccttagctcagaagcaaggatagctttccatgattccatcactcattaatagctaggtacaaggagaagatggcaaactagagggatcaggagtagcaccagatcacatagaaggtgaggttccatggggaacatcctcaagtgcttcatcagttgcttcgacggagaagacgaagatggtggtagtggccatggtcgcttccccaacagctatcctccggtctcaagtctccattaccagcctctgcatttggatgaccttcaagtgccattatcgcctccaccaccatcaactaggcagcagcagccgccaccgcgaccggcgctctcaagactccattaccagcctctacgtttggctgaccttcaagtgccattatcacctccaccaccatcaactaggcagcagcagctgccaccgcgaccggcacgtcctcttggttaccatcatggagtcctctggccgacgatagagatcaccccatgcgatgacttcctcaacttagaattcacaactaaggtttgtgaagggccccagcatcacagtacaccatccaggaagacggaccttaataggtgtatccatgaaaaagacgatggcaacagtaaaccctcctactactggctgaccaagaacaaagacaatcatgtagtaacccctcagaccaaacggtcacctcggccccctagtggggtagctgccctggagcgtgacctcgtcgactttactcggacctttgaggttcctgaagggcttgcacagcatgttacatcacctatgcaggcacaggttacatggtataggaaattgttggccgcatacaaggatataaaatatccacccaaagaatcagcagatgctgctgtgcttgttgctgcaaccttgagagggatcgaacgaactaatttggagggcattcttgcattttatggctttccaattcctacaatctccaaagaggcatcagaaaatcatccatcatcaataccaaagggtgtgctgttcgtgctaaaaacattgccggttaatgcaaagtgcatagtagatggtgatggctttactgcttatgtcgacacactggatcctatagaactgcgtcaggattgcaatgcaagctgtcaatcccgtaactctaagaagcaaaaattgtgggacaaaacagcagctgatctacaaataagtctcgaaaatactggacaaaagaaaatgttctttgggggccgtgagatcctcgcaagaaaatacgaaataagactgaggggcattgatgcaccggagataggcatgcagtatggaaaggagtcgcaggatgcactggtgaaactgatcgctaggaagtgtgtcacgcttcatgtttatgggcaggaccaatttaagcgcttcgtctgtgatatccattgtggtggtgtgttcatccaggagcaaatgctggtgaatggtcatgcctggcacttcaagaactatgacaaacggccacaatttgcaaagtgggaaaaaatggcacgggatgcacgtcaagggctttgggcatatgataaccttgagaagccatgggaatggagaaagaacaagaggaaggcatcgcgacatcacaattcagatgtacgttgatggactctggtcacttggatgatgatcttatctgaaatgacataatttggaattggatctatggttactagacagttagccccagttgagtatgtataaaagtatgatgtactttgtatatagtaagattattaatctcgatctgtattatttataaactaatatttgag

SEQ ID NO: 18033 - DNA, 904 bp, Oryza sativa
  ref <308>: DATABASE ACCESSION NUMBER: AK068446
  ref <309>: DATABASE ENTRY DATE: 2001-12-06
gaactactcctccacctcttacctgacatgtaataagcgagctgaccaacaaacccaaccccgacccgcgccgccgcccgccagcgaggtcgtcgccggcgtctaagctctcattcatggcggcggaggcggcctccggtggcggtggtgggtaccggatgctgccgcaggcggggttgccgatcggtttccggttccgacccaccgacgaggagctcctgctccactacctccgccgcaaggtcatgtcgcgccccctccccgccgacgtcatccccgtcgccgacctcgcccgcctccatccatgggaccttccaggcgagggagacggcgagaggtacttcttccacctgccggcgacgagctgctggcggaggggcggcggcgggagcagggcgggcggcggcggcggcgcgtggagggcgtccgggaaggagaagctcgtcgtcgcgccgcgctgcggcaagcggcccgtcggcgccaagcggacgctcgtcttcttccgccgcggcggcgcccgcaccgactgggccatgcacgagtaccgcctcctccccgccgacgaccatccgccggaggccaacgacgtctgggtggtctgccgcgtattcaagaagaccaccacgctggctcaccgccgttcgccgccgtccatccgtggcgcgccacgccggcgagccgccgccgccgacgacgacgacatgccgtcctcgccgtcgtcctgcgtgacggacggcggcgacgcgggggaggagggagaagagagcagcagctgcagcgtcgtcgcttctaattgtccatgagatgatcagatgagagagggagaggttttaccgtgttagtgtttgactaggccgttaattaccatgctttcatgtcctaatcagcgcccttcttttgctcc

SEQ ID NO: 18034 - DNA, 3002 bp, Oryza sativa
  ref <308>: DATABASE ACCESSION NUMBER: AK068447
  ref <309>: DATABASE ENTRY DATE: 2001-12-06
ggaatttggagttccggataccgtgaaatcaatggcctggtgtggcgacaacatttgtcttgggattagaaaggagtatatgatcataaatagtatgactggtgcattaactgaagtgttttcttctggaaggaatgctccacctttagttgtggctcttcctactggggagctcctcctgggaaaggataatattggagtatttgttgaccaaaatgggaaacttattcaagatggcaggataatttggtcagacacgcctgcctctgttgctatacataggccatatgcggtggcacgcctgccacggcatgttgagatacggtcccttagagcccccaatgcattggttcagacggttgtacttcgtgatgttcaaaagcttgttgaaactgagaactgtatacttgctgtgctagcccgctctgtttatggcttgttgcctgttcctattggtgcccagatagtgcagttgactgcatctggtgaatttgaggaggctctggcgttgtgtaagctacttcctccagaggattcaaacctacgagctgcaaaggaaagctcaatacacataagatatggacactttttatttgataatgggagctatgaggaggcaatggagcagttctctgattcacatgtggatattacttatgtcctatctctatatccatctcttgttctgcctcaaacgcacatcataggtgaacatgaccggctgcaagatctgccagaattagcaagagaatcatctgatgtgacagatgatatggaaccatactctctacaacttcatgaatctgatgataaatctccattggagataaagaaaatgagccacaatgctctaattgcccttgtgaagtatttgcacaagaaaagaaatggaataattgagagagcaacagctgaagtcaccgaggaggtggtctctggagctgtgcaccacagctcaatcttatctgagtcatatcgatcaaagaagccaaataagaagcgagctcagacgcatacaagctctattgctagagaaatggctactgtactggacacatctcttcttcaagctcttattcttactggacagtcttcaggggcaatagaattgttgaagggacttaactattgtgatctgaagatatgcaaagaatttttagaggaaaggagcgattatatggtgttacttgagctctacaaaagcaatgagatgcaccgtgaagctctccaactgcttaatcaattagttgaagaatcaaaggctgagatgggaaaaaatgattttaacaaaaagttcaatccacaaatgatcattgaatatctaaggcccctctgtcggtctgacccaatgctggttttggaatcatctttatatgtccttgaacgcaacccttcagacactattgagctctttttatcagaaaatgttccagcagatttagtaaattcatatctaaaacagcatgctccaaatttgcagtcaacttacttggaactaatgctttcaatgagtgtatctgggatcaaccctaatctgcaaaatgagctggtacaactatacctttctgaggttcttgactggcacaagattctgaaggaagagggaaactggactgagaaaacatattccccaacacggaagaagctgataactacattagagaacaattcaggttacaacacagatatacttcttaagcgtcttccgcaagatgctctttttgaagagcgcgctatattgtatgggaaaataaatcaacatctccgtgcactctctctttatgtgcataagctccagatgccagagcgagcagttgcatattgtgaccgtgtttacgaggaaggagcacaacaaccttccaaatcaaatatctatttcaatctcctacaaatctatctgaacccaagaaaagctgaaaaggaatttgggcagaaaattgttccagtggcatcacagtaccctggaattcagaaggttactaaggttagaggggcgcgtatgggtaaaaaggttgttgagattgaaggggctgatgatgtgcgctttagccccagtggaactgatagtggtcgaagtgatggtgatggtgatggtgatgatgttagtgatggaggcccaataatgttgaatgaagcacttgaattgttaagccaacggtgggatagaataaatggtgcccaagctctttttgttacctagagacacgaaactccaggatctggtgttatttcttgaaccacttctgcggaactctagtgaacatcgacgcaattatatggttatcaagaacttgatttttcgggcaaatttgcaggtaaaggaggatctgtataaacggcgtcaagctgttctgaagattgatggagatagcatgtgttctctttgtcataagcggattgcaaatagtgcttttgctatttatccaaatgggcagacgttggtgcattttgtctgctttagagaatcacagcagattaaagctgttagaggagtaaactctgtgaaacgtagatagcatgtacattcaccaggtgtgagtatcatcatagaaaaaaggatgcaacgttcgcattttctgcacatctttggaacagcaagccaacaagcatgcaagatttgggtcctcagcacctgctgattcacgttgcttgatgtttctgatcgagaggcgttgcttgatttctgatcgagatttcttttgtttctgttgcctttacgcggcttggtttgcttcatgtatttttactggcgttttcttccgctcttcagagcgttggtgtattcagtctgcgcgtgtctgcctatcagttcgctttcgcttgttttttatgcccagaaagcgtacaaaaatgtagatgaaaacgttgtaaagtttagattaggtgtgaccgtgatcagtgttgtgtttaatcaccatgtaaacagggaaacataatagctaagtgcttatgttttaattgaaatattaatcatagtaaaggagcacttcctttttcatctc

SEQ ID NO: 18035 - DNA, 2619 bp, Oryza sativa
  ref <308>: DATABASE ACCESSION NUMBER: AK068448
  ref <309>: DATABASE ENTRY DATE: 2001-12-06
ggcctatgtgactatcttcaattcttcatcccctcttcgctctcatcaacaagcaaatcgagaaaaaaaaaagaaggggagaaaaaataatataataacagaaaaggagatgaaaaaggagttccccggccaagtgccgacgagtcggttacactccgagatggacgcggcggcggccggcgggggcggggcggcaaagcggaagcgcagcttctccgaggacgacgcctacctcatcctgcacaggtaccagccggcgacgatcctgacgatgctgcaggagatggggaagcaggtgggcgcggggaaggggatcgactggagggcgctggtgcggaggacgagcaccgggatcacctccgcgcgcgagtaccagatgctgtggcgccacctcgcctacggccacgagttcgtcgagagcgtcgagcccgcctccctgccgctggacgatgggagtgatctagaatgtgagattgagattgtccctgctccgggtaatgaagcattagctgaggccacatcgtttgccaagactattatcaccggatcttcacgtgaacaaacctctggtcaacgtgtcaactcagaagctgctgcgctaaacactccaaatgaaaagatagtgcgtgttccatctgataaacagcttgtgcctggtcaccgtctaacaaacggtacaggtccggtttccagctcaaagcagccctcccacacaggctcatctcctgatcctttggaccctaatggacatcccaaaaagaaaaagaagcctaaaccatggtccagagaggaggacatggaactaggagcaggtgtacagaagcatggtgaaggaaattggatggaaattctgcataaaaataaatttgatagttcaaggacgcatcttcaacttcaacagagatgggcgcttatttgcaagcgtcaggggtcaaccaagcctgctacccctaaaatacccaatgttatgtcggaggaactaaaggcagcacaaaaagcattttcattggccattgggacgaccagatcgtctacattaagaccaggaggtgtgccacatcacaatccaatggttactactacgaatcctgaggtgaaatctgttacagcaccttcaccattgccggtaccggtgcatgttgttccggtgcctgttccagtgcaaccagtacaagtgcagttaccaccacctcagttgcatcaagcacctgcgcaatctgcacctccacctccaaaagtatcaaatgcttcaaataagtcacgaaataattctaagaaacaagttgcccaatcaattcctgtgaatggccctttgtcgatacaagaggcagctcttgctgctggtgggcgaattgccgaaccaagtgttgccaccaattttttaaaagctgcacagtccacaaaagctgtgcacataagatctcgaggaacaggatcttcaaaatcttctacgggatctaaaacacctactgtggctggtgaacctgggacacagcttggcagtgatcaacacctagaattacaaagtactggtgatccatctcaagttttgactgcacatgcaactgaacaagttcataatgtttcagaagtcgctggggttaatcctctgggacaatccgctggagtgcatttatcagaaactaagaaagcactgaacaccacaccagtgtctggatcttctgacaaaatggaaatagatgacaactctaattattttgcagtcacaatggaggacttgttccctgaggatgtgaagcaggaagatgttcaagatcccaagattgaggaggccatagaccccaaggatgcagacatgttagaatttgatcgctttgtggcccaaggatgcttaaataaggataatgtggataagagcaaggctgccaagattgctccagaagctcaaagcgttattggcagccagaaaaaacagctgaagacgctgcccacagttggcaaaagcaaccctgtatttgctggacctccagcaactgcgaaaaagaccaaagctccagttccacagggtgggatgtctagcggcatagttggcgtgctgaatagatcattaggagggaaggcacctgctcctgctaccacaggcacccaaagtactgtccagaagcagcaaagcatgagctcaaagggcaacttgttagtgcccaagaatgtggcgcctggcaccgtaacaccagccaacaaccgggccaacacagcggtgaacggggctagcaaggtgaatccaccagccagccagaagccagcctaacatggtaaattccttgctataataacgccctaggacttttgtgcgcttagtttacttttgaaatgtaaatagggccacgtagataccatctattctttgcccccctttgcatttgtagctcaattcctttctgaaccaaagcactggtgaaaacattaggttagactggatacaccgtttaatcgctttgccttctctgtgatgtcttagactgatatgttccatttgttaagctggcctgagattatcatgccgccttcctgtacagcctcgcctctttctccgttggatagtttggttgattggccaaatattcagaaactatgtcattgtggcctgatcaaactgtg

SEQ ID NO: 18036 - DNA, 3033 bp, Oryza sativa
  ref <308>: DATABASE ACCESSION NUMBER: AK068449
  ref <309>: DATABASE ENTRY DATE: 2001-12-06
ggtagtatattctctcctcacttaaactaatcatctctctctctctctccccctccaaattgtcaatctcatttctgaactcatgttcaggtttgaccttgcaaaatagcagtagctactattcatccaggaataggagttgcaggggaggcatgaggctgattgggagaggaaagagttccaaggccaagaagggctcttcaactccattgcaatccaaggagaagattgctgcaaatgtggagactgttgctgttggttccaacaacaggcaagtggcacctgatgataacatgcccctgggagaagctggctatggtaaatgtcttctgttcttcttacgtttgttctgttctgatcttggagttcttcgcattcttgttattgcagttgttgttgtcgtcatcgtcgtcgttgttgtttggcgaatctttatgatatgtttgtgctattgcaatagtttcggtggctttagtgatctgtacttgtgctttcgagttagcgatcatactgtattgttgttattgtgaaaagggtaatatcttattttcaaaaagttgattgaatggcttacaaatggttgcactgtattttgattcaggtgtttcttatgtcagatttgcttctgttgctcggacatatataaagttaaagccccgccagcttgcttgttcagttctatatctaagatggtgcaaattaactcgagtagtagtttatcacagttctacatctaagatactccagtaattaattatcccagtgtcactttgagcatgctgagggacttgaaataatcatgtcccaattgtagaatgtttttctttccttaaatatactggattttgtttcacaaaagagaagataaggccatgaccacaatacgttttcaatcgatgtcatctgtcaattccattacaaagtggttatggccaaattcaatgttttagtggaagatctctgaaatgacatatgatatgtagataagtatcattgaattttaatgatatccaaatatattattaagaattaagatgatagtcaatgtatgcgtaaatctggaaactaattgcccagtttagtgctatctgtctgggttgacacactagccaatgatcagcaaacctgaagcacaagctgccaagcactttattttcttcctgtttaagagaaagtatgattatctagtttcagcaaaaacatgatccagtactgatcgacaatccactactttttctgattttggattttgaacttttgtttgcacgctttccaatcttcgcgtttcgtgcaaaaaaaattatatagaaaaaattcagagaatatttttctgaaacatttttcaactttatagtagttaattcatacatttctaccctcaaatagctatcacaaaaatcagattatctatcaatccatcaatttcggctatcacgaacatggaaatcccttgcaaaatccattttgacgatggaagttcagctatcagttttcctgtgatttgagtgattttgacgatggaagttcagttatcagttttcctgtgatttgagtgtttcagtaccaaagtacggacacgacataattaatgtaaacgcagttcgttaagagagatcattccatccatgtctttcacaccagaaatgatatggtcccctgaagaaatcaagcaccgaaaaaaaatataatcagagagaggtgatcagttgctgacacttctctgcatctcttgatgattctagttagagagggcaggaagcatgcacacatccttccttagtggcacacaatccaggtccaatgggcagttgagcagctcatgttttgaacattattgttcttggactgattcaatgctggtcactgtttagttctctgtagctttcagagtattgacttcttgattgacctgtgcagctagcagcagagatgaggttttctttgaagcttgcccttggttagagtctgactgcgaggatgaattctacagtatcaatggaggtaacgaaaaatattacatgtgtgaaagaaaaagttaattcagaaacagaacagttagatttttgtctatatctaatctttggtttgattcagcttcatcctgatacatatttttccattctaggatttaccccaaccaaatatttactgctgcatgtttcaaatatcaatagcattttattgtttgtgcgagtcgtggtatgtagggcttttaaatgaattttactacggaggcatactcaaacttcaaaactcgaatctgacatttcatttgggtttttggataaaacgactgacttgacagaaatcaatttactgaaacggttgctttcatggttgcatggaaatcagggtgttacattgcctgaacataacattcagatatttatccatatctagtctttgatttgattcaacttcatcccccaaccaaatcttcatttcagcctggttcaaatatgaaataacatttcattttcatctgatttgtgcatcatcagatggcacccctgcaagatcattcagaacgaactccagcaaccatgcgatacaacctgaacctcgcaagctgcccacactgggtgccatcctgaaggccgagccgctgaggccgccaccaccaccgcaggagacgcagccaacgccgccgtcgccggcgacgacaatgcgactcgccgacctcctccgggagaggcaagaatcgttcacctgctacgacggccctgcctgcgccatctcccggacgggctcctcctgcggcgccggcaacggcgagcagtggagccattgctgcattccgagcttcgtcccgcgtaccagtgtgagctacgcgaaggggaggaggaagcgcaggtgaagaagcgatcgatcgagagagtgtgcaaagaaatcaagtggtttttgggatgataattgttcagaatgtgcagtgtctcagagagagtccacctgcttgtgtattgtaacaacaactacagtacaacgacgttaattagccgcccaaatcaaatgtatatatgtgatgtgacagcg

SEQ ID NO: 18037 - DNA, 1376 bp, Oryza sativa
  ref <308>: DATABASE ACCESSION NUMBER: AK068450
  ref <309>: DATABASE ENTRY DATE: 2001-12-06
ggggcccatctccttccacaccgggacgccggccgccgccgctgccgccgccccgcgcgccatggagccggacgccgccgacgacgactacatgggggacctgtcccacttcctcccgccgccgaccccttcctccccgtcgaggagcctcgggcggaggaggcaaccgccggcgcagcaggcgcaggggcaagggaagcgcgcgaagggggtggtgccatggcaggagcggcggcggcgggatcgggagcggaagcagcgggaggaggacgagcggacgatggccgggctcgcggaggccataccggagaccaacgtgggtttcaggctgctgaagcggatggggtacgaccccgcggccggtggcggcgcgggcgccgagccggtgggaatcgagatccgccgctcccgtgcggggcttggggcggagcctgctgtatcggtggcgccgccgcagccgtcggcggaggtggcggagggggagaggaggcgggtggaggagatggcggtggagttgagggcgaggcaaagcacgcagtggaggaaccggagggtggtgtgggattaccggaaggctgaagccgcgctcgcgcagctggagaatcgggaggctgcgccgccaccgccggagggggaggagaaggctgaagaggaggaagaggaggtgatcactgaagaggatttgcaaaatatattggctaagctgcgcgatgaacactactattgcctttattgcggttgcaagtatgaatcagcagaagcattggcaaatgaatgtcctgggccaaatgaagatgaccattaattcgctgtgtctggggcaacaaagaatggtccttgttacaacaggatttgcaagttgctgtaaacgatattttgggacctatactgcgaatcacctttcacatttcagtatcacatctcaatgttagaaatgataattctcttgcggcagcttaaagctacaagggtggaactggaaagcttcaggaagagtttacagttctgcatatggtatgctctgctcctccatgtagaaggcttcaaaggagcccttgctacagctcttgaaaagtccaaatcaaggtgcctctcctcacagtgaaaaagagtcgtgtcaatggaacaagtgatctgcgacatatgataatgataagcagatggcgccaaagcaattatacatttctgttttccaatcacggtgataactgttcaagttggtagtactgtgtttaggatggcactgatatttttgattcattctagcaatacatcatacacctgttgctgggatctatcttcaatgcaatgatggttttacaactgtgtcaaatcttgcatgtgacattaagatccataatcactgtttgctgatc

SEQ ID NO: 18038 - DNA, 2240 bp, Oryza sativa
  ref <308>: DATABASE ACCESSION NUMBER: AK068451
  ref <309>: DATABASE ENTRY DATE: 2001-12-06
ggcgcttttctttgaacctggcaattgcgattcatggtgctctgcattgctctactgtcatgcgagtaatttatgtcttgtgtgtgcttggggttctcgttccagatgctgcaggtggccggcggcatcatcggcgccatgactgccctccgttcacatgcggccatctcagtgacgtgtcgttcccgttccgccggcgaggtgacccgccggagtgcggtgttcaatcctacgagctaacttgtgcagacgacaaggctacaattcagatcgacaaggagacatactctgtaagtgacatcaactatggtgattctaccttgtgggtcgtcgatgccagcttcttggattcacgtagcagttgccttcttcctcgctggaacccccttcttcgtgatcccaggctccaggccaagtcacaccacatcattgaattggcacctccagtaggggttacctgggctagctttgtcaattgttcgcaggaaataaggaacagcagttggatgtacatgcccgtcgcttgcctgagcaccagcagatccttcgtttacgtgtttactggccaacaatctgcttatattcagaaccttgagccttcctgtgggtacctggccacgactcctttgggtggcagcaagttgaacagcacgtcggcgctgcagaatgtaagctatcaggatgttgtaaagctaatgatgactggatttgccgttcgatttcctttcacagttagtgggtggaacttcaaagaatgcctggcactgtcaatccgccagacaggtacagggagcaaggaaaggattgcgaatattgctatcattgacttctatttctggtcgtgcttcctgcttggagatagatcacataataacctcatctacacgtacatggtggtcgacacagccctactgattttgaagtggactgctgtactgtgcagattcgtattggccccattagcagtattcatcttccttgcccacaagtattggagaaataagataacaattgatgcagtagagaagttcctccagatgcaactaactctcggcccaacaaggtatgcctacactgacctcactgcaattacaggtcacttcggtgagaagcttggccaaggaggctacggctcggtatacaaaggtgttctcccaggttatgttaatgtggctgtcaaggtgctggaaaatgccaactgcaacggtgaagagttcatcagtgaggtctccaccattggtaggatccaccacgtcaatgtagttcgtcttgttggtttttgttcagaggaactgaggagggcacttgtgtacgagtacatgccacgaggatctctagacaagtacattttctcatccaagagaagtttctcatgggacaaactcaatgagatagctttgggtattgctagggggatcaactatcttcatcaaggttgcgatatgcagatactgcactttgacatcaagccacacaacatccttcttgatgacaactttgttccaaaggttgctgatttcggcctcgccaaactgtacccaagggacaacagttttgtgccgctcaacgccttaaggggaacaataggttatattgctcctgaaatgatatctcggagctttggcgttatatcaagcaaatccgatgtctatagctttggaatgctgctgctggagatggctggaggaagaaggaactcagacatgcatgcagggaactcaagtcaggcctactacccgtcgtgggtgtatgaccggctaatagagcaacaggtgggtgttggtgagatatctgctgctactgttgctaacatgcatgagcttgagaggaagctgtgcataatcgggctacattgcatccagatgaagtctcacgatcggccgacgatgagcgaggtcatagagatgcttgaaggtggcgttgttggcctgcagatgcctccaagaccattcttctgtgatgatgagtccatgtcacctatgatggattcttaccaattctcctctgggctaactgaaatcttagaggaggatgagtgaacttatgcatgttttgatgccaaatcagctagctagtagctagctcttgtaggtaggtggtaaaatgctgaagctggaaatattaactgtaaacagtgatatattttattttacactatttatttatgatttacaaccgataaaggttgtattttagaaagtgctactgaatggttgctgaaaaaaaatgctacttaatcc

SEQ ID NO: 18039 - DNA, 1144 bp, Oryza sativa
  ref <308>: DATABASE ACCESSION NUMBER: AK068452
  ref <309>: DATABASE ENTRY DATE: 2001-12-06
ggaaagcaactccactccgccttccgccgccgccgcaacaccatcaagaagatggcggcggactcgctgctggacatgtccctcgacgacctcatcaccaacaagtacaagcgccgctcccgtccaggtccagcgccctctgcccgccgctcccactcccgcgccgccacccgctccgctgccgctccctatcacgccatcacctttcaggtatagtttctctttctttttcttgatttctcgcctgacccaacgaccacgatctattcttcctaggcgccgcccacggcctacgtccacccgacgcccgcggccaacgtcgagaccggcaccaagctctacatctccaacctcgactacgccgtctccaacgaggacatcaaggaactcttctctgaggttggcgatgtcaagcgttactctattaactatgacaggagtggaagatccaagggaactgcagaggttgtattttccagaaaatctgacgccctggctgctgttaagaggtacaacaatgtgcagctggatggcaaacctatgaaacttgagctcattggtataaatattgagccaccaccacctgctatttttggtttcgctgcaccagctggatacttcgattttcctcccaaaaggggtggaagaggatggcctcggggcaggggtggatttggtgggcgtggtcggggtcatgtgggtcgtgggcgagggaggggagaccgtggaagtcggaagatttctgctgaagacctggatgctgacttggacaagtaccatgcggaaggaatgcaaatgagctagatgaccctcacgctttgttgccttgccttgattgcattaggtagagacagggggacaaactagtaggccttccttggtctccttgttagtattttgtagggatagatgcagaccaacatatgtatactttgtttagatggtgtcataattttgagcagggaatggctaagcttaacctggtaggtagaagctagctcataatatgtaacacggagggagcacaactttgaacttttatagctagtgttgaacttttagctagtgtgggactgtgggttgatggacacacaagcaaagcaagcatgcagcttggcagcctggcaagaggattgaattgatt

SEQ ID NO: 18040 - DNA, 3764 bp, Oryza sativa
  ref <308>: DATABASE ACCESSION NUMBER: AK068453
  ref <309>: DATABASE ENTRY DATE: 2001-12-06
ttgtggatccttcggtggctccatctcttctcatgcttcatcagcaatgcgaggatagaaatgttctgcgctatgtatactattatctggctcgcatattgtcagataatggtgcccaaggtttaagcgctgctggtggcatacctaccccaaattgggatgctcttgcagacattgatgctgttggtggagtgacacgagcagatgttgtaccaagaatagttgatcagctctcagcttaatcaaccagcgatgatgttgagtttcatgctaggagacttgctgctctgaaggcccttacctcctcctccacaagcaattctgagatgttggaaaaactctacgaaattgtgtttggcattttggagaaggtggctgatactaaacagaaacgaaagaaaggtatatttactaagcaaggtggtgataaggagtctattatacggagtaatttgcagtatgcttctctaagtgccctgagaaggcttccacttgatcctggtaatccggcatttctgcaccgagctgtccaaggggttgaattttctgacccagttgcagtaagacatgcgttgtcaatagcctctgaaattgccgtgagagatccgtactctgtcgcaatggcactgggcaagaacgcacagcctggtggagctcttcaggatatccttcatttgcatgatgttcttgccagagtttaccttgcaaagctgtgccattcaatttctagggcacgtgtattggatgagagacctgacataaagtcccagtacagttctctcctttaccaacttcttctggacccaagtgacagggtctgttttgaggccatactctgtgtgttgggaaaagttgacaacacagaaagcacggaggagagagctggtggatggattaggttaacaagagaaattcttaaattgcctgaggccccttctgtagcatcaaagggtattctgtcaaaatctgaaaaatcttctaaagcaaggcgtcctcagcccctcattaaacttgtaatgagaagactggagagctcttttcgtagcttctctcgtcctgttcttcatgctgctgcaagagtagtccaggaaatggggaagagtagggccgctgcttattctttaggcgcttatgacgaggctgccaatcttcaatcttattctgataatgtcgagtctcttgattctgatcttaatgagaactcacaacctgaagctactcgaaaggctaacccactatcaaatggacatggtggaatggacacaatagcaggcttattagcatcactgatggaagtagtgcggacaactgtagcatgcgagtgtgtatatgttcgagcaatggtcatcaaagctttgatatggatgcaaaatcctcatgagtcttttgaagaattaaaatctattattgcatgtgagctggctgatccggcctggccttcttctctcctgaatgatgtcctattaactctacatgctaggttcaaggcaactcctgatatggccgtgactctgcttgagattgctagaatttttgctaccaaagttcctggcaagatcgatgctgatgtactacaactcctgtggaagacatgccttgttggagcaggaccagatggaaaacatacagctttggaagctgtgacaatagtccttgatctaccaccacctcagcctggttcaatgtctggatttgcatctgtcgatatggtatctgcctccgatccaaaatcagctatggcactgcaaagattagttcaagctgcggtttggtttctaggtaaaaatgcaaattatgctgcttctgaatatgcctgggagtctgcaacacctcctggtactgcactaatgatgcttgatgctgataaaatggttgctgcagctagctctcgcaatcctacgcttgctagtgctttgacacgtctgcaaaggtgtgcattcagcggtagctgggagatccgtattgctgctgtccaagccctaaccaccattgcaataaggtctggtgaaccttacagactgcagatatatgagtttcttcatgctttagctctagggggtgtacaatcaaacttttcagaattgcagctaagtaatggggaaaaccaaggtgctagtggtactggtcttggatcattgataagcccaatgctcaaggtcctggatgaaatgtatagagctcaagatgatctcgctagggatatccgtcagcatgataatagtaagcaagaatggaatgatgatgaacttaagaaactttatgagacccacgagaggcttcttgatttcgtctctttgttctgttttgttccaagggccaagtacttgcctttaggtcctaccagtgcgaaactcattgacatctaccgcaaccggcataacattagtacttcttctggtctaagtgatcctgctgttgctactggcatatctgatctcatgtatgagcccaaagatgtgcccaaagaggccactcttatacagactggaattgaccctgatctggctatggcctgggcagcaggtttggaagatgatgtttgggaaaacaacgcaccagctgtggataaagtaaaggatttccttgctggcgctggaactgatgctcctgatgtggatgatgaggaatacatgaattctaggccatcagtcggttatgatgatatgtgggccaagacaattcttgaaacatatgaagcagaggatgatgatggaagatcatctgggggatcctctcctgagtcaactggttctgtagaaacatccatatcgtcccattttagtggcatgaactatccgtcgttgttcagttcaaaaccatcaggatatggggcttcacaacaaacgatacgtgaagaaccaccatcatattcaacatcagttctacagaaacgtgagtcattcgaaaacccccttgctgggcgtggtggtcggagttttggatcccatgaggacgaagacaggagttcagggaaccctcaatctgggaaagcactgtatgacttcacagcaggtggcgatgatgagttgagtttaactgctggagaagatgtggaaatcgaatatgaggtcgatggttggtactatgtaaagaagaagagacccggaagggatggaaagacagcaggtctggtccctgttctgtatgtgaattcgtgatagctatgagtcctgtgacataatgctctcgaaagctgattcggagtaaacgggcatacatatggcgtctggggaggttccttctgtgatcttagtagtgcacataaccttttttgagctccctagcatttgacaggcacatgtccttgttggaggccaaattcaatcatcgtgatgtctgtaagacgcagcaattttcttgctggttgtgtttctttgctttatacacaccacgagtccattcaattcattgtttatgtgtagagatgtacacgtgcttcggggttttacctttcgtgtgctattctggcccgtctgttatgattgaaagacgcagtttactcctctagttctccatcagataggcattattttgtcaaattgttgctctattggaggctgtaaactgctgaaggctgtatcttgctccccaccattatttcggtcttgtttaaggtgattcagtagaagtagtaggcctgttaatttgtgtaaattttgtcttgtgcggagtatacatacatgaacacatacgacaatggaatggtatgcgtcgataactttcttactctgaacacttaatgcagtatacgctatattctggcc

SEQ ID NO: 18041 - DNA, 3214 bp, Oryza sativa
  ref <308>: DATABASE ACCESSION NUMBER: AK068454
  ref <309>: DATABASE ENTRY DATE: 2001-12-06
gacggccaggccaccgtttcgtaggatccggagcgcgacaagggggaaaagcttccctccacgcaccaccccacggccctcaaaaacctaccaccccacgctccccggttcggtggttgccgccgcctgccacagcgtcgcatgcctcgctccctcgccggcgacctcaccgatccggagatggcgcagccgtacatgaagaaggatgacgacgacgaggacgttgagtactcgccattttatgggattgagaagggagccgttctgcaggaggcaagggctttccatgatccgcagcttgatgccaggaagtgctcgcaagtcatcactaagctattgtatttactcaaccaaggggagacattcacaaaggttgaggccacagaagttttctttgcagtaacaaagctgttccagtccaaggatgctggtcttaggcggctggtgtatttaatgatcaaagagctttcaccatcatcagatgaggttatcatagtcacaagctcattaatgaaagatatgaacagcaagacggatatgtaccgtgccaatgctatcagagttctgtgtagaataattgatggcaccctccttactcaaattgagagatatttgaaacaagctatagttgataagaatcctgtggttgctagtgctgctcttgttagtggcatccatctgcttcaggcaaatccagaaatcgtgaaaagatggagcaacgaagtgcaggaagctgttcaatcaagatttgcacttgtgcaatttcatggcctagctcttcttcaccagatcagacagaatgatcgtttagctattagcaagatggtttctggcttgactagggggtctgtccgctcacctcttgcacaatgtcttctgattcgttacacgagccaggtaatacgcgagtcaagcatgaacacacaaaccagtgatcgcccattttttgattatctggaatcatgtttgagacataaatcagaaatggtgattctagaggctgcacggaaaatagcagagatggatgtgacaagtcgtgaattagcaccagcgattactgtgttacagttatttttgagttcatccaaacctgtccttcgatttgctgctgtccggacactcaacaaggttgctatgacacgccctttggcagtgacaaactgcaatgtggacttggaaagtctgatgtcggaccagaataggagtatagcaaccctggcaatcactacacttcttaaaacaggcaatgaatctagcgtagaccgcctcatgaaacaaattaccaatttcatgtcagacatagcagatgaattcaagatagttgttgttgaagctatacgatctctatgccttaagtttcccctgaagtatcgttcaatgatgaacttcttgagtaacagtttgagagaagaagggggctttgagtacaaaaaggccatcgttgattccatagtaactcttatcagtgagataccagatgctaaagaaattggtcttttgtatctctgtgagttcattgaagactgtgagttcacctatctttccagtcagatattgcatcttttgggaaatgaaggaccaaggacatcagatccaagcagatatatacgctacatctacaaccgtgtgatactggaaaatgccactgtccgtgctagtgctgtcagtacattggcaaagtttggtgccttagttgatgccttgaagcctaggatctttgttcttttgcgtcgttgcctgtttgacaccgatgatgaggttcgtgaccgtgctacactttatctccaaactcttgatggtgaagttgctgttggtagcactgagaaggatgttaaggagttcctatttggatcatttgatgtgccacttgccaacttggaagcaagtcttaaaacctatgaaccctctgaggagccttttgatatttctttggtgtcgagagaagtcaaatcacaaccacttcaagagaaaaaggccccaggaaagaagccacctgctggtgctcctgctcctgcacctgttccagctgttgatgcttatcagaagattctctcgtccattcctgagttctccgggtttggaaggctcttcaagtcctcagaacctgtggagctgacagaggcggagactgaatatgcgattaatgtggttaagcacatatacagtagccatgttgtgttgcagtacaactgtacaaacactatacccgaacaactgctagaaaatgtgactgtttatgttgatgccactgatgctgaggaattttcagaagtttgttcaaagccacttagaagtttgccttatgattcacctgggcaaatttttgttgcttttgaaaagccagaacatgttcctgctactgggaaattttcaaatgtgctgaagtttattgttaaagaggttgacacatctacaggggaagttgatgaggatggtgtggaggatgaataccagatcgaagacctggaaattgtttcggctgattacatgctgagggttgcagtctccaacttcaggaatgcctgggaaaatatggacccagaaagtgagcgtgtcgatgagtatggacttggtgttagagagagcttggctgaggctgtgagtgctgtcattagtatccttggtatgcagccttgtgagggcactgaggttgtaccaaagaatgcaagatcgcacacttgcctgctgtctggtgtgttcatcggcgacgccaaggttcttgtcaggctatcgtttggactgagcgggcccaaggaagtggcgatgaagcttgccgtcaggtcagatgatcccgaagtcagtgacaagatccacgagattgttgccagcggctaaagcggggcgccctgcccctgatataaaatgatgtagagccggtagatagtctttttcacctttcgtgataaaatagttatactacacctattgatgcctcactttttacagacaacactcctgcctcgtgcgtattattgctcaggtagtgtattagtgtatcagatcatgtccccttgtgtagttgtgttcaccgctcggtttgattttttgtttcttttctttggacagtttgtttacttaatgtggatataattcattggtgaaccgtgaacatgctgcgaatcctgtgacctgtgagttgtcacactaacagtaacaagttagttctcgtatgctcacggaaaaccactaaataaagtgttgattagtttgagct

SEQ ID NO: 18042 - DNA, 1100 bp, Oryza sativa
  ref <308>: DATABASE ACCESSION NUMBER: AK068455
  ref <309>: DATABASE ENTRY DATE: 2001-12-06
ggctcagctcggcgatgagatgatgccaccaccagttcaaaccctacgcctcctcctcctcacccctttcccgccacctcctcgcctccgcttccaccgccttacggccacagggaggtccgacaatgccgccgcggcgtccggcaccacggcgagggagcgccgcctcgccaaggtgcgggaggagcgccgccgccgtcagcacgagctcgacaacacctatcccggctgggcaagggttctggagaatgcctgcagggacgacgacgaactccgcgccattctcggtgatagcatcgggaacccagagctcatgaagcaaaggatccaagaaagggtacgcaagaaaggcagggcacaattcaacaaatccaagacagggtctattgttgcattcaaagtcagctttcgagacttcaacccactaaattcattcatttggtttgaactctttggagaaccaacggatcgagatgttgatctgcttggcggtgtgattcaggcttggtatgtcatggggagattaggagcttacaactcttcaaatttgcagctggccaattcaatgctggactatgacccttcatatgattctgatcaagcttctggtgtgatgccttcatctttccatgatatcagtgatgtcgaattccaagacaattggggcagagtttgggtggatcttggaacatcggattatcttggattggatgtattactcaactgtcttacacaattaagctcagagcacttgggcatcaaacaagtggtatttggtggcaaaaaaatgggcgactgggaagaggggatgaagaactctgattacggatacaggcatttcaagatatagctgtaccgaggagtgatatgcaatggtcatgtgagggaggccttcatatgtactccaggcctctggggattctccggcctatagtggcaagacttttcacttgaagcagagaaattttttggacgactgaccaagattagtgtgcctagattgatcttgtgctcgtgtgtgtaaataattttaattttcctctaggttgtattagaactgaatccaacaatccagtaaaatgtattgtagcaattatatc

SEQ ID NO: 18043 - DNA, 2911 bp, Oryza sativa
  ref <308>: DATABASE ACCESSION NUMBER: AK068456
  ref <309>: DATABASE ENTRY DATE: 2001-12-06
gtttcccttttctcctcctcctcctcctcctcaccgccggcggcgagcggccggccggcgagcagagcagagcagaggagagagccgacctccatctgggctccaatcgaagctgaagcgcctcgtcgtagtttgggcaaaagaagttttgattttttttatttattttgggtgctgaggaagagtgtaattaagctgtgaggattgagaagatggatggaggtgggacgccggatggggatccggtgccggacatggacatgctcatgctgtcatcagcgctcgatggcctcgacagctacaccgacctcgtcgcgggttcatcggtagccgacagcatcttctcagctcttacctgtttcccaccatcacaagaacgattgctgcacgtctcgactcctgtgggttctaattctaggcaagatgattctgatgtttccatcactaaggagggtacaacaacaagaagaggtgattgcgccgccggattagcttcaggtgagccggtggccgcgggaattggctctgtcccgaagccgttcgacggcgtcacactgacggagaggatgctcagggcgcttgcgatgctcaaagaggcgtcgggtggcgaagcgatccttgtgcaggtctggatgcctgtgaggaatggggagcagcatgtgctgactacctctgaccagccgttcttgctcgatcagaagcttacgggatacagggaagtctccaggcagttcacattctcggctgaagaaggacccggtctgttccccggattgcccggccgggttctcatgtccggcatgccagagtggacgtcgaatgtgatgtactatcatggctcggagtatttgagggttgattatgctaggcgccacgaggtccgtggatcccttgcgatgccggttttcaactcaagtggtgggtcttgctgtgcagtgttagaagtagtaatgacacgagagaaggataacttttgcttagagatggtcaatgtttcgaatgctctgcagagttctataatttctgatgaggcctttcaaatgattaacttcgggtgaattcctatttctcctacccttggtttcacacagactacatctggtctttttcttaaagagaccataaaggtattttctatctcgagaaaaaataatctatagtttcctcgtctttgaggatacaaggtttgtactatcctaggaggattaatcagcactctcctgtactgatccctccctagtctgctctttgtccttggatttgatgctaccaatatacatttcacactttggttgttccaggccttcaataacccattattcctcctttgtgctgcccaacgttacgcccaattgcaatgcaatactgctaagtacctcttcaaagaattaagtactgtaggtcatatgtttgccttccagtttctcattccaaatctatgtgtttcactaagtcggatcaatatcatgtactggagcaagaagaatgattggaagcataaataggtaccaagtttgtctaatcaggaattagttttacttggtagttggtacatccgaactattggtgtgctctgtgcactcatcaactagattacttaaaatgctttcttttattatgtggatggttcagctatgagacatttagctttatttttgagttatttatatagttaatatcaattattatttgctcttatcaccaatattattagtttctattctaatttctatgcatggtacaaggtttgacttttgctcaaatatgcttaaaactctccagagttatggcttgttttttcaccgtagagttgctatggctactttttttcacttgagggtgctcataattatttccatccgagcgtgcatatatggttgtaatttgttctagaacattttgttataaagttcatttcatgattgaattagcctctgagcttaatagtgacattgtaatcttgcagtctgttcagttaagcactgtcaatgcatggagacattctcagagctattcaagggaccagaaattagcattgatggaaatattcgatgttctgcaagctgtttgtcaagcacacttgctacctttggcacttgcatggattccagtttgctccaaaagagatgtgcttgtgtcagtagaatatggtgcaaattttggtaaaaggaacaaagaagtgctttgcatagaggaatctgcatgttatgtcaatgacacgagaatgcgtgattttgtccaagtctgtgctgaacacccccttgagaaaggacaaggtgtcgctggaaatgcatatttatcaaataatcccttcttctcatctgatgtgaaggattatgatatgcacgcttatccacttgtcaatcatgcccgtaaatttggtcttcatgctgctgttgcaattaggctgcagagcacatacaccaaaaatgatgactatgtgcttgagtttttttcttccagtcttgtgcaaaggtggtggagaacaacagctcttacttgacagcatatctgcgactatgcggagagtatgcaaaagtctgagaactgtttcagatgctgagttgaaggaagatgttacaagaaagccatcaaatgaaaatcgatcaggaacaagatgcccttcacctgttaaccttatttattcaggccgagaaattgatgtatcgaatgaaacaaaaacaaatacgcctttggaatatcagatagagggcattgatgaacaactatcagatacaaaaagtactaacaaggttgtttcatcctcaacattctcactatgtgctttcatcctctcttatctgtcgtgtggtctgtttttctttgtgtgctttagtcattcagacatgaacaattggaagtgataactctgcaggatagttttttcagtaaattgtttgaatagttcctt

SEQ ID NO: 18044 - DNA, 2060 bp, Oryza sativa
  ref <308>: DATABASE ACCESSION NUMBER: AK068457
  ref <309>: DATABASE ENTRY DATE: 2001-12-06
gagacgagctgcaaaaatggcggcacccgcctcgccactccaccctctcgccgccatagcagcagctctcctcctcctcctcgtcgcagccccctctgcagcagctgcagctagccccgtcttccccggagtccctcccctgcagctgcaagctctgcagcagcggcggccggcgagctccgccggcggcagcaggtatgtcgtcgccgcggcggcggcggcggccggagggaacggcacagcggcggcggcgaagccgttcacggcgcactacttcccgcaggagctggaccacttcaccttcacgcccaacgcgtcggccgtcttctaccagaagtacctcgtcaacgacaccttctggcggcggagcgccgccgccggcgagacgccggccgggccgatattcgtgtacaccggcaacgagggcgacatcgagtggttcgccaccaacaccggcttcatgttcgacatcgcgcccagcttcggcgccctgctcgtcttcatcgagcatcgattctacggggagtcgaagccgttcggcaacgagtcgaacagctcgccggagaagctggggtacctgacgttgacgcaagcgctcgccgacttcgccgtcctcatcaccagcctcaagcacaacctctccgccgtctcctcccccgtcgtcgtcttcggtggctcctacggcggcatgttggcttcatggttcaggctaaagtatccccatgtcaccattggcgccgtcgcgtcctctgctccgatcctgcagttcgactacataactccatggagcagcttctacgaggccgtctcgcaagattacaagtctgaaagcttcaattgcttcagtgttatcaaggcagcttgggatttgatagatgagaggggatccactgatgcagggctcttacagctcagcaaaaccttcagagcctgcaagactgtgaaatcggtttactcgttcagaaactggctatggacagcatttgtgtacacagccatggtggactatccaaccccggccaatttcctgatgaatctgcctgcctatcctatcaaggagatgtgcaagatcatccacggcttccctgcaggagcagacatcgttgacaaagctttcgcagcggcgagtctgtactacaattacacaggagatcaaacatgcttccagttagaggatggagaagacccccatggcctcagtggttggggatggcaggcctgcacagaaatggtcatgccgatgacgatatcgaacgagagcatgttccctccattcaccttcacttatgaggggaaatctgatgactgtttccagagctacggtgttcgtccgagaccacactggatcaccactgaatatggtggaaatagaattgacctggtgctcaagaggtttgggagcaacatcatcttctccaacggaatgcgagacccatggagccgtggcggggtgctcaagaacatatcatctagtatcattgcccttgtcacggagaaaggagctcatcatttggacttcagatcagcaactaaagatgatccagattgggttgtagaacaacgaagacaagaagttaagatcatacagggatggatagatcagtacaacgaggaccttgcacagatatcaaaatgagaagatgcagttactgcgacagacaatcgaaacatgagactgtctacacagtaatcaactgtttttggctacatggaaaaaataaggaaaaggaatttttctttcttgcaggctgttagacagaaaattaaattaaggtaacatacagtggaaactcaataagtcactcagaaaggttgtaagcggctaacccgcgaaacccacttataggccaaaataagccacaaactcgtttattttgacctataagtgggttcgcggcttacccacttacacccagtcagaatcagaaattgtgacacccaaatattccatggttccatttatctcccagtaaataattggttctatatctgcacagtaaatggtcatgcatgtaaaacaagcgttatctctataattctaagaaaggaacagtattgcc

SEQ ID NO: 18045 - DNA, 4185 bp, Oryza sativa
  ref <308>: DATABASE ACCESSION NUMBER: AK068458
  ref <309>: DATABASE ENTRY DATE: 2001-12-06
gagcagtctctcttcccatctcatcttgcttcccctcccctcctcactaccatctactcccatcccatccgccgccaatccgccgctgcagccggcaccggccttcttccacgccggcggccggcacccggcaggcagagcctacacaccaggccgccctcctcctcctcctccccggccgccggtacctgaggggaagaagcttcgcagctcgggctctcacgccctgaggcgtccggagttcgatgtccgtttgcatctcatggatccgcatcacctgaaccgccccaccgccgatgacgctgccgccgccgacgacgactggggtaacgcgcccccaaaacacactctcccctccccgagtccccgtcacccgcggcggccatctctctctcgttctttctccctgttgtttaaacctttatctaggcttgtaatcttgatgcgcgggtgttttagggatgtggaagaactagaggtgtgatttagtctgtgctgtgtttgtggtgccatggggctcaatcaaatcagacagccataactagtaattaccaattagagatggcgagatttggttaacagttttagcttcaacgactagatatgcaagtacccgtaggtgattgtaggtaattattactaattgttcatagtgccgataaggaattactcctatttaaacttaattgtaggtaatgcagtggctctgttgagttacgaatagctgtttaatagaacctaaattatgaatagctgtttaatagaatctaaattgcgactacaatgataaacgggtgaaaaaggtttgggagctttttttagtcatctgctatacctctattttttacttcgcagtctataatctgagctgtcagccattctagttacagacatgtttaaagttatttagatttgttgtatgagatttgtatcacttaatttgttgtcaaagtacttttcatgattataccttgatatatacccactctaagtaatcttgaagaccatgataggtcagaaaggtcaacaaaaaaaagagttagcagtaaagaactatgatgctttatcatcaactcattctttagtcctgttttggatagggggatttggattcaaatttgaactaactctaaagaaaaaccctctcacccatacagtccattaggataatttagacttattggtaacaataaaattgatgtttcagctaattccttgttgatgttctgttctctgttttttatagccattgcagacagtacggaatcttacataggcttgattttcgcaaagaaaaaaactacactaatgttggtgacctttaatttatagctgcctttgttgtgattccattgagcatttttttctcactacctcttgcgtgatagttttttcaataacttgatctaaaactatgaatttttcattttattcttaaactgcaattaatctgcatatgtattatttttttatcattttcatctctcatctcatccccatctaatatcaatagaatccaactttctgtctatccatcgaactgtttcttctccatgtcattgctcatttacctgctcattattcagtgccaatctgctccatctctctccttcctgtcactattgtgccttacagattcatgtgaggaaactacactaatgtagtggaaaaaccaaagacctaaacaaactgatggcatgaattttaaaaaagaaactaattcatatcatagtagacaaatagttctacattggaaagactatttctcttaggaaaaaggcaactcatgaggtggtagggggatgacagactcaccgccaccaccactaggtcctttttatatactgtagtggagataaatttaactgaacctcggtaagaaaaaaaacattcagtgatgtctgagtcaaaagaaaatattggtgtggcatctctagttactatgtgacaaagtttggagtatagttatcactgaaattgctagttgtagttctttatcaaaatcatagctccacgaacagaaaaaatcaagcatggtcttccaattgtgccagactttgtatcttctagtttctctccaaaccaggttcatcaaataattactcagaccaaagagtgacgtatgctctatcaatccatgttgctggggacacaggtcaaagatctcttgtaaagaactaaaaatggtttcatgtgtcttgagtggtttcgtttgataagttttgcaggttttaccttgaaaatggttgagctgcacatctgaaacctaaatttttgggttacattataaattataaaaatgttaatgctgcttttgatatttgatgcagtagaaaccacaccagctagtcagtcatgattaagaaagaatgacaagagcaatgatgactagatgaattgcccaggaataataaatggtgtaatatatgatattcattattgcagtttcatatctaggataggggaactgaaatttatgttagtgagctcaatagttaagctatggtcatgacggcatgtatacagatgtcaggtgaggactcctttatcgtcggcaccagaacaaatgtggcaacaatgacgcagcacaaattcaggattagattgagttagttttatctttctgggcttgttagttttcagttgagaataatgtggctggcaacagcattgtataagctgaagatcggcctattttgcttagcttggagattaggttatgctgagcttgcgtcctgcctcttccacgcagtgcctatgatgactccgccacgccatcgaggtccagggccacatcttgtaaccagcttcaaatatagtttatgttgcgtttcctcatctattatactagcccgtgacaatagaagccataatgaggcacattagaaaggactaaactatacattacttgaatggtatggcacagtggcacagattccaagtttctagccaagaagtaacaagtaatacaaggaactgtatgtcaactcatccaaagattccttgatgtggactgacataatgttggacaaacacaactaatccatctcattgtcctaggctatagccaatggcacgttttaaagtcaccaacataaacacatttgaaattgctcttacaatatttattatgccgtttcaattgtacctaaatgcccttttagacatcagatctcacaggaacaatagttagatattcccatgaaaagtagagttagataatattttgcggctttgcaaagataattgataggcaagatgatgaagcagtgtagcatttgactaaatgtggaaatatgggctgcatctctaatttctatgcctcctaccctgaagctgttctttccactcccaagattctgcttgctagatcttgttactagttgcatttgttttcttagttctcttatcagttaggtgatttctttaggctgatttggttgctcaagttcatctgtctttggatttgtctgcaccccttcgtttccaggcttctttacgttttctttgtcaattgctcctgacattattatactttcatttggaggatcaatcaccagttcagtattgaggaaaatgttcttacatgtgcgtaatgtcacagataatgatggctttgtgataccaagcttgagtgttgaagaatctgatcttggtgattgggaagctgcacaggtttctcgtcctcaaccacctccaaaggctaccaaggataccgagaagatatatcttggaccgcacggcgcaccgccatctcgagcaaagaagcaagaggacactgcagcagctgccactgggtaccgcgacaagagcaaggtgaaggaagctgatcaaaaggtgcttggaactggccgggacaacaaagggggcaataacttcaaccgctacaacaatgctggccaccatgtcaaggaaccctacaagagatccacttgaccttctcctctccactgaggcttgctccctgtgaaactttcctctctcctatatcaacacagcttgacgaagccaaatttacgcgatttgtcggtgtgatggatatcattgctggaattaggacaacctatcttgcagcggcatgtatacctgaactgtggccatgtacgtaccgtctgtttgctactctgggctggagcaatgcgtttgctgattttctttcgaatggaaaaatatgtgttgttccgg

SEQ ID NO: 18046 - DNA, 3464 bp, Oryza sativa
  ref <308>: DATABASE ACCESSION NUMBER: AK068459
  ref <309>: DATABASE ENTRY DATE: 2001-12-06
gggggggagctgctgaggactgaggtaggggaaagaagagaagagaagcaagcaacaccaacagcaacacgcaaggagtggaggactcttcaaggtctggagagtggagaggaagaggaatcctcctcagtcctcaccttcagatttcagaacacaggcaatcggccctagctgcaatccaacaagatgggcatgcctctgctgctgctgctgctgatcctcgtcgctgctggcccccaggcaggcagagctgcaaagccaatcccaaatctccagctcatgaccaaggagggcggcagttcaagaatcatccaggacgacatcataaaggcaatcaacaagcatcccaatgctggctggacggctgcacggaatccatactttgcaaactatactgtaaataacaacaccctcctgttgttgttttcttttttttttttgcggggacaccttcctgttgttgttagtattgcatacatcaaaacatttatctcatgcttgttcggtggcctcaataatcctcctgtacagactgcgcaattcaaacatatccttggagtgaagccaacaccgcatagtgtgctaaatgatgtccctgtcaaaacttatccaagatcgctgatgcttccaaaggagtttgatgccaggtctgcatggtcacagtgtaacacaattgggaccatacttgatcagggtcactgtggctcgtgttgggcatttggtgctgtggagtgtctccaggatcgtttctgcattcatttcaacatgaacatttcgctatctgtcaatgacctagtggcatgctgcggtttcatgtgcggcgatggttgtgatggaggctatcctatcatggcatggcgctactttgttcggaatggtgttgttaccgatgagtgcgatccatactttgatcaggtcggttgtaagcatccaggatgcgaacctgcttatcctacgccagtgtgcgagaagaaatgcaaggtgcagaaccaagtttggctggaaaagaagcatttcagtgtcaatgcatacagagtaaattctgatccacatgacataatggcagaggtctaccaaaatggccctgtagaagttgctttcaccgtttatgaggattttgcacactacaaatcaggagtatacaagcacatcacaggtggcatgatgggtggtcatgctgtcaagttgattggatggggaaccacggatgctggcgaggattactggctgcttgcaaaccagtggaacagaggatggggcgatgatgggtacttcaagatcataaggggcacaaacgaatgtggcatcgaagaagatgttgttgctggtatgccctcgacgaagaacatggtgaggaactatgatagcgccttcggagtcggaacggccatagtttgactttaatcaatgttaatggcctcaaatacggttgggatcatgtaaatttgtcctgggtgatttctggattttgcacacacgggcaggcttctcgagactgatcggagtttaggctacttgtccagaaacacattggaataatatctgaataatagatgtattctctctctctctctctctctctctctctctctctctctacgtccggttaactacgggatgtgacgtagaggtgttagggaggagcgcacgttaatctcgctgtaatccaagttgagacttgaagaattaatgtgtatgctgtaagtcaaatgatatgcgatctgtgcgctgcttactagtatcccaaaagtatggattttgttcaatcagtctacagcttgacacaattgcagcagcaagcactcgcttggacgcatctagctccaaattcctgcaaaacactggatatcttggttcaatgggaaccgagaagtcggacaatgacagcaggcatcgatttcaggattccccattcaaggtaccagaatgcagatacagtaaataaaaacgatgatacattcatatggacagaatcacagaatacaaacagcgcagagcaatcggtacaatcgacaacagatcgaatggcacactgcctttttcctatcagtaagagttagctcagcgactccgagacgcagccgccatggccgtctccatggcattcttgaggagcaacatttccttggcattcttgaggagcaacataaacgatgatacattcataatcggtacaatcggcaacagatcgaatggcacactgcctttttcctattagtaagagcttagctcagcgactccgagacgcagccgccatcgccgtctccatggcattcttgaggagcaacatcatttccttggcattcttgatggctttcctgaggaggagcaacagcaacatcccgcggcggccagtgctccaccagcctctccacgggcactttgacgacatcgcggcgaacaccgatatctgagacatatcgccccacgcagtacatgccgctcgtcacaaccaccagcccaccagcgctggtcgtcaggaaccggagcggcgacgaggccaccgcgctgaaggcagccgtgagggaggccagctgcccgctgcgccccacgctgaaagcggtctccaccagcagccccgtcttgcagtatatcgcaaagtcctcgcaattgttcttgaacaggctatacgtcccgaacccgctgttcaggaggtgctgggcacggtggatcacgatgtcggcggggtccgaggctgccagggtgcacgttcctcctcgcgctttcacgaggaagaaagcgggggacaccgcgtagtcgaacaggtacggattgcccccatccaagaagcaatcgaggcacgacattatgaccccctgctgcttaatcaggtgaccacatttctcgcagggaggaccctcctccgttgctggagatgagctgaaaaggaacatgtccaagaatgttcctgtcccaatttcatgtccagttgctcttgtaaaatgaataaccatggcatcaccaatatatatccctgaaaatgaagttcaatttcgggaacaggtcagagacatggtcttagcgagtatccttgctccttagcaaataagtcaacaggaaaacatgaactgactgtataatgtggggttaacggacatggagcacataaatgttgcgtggcatgccaatcaagtaatgagtgttatgttttccataatagatggcaaatgacatcgccgacggtatattgtgcatatgtcggttaccagcatgtaggagaggctttattttcgggaatgcgcaaaatgattgcacgtcaatatattagaataggagaggctttatttggaaaggggatggccattgtgatggtggattggtgggcattgtttagttaattgtctaaggtttgtacaccaaaaaaaagggcaggttgggcataaaatacctacctgtgttcgggagagctctaaatttgagatggatttatcttaaatggaaagataagcagaatccttcgattg

SEQ ID NO: 18047 - DNA, 1252 bp, Oryza sativa
  ref <308>: DATABASE ACCESSION NUMBER: AK068460
  ref <309>: DATABASE ENTRY DATE: 2001-12-06
gatttctaccccttcctccccttcgcctccctctccgccgccgccgccgccgccgcagccatggcgacgcggcgatgcctcctccgcctcctctcgcgccgcctcctcgcccacacccctcaacccgcgtcgctggcctcgatcgcgacgcgaaccctagcctccttggccaagcccctcgtgccgcaggcatcccgcgtcctcgcctccccccgcctcttcccctcgcgctgccactacgcgtcgaaccgatcctccggcgacgaggaggagggggacgacgacgatcactacgacgaggaggggagcggggatgagtggggggaggaggaggaggaggccgtggcggcgaagccccccagcgggaagacggaggaggagaaggtggcggaggcggcggagatagggtacacggtggttggcccgctcggtgccgacgagaagcccttcaagccctacgagcccgtgttcgccgtcgtccagattggttcgcatcagtttaaggtgagcaatggcgactcgatcttcacggaaaggttgaagttttgcgatgtgaatgataagttaattttgaatcgagttctcatgcttgggtcacaatctcaaacagtcattgggaggccaactcttcctgatgctactgttcatgctgtcgttgaggagcatgccctagatgcaaaggttatcatattcaaaaagaaaagaagaaaaaattaccgtcgaacaaagggccatcgtcaggaattgacaaagctgagaataaccaacattgaaggaatagataagtcagaggccactgctgttgctgcttaaattaagatgaataatgaaggaacatggcttcatgcccaggcagtccttcatactggttttagtgtccaatcaaatcttgatgcggcgtgctgttgcttattgtcagtcactgattgaaagaaccatatctgaaggtcttgtctatgtatccacattttgggaacgggccactcaagctatgccctttctcacaatgccaatgtcttgaccagtttggatattctgatgtggatcacatcttgtagttacagccaaactaactttttgttttctttctccatttactagcgtacctccttgaatgtgttccaatgcatcagtgccatgtataccgttctagccatgaataatgaaactgaaagtttgtggttcccatctatttagaaatctgaactgaaattgtacatgcttatgctaatacaaccagatgcgatgatat

SEQ ID NO: 18048 - DNA, 1732 bp, Oryza sativa
  ref <308>: DATABASE ACCESSION NUMBER: AK099055
  ref <309>: DATABASE ENTRY DATE: 2002-08-28
gggatagacacctcctgaactccaccgggagagagaccggatcgacctcgcgctttctccgtccaatcgaccatgccgacggcgtcgccagcccacgcggtgttcttcccgtacccggtgcagggccacgtcgcgtcggcgctgcacctggccaagctcctccacgccaggggcggcgtccgcgtcaccttcgtccactccgagcgcaaccgccgccgcgtgatccgctcccacggcgagggcgcgctcgccgccggcgccccggggttctgcttcgccgccgtccccgacggcctgccgtcggatgacgacgacgacggcccgtccgacccccgcgatctgctcttctccatcggggcctgcgtcccgcacttgaagaagatcctcgacgaggccgccgcctcgggggcaccggccacctgcgtcgtctccgacgtcgaccacgtcctgctcgctgccagggagatgggcctcccggccgtcgcgttctggacgacgtccgcttgcgggctcatggcgttcctccaatgcaaggaactcatcgacagaggcatcattccactcaaagacgctgagaagctgagcaatggctacctcgacagcacggtggtcgactgggtgccggggatgccggcggacatgcgcctgcgcgacttcttctccttcgtccgaaccacggacaccgacgaccccgtgctggccttcgtcgtgtccaccatggagtgcctgcgcaccgccacgtccgccgtcatcctcaacacgttcgacgcgctggagggcgaggtcgtcgccgccatgtcgcgcatcctgccgcccatctacacggtcggcccgctccctcagctcaccgccgcatcacacgtcgtcgcttccggcgccgacccgccagacacgccggccctgagcgccgccagcctctgcccggaggacggtgggtgcctcgagtggctcggccgcaagcgcccgtgctccgtcctgtacgtcaacttcggcagcatcgtgtacttgacgagcacacagctcgtggagctagcatgggggctggccgacagcggccacgacttcctgtgggtgatcagagacgaccaagctaaggtcaccggcggcgacggccccaccggcgtgctaccagccgagttcgtggagaagacgaaggggaagggttacttgacgagctggtgcccgcaggaggcggtgctccggcacgacgccatcggcgcgttcctgacgcactgcgggtggaactcggtactcgagggcatctccaatggcgtacccatgctgtgctacccgatggccgccgatcagcagacaaactgccggtacgcttgcacggagtggcgcgtcggtgtggaggtcggcgacgacatcgagagggaagaggtggcgaggatggtgagggaggtgatggaagaggagatcaaaggcaaggaggtgaggcagcgtgccacggaatggaaggaaagggcagccatggctgtggtgcctagtggaacctcatgggtcaacttagataggatggttaatgaggtcttttctcccggtaacaatatgtaaaatgtcgagatttgctgttgtttctaaatgctttccatgtcatataaatttaaataaggacgatatgtgtagggggcacataatatgcgctcagtcgtgcgggggcacgccccacgcggtttcctcctctagtctcttatgtatatatttatatatgtatgtatacgtttttttt

SEQ ID NO: 18049 - DNA, 909 bp, Oryza sativa
  ref <308>: DATABASE ACCESSION NUMBER: AK068461
  ref <309>: DATABASE ENTRY DATE: 2001-12-06
ggaacccccaaaatctcacaacccacctcccctccgcctctcccatctacccaccggcgggcggcggcggcgacatggagggtggcggcgaggagttcgcgatcggggtgctgatctccgtgaagaccaccctcggcgaggagttcgaaggccagatcgtctccttcgaccgcccgaccaacctcctcgtcattcaggaaggcgtggggagggcagagagaggtgagcggaggaacgtgcgggtgctcaaggcgaactacatccgggagttctccgttgtaggcaaggccgacgacccgctcgacccggccggctgcgtgctcgacctcgccgccatccacgcccgggaggaggccgctctcagacaagctgagattgaagccgagagaattggtgttggtgtcaccccagaagctcaaagcatatttgatgcattgtccaagacgcttccagttcagtgggacaagactgacattgttgtaatgaaggaggttcgtgtatgcaatccatacctgcctgaaaatgtcagtggaggaacatctgctgcaaatgaacgggttaagaaagtgcttgactttgaaaggaaaaggctacatgtgcgtgtacctggccaattctaacttattcggctgcttttcacctgaactccccctttgtactctactttaagggctgaatcatcaatagatttttctaaaatttgtttctgcaaaatccatgccataaactatctcatcagctagctaaatctgtatcctgttatagatatctcatcagctagctaaatctgtatcctgttatagatgtgcccttcgaataaattgtcatgctgatgttaattcagctgctggttgtaagagggctttgattgaggcaaacttagaaagtaaaatttgattgatggcattg

SEQ ID NO: 18050 - DNA, 2383 bp, Oryza sativa
  ref <308>: DATABASE ACCESSION NUMBER: AK068462
  ref <309>: DATABASE ENTRY DATE: 2001-12-06
gtgaggagtcgaaatgtgagttgcaactgaactgagagagaagcatctcgccacgctcgcgctgcactccacgaataaagccacagcacgccccccgatccgatcgatcccccttggatttttttttccatttcgattttgattttgatttgttgttcctcaacctcaactcgctcccttgctgctgctgctgctccgagtccgagccacgcgcgcgcggcgacctagggttggcgccccagtctccggccatggcgttgtggtggccgctcctggtgctcgccgccgcctacgcgctctgccgcatcctcctctttctcatcccgcccaccgtcccctccatcgatgtcgacgcttccgacgtgctcgaagacgccaaccagaacaaggaggatagctacatctacataccaccaaggaaggggaaaggagctcagactgacaaggtccaatgctatgagccagcaactatgaaatacttgggatacttccctgcattgacgcctgatgaggttaaggagcatgttgcgcaagccaggaaagcacaaaagatatgggcaaaaagcagcttcaagcaaagacgccagtttcttcgaatccttctaaaatatatacttgaacatcaggatctgatatgcgagatatcatcccgggacactggaaagactatggttgatgcttcattaggtgagataatgaccacctgtgagaagattacctggcttttggatgagggtgagaagtggttaaaacctgaatacaggtcctgtgggagatcaatgcttcacaagaaagcaaaagttgagttctatccacttggagttattggtgcgattgtgtcttggaattaccccttccacaatgtattcaatccaatgctggctgcaatattctctggtaatgcagcagttataaaggtttcagagcatgcaagttggtcaggctgcttttattttcgtatcatacaagcagctcttgcagctgttggtgcaccagataatctggtgcatataataactggttttgcggaaacaggtcaagctcttgtatcttcagtcgacaaaataatatttgttggatcacctggtgttggaaggatgatcatgaacagagcatcggatacattaatacctgtaactcttgaacttggtggtaaagatgcatttattgtatgtgaagatgtagacttacccagtgttgttcaagttgctgtgagagctgccctgcagtctagcggacaaaactgtgctggtgctgaaagattttatgttcacaaggatatctattcaacatttgtttcccaagtggtgaagataatcaaatatatatctgtcggtcctccattatctggcagatacgatatgggtgctatctgtatgatagagcactctgagaaacttcagaatcttgttaatgatgctgttgacaaaggtgctgagattgctggcagagggagctttggccatctgggtgaagatgcagtagatcaattctttcctccaactgtcctggtgaatgttaatcacacaatgaaaattatgcaagaagaggcatttggacctattctgccaatcatgaaattcaattccgatgaagaagttgtcaaacttgccaatgactccaagtacggtcttggttgtgctgtcttttctggcaaccagaagcgtgccatcaaaatagcatcccagctacactgtggtgttgcggcaatcaatgattttgcttcaagttatatgtgtcagtctttgccattcggtggtgtcaaagatagtggatttggaagatttgctggtgtggaaggtttgcgggcttgctgccttgtcaaggcagttgtagaagatagatggtggccatatgttaaaaccatgatcccaaaacctattcagtatcctgtctccgagaatggatttgaattccaagagttgctcgttgaaactctctacggccttagtgtgtgggacagattgcggtcacttgtcaatctgttaaagatgatttcagagcagaataattctcctgctaacaccaggaagaaaagccgatgatcagatacggaagagtttagttgagacctctagcgatttgctcttatgatgtacccatcggtgatcgaccctttagaaagctatccccacgctgtgcatcgtggggattaggacaagtgcccggtagcatttgtgcggatgtaaaacgccctttagaattagcttgttgtttgctgaagagatgagagtggaattggcaatgtaattctagattctaaaaaaccttggaggaatgtcatcgtcttgtttctgctgcaacctgtaattctgatttatgtcctgtgtgaaactgtgaacatcatcgggtttcagtggcatatgtcgataagatctgccct

SEQ ID NO: 18051 - DNA, 2650 bp, Oryza sativa
  ref <308>: DATABASE ACCESSION NUMBER: AK068463
  ref <309>: DATABASE ENTRY DATE: 2001-12-06
gattaatatataataaaagaagatcgaagcgaagcgcacctctctcctcttcttcttcaattgatcaggttgagagggacgacaacatcagatcacgagccacgcaatcgcaatcgcagaggggagagagagaagagggatcgaatcgaatccagtcgaggaggaggagggcccctcgggccgatccgatcgagaggaggagggatccgagctgaacgattcaacccaaggctcgcgggatttggcgcgagttgagccataccgatccctctgccttccgacggacggatccctgatggaatcggcgcacggcggatcggatcgcccaggctcaatggattcgcaggagccaagagttgatgctgaacaaaaacctgttctttctgataaccctgaagagcagaccattcctagcaaagatgagaaggtccttgaacccaccatttcacacgattcaaatggtatcaatctaccaagtgaaggacaagcccaagctggcacttccaatataggtgggggacacaatgctgcatatcctcaaaccatgtattcttctcaggcacagccattctattaccaaggtccaggatatgataacccttcaaatgaatgggatggatatcctccttatgtgagtgttgaaggcttggaagcaggtccagcggttgtatacaatgatgatcctcaattgatgtaccatggtggctatggctatgacccttatgctcattattctcctatctcaacgcctgtaccggctgctgttagtggagatggtcagctctactctcctcagcagttctccttctcggctccttactaccagcaatcagtaccacctggcatgccatatttaagctctcctactccaatatcacagggtgaggcaatggtgccgattgacccaacacaaggggcttttatcgccgaaactctgagtcctaacggcttccttttcggaccaagacctgaatggttccgatcgtctgaaggaaatgggtcgtttccatcacctgcggcttcacctcaacctgctggtggcgtttcagggccctttggacaaagcaacttccctatggcttctggaatgcaatctcctcagcacaggcccttctatggttttgggacaccaagtgactcttacggaagagtgttctctcatggtggatatttcccacaggccactaattatgggggccctttccctagctttggcctgaatggtacgagttctattccgatggaaaaaggccgcaggagaggaaggggcaatgctcttctttgcagctgcaatggttcacttgacttcctcaatgagcaaagccgaggcccacgagccactaggcctaagaagcaaccagaggatggcggcaaggatgagaagccttctgcaggcgttgattgcgagttgtacaacaggcctgactttgttacagagtacaagaatgccagatttttcatcataaaatcatacagcgaagacaatgtgcacaagagcatcaaatatggtgtttgggctagcaccacaaacgggaacaagaaactagactcagcctaccgtgaagcaaaggagaaagaagagcattgcccaatttttctgctgttttcggtgaatgctagtgcacaattctgtggtgttgcagagatgattgggccagtggattttgagaagagtgttgactattggcagcaagataagtggactggccagttccctgttaagtggcacattgtgaaggatgttccaaataatcttttccgccatataattcttgaaaacaatgataataaacctgtgaccaacagccgggacacacaagaggtaaaactcgaacaaggtatggagatgctgaaaatcttcaaggatcatgaggaggatgcatcgatactcgatgactttgacttctacgaggagcgtgagagagccctgctggacaataaggcgcggctgcatcagcaacatcagctgcccagctctactgtggttgagcccaagaagcccttgactgtggccactgatctagttggtcatataactaagagctttgcgcaggcagttcggcttggtgaggccaagaatgtgagccctaattcagctgacaaaggtgccagtggggattcatctgtcgctgcaaagcctttggaagttaaagaggccggcttagcataaagccccagggtgattggttcatactgaaaattctctgatccatgctcttcctctttgaaatactaagaaatgggcgaagacaatgtccagcgcttctgtctggtgaagcattgtacactaggataggatggaagcctagctccttaaatagtttctttttttacctttcttttgttccttatcttttcctgttggtaatatttttcgttgcgtttatatgatgatcgattccttagtggctagccttaaggagagctgcagtttttgtgcaagcctctgtaaatttcccagttcaatcgatctcaagatgaataaggccttttgcctcctccagtaaaatcctctttaatctacttgtcttatactgaacaaggtgtgtctggaaaacaacataacatctgtttgggtgacctggtgatggtaacaataacaacttgttaataataaagagagtgtgaccttgtggtggtcgcttatgcg

SEQ ID NO: 18052 - DNA, 3276 bp, Oryza sativa
  ref <308>: DATABASE ACCESSION NUMBER: AK068464
  ref <309>: DATABASE ENTRY DATE: 2001-12-06
agcctcatctccgctccgctccccactcgcgctcgagacgccatccccagccaaaaccccgagcgaacgatggagggaggagccctcgcactcccgcacttccgctcgcgcgtcggcatcggctcgcccatcctgctctccgccgaccccggcgccgcccgcaggagctccggcgcctccgggaggagtagggtttcgagggttaatccaggagcgtatccgagaagtgcagggagaggtaggacttggaagcgtgacagcccggaggctccacctcgccgatcaggaattactagagttccaaatcgtagtcctgagatgcctactgaaagagcagggaggactaaggtttcaaatgtaaatttggaggtatctcatcacagagcagttgcagcagtgaggttgctaaggattgagaaggggaaggcatttgtggaccttttgaatgagaaaggaaacagttccggagagaatgagatgagctatgtcgaaaggacactagggttcagcatacggtgtttggataacagggatataagattggttactgtcatagtcgctggaactgtgcgttggaaacggtaccttgattatctgatcatgtcactctgtagtgaggagaaggtgttcagggagatggaaccactacttctgcagatattacgaattggtttctttgaaattctcaagctcaatgtgccagcttatgctgctgttgatgagaatgtaaggcttgctaaagtagctctaaggcctggtgctgggaacctggtgaatgcaattctgcgtaaacttctactgctaaaggaggcaaactctcttcctcttccaaagatagaagttgatgatcgtgcccaagctcgcgcactttccattatttattctcatcctgtctggatggtgagaagatggattcgttttctgggcaaagaagaagctctaaaattaatgaaatggaataacagtgatcctcatttcagtataagggtcaacacagcaaatgggtatacaagggctgatcttatagatcgattggaaagtttgcaggttcattatgagaagtcaactatggatgaatttgtccgtattcaggagggtatgcagactgtcctgcaagctggactactgaaagaaggcatgtgtgctgtgcaggatgagagtgcaggtcttgtggtgtctgtggtcgatccacaacctggggaaacaatcattgattgttgtgctgcacctggtggcaaaactttgttcatggcagcccgtttatcgggacaagggaagatatgggcacttgacataaacaaaggtcggttgagaattctcatggaggcagcaaagttacacaatcttgatgctatgatcagtgacatccatgctgatcttcgactatatgctaaggaaaccactgcaacatttgacaaggtactgttggatgctccatgctctgggttaggagttctttccaagagggcagacttgcggtggaatagacaattcgaagatttggaggagctaatgtgtttgcaagatgagcttcttgattctgcatcaatgttagtaaagcctggtggtatattagtctacagtacatgttccattgaccctgaagaaaacgagcacagaattgctgcttttgttcagaggcatccggactttgtcctacagagcgtgcatggatatgttcctgctgaatttgtcacagatgagggtttctattcctcaagtccaactaagcactctattgatggggcatttgctgctcgtcttgttcggtccgtcctctaggagttcaacaaatagataagctgtcacaatgaagaatgctgaggtcatcctgattcctggcaggcaaactgcattttgatgatgatgtaccacaagatatatatgttgagagctagaggtcctgccgataaaagaagatcagttgccataccaaatgttgagaattataagccgtaattatctattgtgatgcccttctgactccacgaagaaagcagctggtggccttggctcaatgttataactttttgcagaatggtagccagtgctttgcaaacacggaggcctcccatagagcatagaaagtaagaattgaacctccatcatcagaaagaatggtagccgtttctttgcaaatatggaggcctcccataaagcatagaaagatggtagagatgacaaggcttggtggctctgattgtggatccgcagtgcatacaaagatatccacaccaggagtaagcgacgaatgaagtgcaactgttgaagaagatggagagtgagaagtggaaaacaagtactcgtgaactcgtccacgcaatcatcaggtagcaagtcaccatgggattcctacctcacacgtgagcgctaggaactgaagcggcacgcgtttcaccgtatttatagcgctttagcgcttagttttggataaaaaaaagctatatacatttcttctttaagataaaaaccgccatgcgtatatttcttttttttaaagttgattgcaactttcaactcagatttatcaaggatttgaaaatttttcaactaatatttgaaaactttcaaggtttgaaactctaattgaaaaattttcaagtcaatatttgaaccctttaaacttaaatttaaaaatttttgaactaagaagatgttgaaactttcaagtctgatttgaaaactttcaattcgaatttgaaaactttcaaaccaagatttgaaaactttcaagtcaggatttgaaaactttcaaatcgaatttaaaaactttcatctccaaattcaaaacattcaactcaaatttgaaaattttcatctcaaaattttaaaacttttaattcaaaatcttaaaaacttttaactcaaattctaaaaaaaaaatctaggaaaaaatcggcagaaaaaacgagaaaaaaacgcgtggagaggcgcagacgcgccagccacgcggcgtgcgcgccagcaaggtaactggtgcatcttcgccaattagcttttccgaagtcaccaagacacaattgggacctggaattattggcttctctagttctctttccaacttccaagtagtggcagatcagttttatacgagaaattcagagatgctttctcagcattcttgtagtacaaattcttgtgaaatttatgtttttctccttcttctgaatatctgtgctagccatctgtaggtagatgattatcagcgtgcaagaaatatgtcaggtagaatttatcccaacaaaaattgaaagaaaaggcagtgcaatttatttc

SEQ ID NO: 18053 - DNA, 1739 bp, Oryza sativa
  ref <308>: DATABASE ACCESSION NUMBER: AK068465
  ref <309>: DATABASE ENTRY DATE: 2001-12-06
ggcgctcgcctccctcctctcccctccccgtgttcctctccttcctcctcctcctcctcgattggccagccgcatccagcatccttcttgggggtttcgtcgaggtcggtggttggaagggaggagaggtggggggaaccatggcgatgcggctgtcttcggcggccgtggcgctcgcgctgcttctggccgccaccgccttggaggacgttgccaggggccaggacaccgagaggatcgaagggagtgcgggtgatgtgctggaagatgaccctgtcgggaggcttaaggtgtatgtctacgagttgcccactaaatacaacaagaagatggtggcaaaagattccagatgcctcagccacatgtttgctgcagagattttcatgcatcgattcctcttgtcaagtgcgatccggactttaaatccggaggaagctgattggttctatactccagtatacacgacgtgcgatcttactccatggggtcatcccttgcccttcaagtctccaaggattatgagaagtgcaattcagttcatttcctcgcattggccctattggaacaggacagatggggcagaccatttctttgttgtgccacatgatttcggagcatgcttccattatcaggaagagaaggccattgagcggggaatcctgccattgcttcgccgtgcgacgctggtccagacttttgggcagaaggatcatgtctgcctcaaggaagggtccatcacaatcccaccatatgctcctcctcagaagatgaaaactcaccttgttcccccagagacacctcgatcaatctttgtctatttccgtggtttattctatgataccgcaaatgatcctgagggtggttactatgcaagaggtgcccgtgcatcggtgtgggagaacttcaagaacaatcctctttttgacatctccacagaccacccaccaacctactacgaggacatgcagcgttccatcttctgcttgtgccctctaggctgggctccgtggagcccccggttggttgaagccgttgtgttcggctgcattccagtgatcattgcagacgacattgtcctaccttttgcggacgcgatcccgtgggatgagatcggtgtatttgtggcggaggacgacgtcccaaagctggacaccatcctgacatcgataccaatggatgtgatcctgcggaagcagaggctgctagcgaacccgtcgatgaagcaggccatgctgttcccgcagcccgcccagccaggtgacgccttccaccagatactcaacgggctgggacggaagcttccacacccgaagagcgtgtacctggacccggggcagaaggtgctgaactggacccagggcccggtgggtgacctgaagccatggtaggtcagatgcacccacccaccatacatagttgctgctgtcctcgcttgtttgtgcgcacagcacattcttcagaagatcagatgagagactgatgatgatcagtaaaagaaaaccaagccaatccgttaaatgtaaagcctcctttcttccttcctcctactacctttgcttctttttgagacgatgtgccctgcctgccctgcgcccttgccagtgacattcccttggtttttatgttgttgttgctgtagtagtattagacaactggtacctataggcgatgaaggtgttgtatcatatacttaagtgctacctccgttttttaatagatgacgccgttgactttttctc

SEQ ID NO: 18054 - DNA, 4236 bp, Oryza sativa
  ref <308>: DATABASE ACCESSION NUMBER: AK068466
  ref <309>: DATABASE ENTRY DATE: 2001-12-06
gggtggcttttgtgtgatttcccacggcggtgatgctctctgcagccgccgtgatggcgccagccccggccgcggcgaagagctccctggaggtcttgctggagacgataaagaagcgcgatgagcagcccaaggatgcgcctccggcattgccagcgcggccgacgtgccgcggccgcttgcccagtgcaagacggccatcactgccttctggggttaagcttgagaatggcgcggcaaaaggcgctgtggcggatacggtgatggctggggttaatcttgagaatggcgcggcagaaggcgctgtggcggatatggtgatggctgacaagaagccaggggttgagatgaagatttgtgttcaggaggccaaggaggagaatgtggtaaaaactcgcatatttggggccaagaggaagttctctaatggggaggttcttgaggagtcgccgtatgctgataacattcacaaggaaaggaaggagatgatggtctctaaggagctcccttctgtttctccaaggacaaagacaaatgggaagccggtgttcactgataccatggattatgtcctccagaagaagctccgagtttggtgttcttcaccagatgcaacatggaaacttggacagattcaatcagtttctggagatgatgttgaaatactcctggttaatggagaggttttgacaccgtcaccagacagactcttgccggcgaaccctgatattcttgatggagtggataatttaatccatctcagctatttaaatgaaccctcagttctttacgatctgcagtccagatattctcgtgatcttatttatacaaaagcagggcctgttctggttgctgttaatccattaaaagaagttgctctctatgggaaagatttcatctcgcaatacaggaaaaagctcaatgatgatccacatgtgtatgcaatagctgacttggcttttaatgaaatgcgaagagatggcgtaaaccaatctataataataagtggcgaaagtggagcaggaaagactgagacagctaaaattgcaatgcaatatttggccactctaggggatgccagaggaatggagtctgaggttcttcagacaaatgctattctggaagcattagggaatgcaaaaacatcaagaaatgataactctagtcgatttggtaaacttactgaaatacacttctctgaaactggaaagctgtctggtgctaaaattcaaacattcctgttagagaagtcgagggtggttcgaagagcaacaggggagaggtcattccatattttctatcaactgtgctctggagctaatccccttttaaagaaaaaactgtttttgaaagaagccgattactacaattacttaaagcagagtgcttgcttgagaattgatggtgttgatgatgctaaaagattttcaatgctagtggatgcactcgatattattcaaatatctaaagaagaccaaatgaaattgttttccatgctcgcagctgtcttgtggcttggaaacatttcattctctgtgatagacaatgaaaatcatgtggagattgtttcaaatgaagggttggctactgcagccaagctgttaggttgcagcgctcctcaattgatgaatgccctcactacacgtaaaatccaagctggaaaggacaatattattcaaaagctgacattaactcaggctattgatgcaagggatgctctagcaaagtccatttacgcccatttgtttgactgggttgttgagcaaattaaccactcacttggaactggaagagaacacacatggagatccataagtattttagatatttatgggttcgagtctttcattaagaatggttttgagcaattttgtataaactatgccaacgaaaggctacaacagcacttcaatcgacatcttttcaagctagaacaggaggaatacttagaggatggaattgactgggcaaatgtggaatttgtggataatgctgactgcttaactctctttgagaagaaacctctagggctattatcattactggatgaagagtctacattcccaaaggcaacagacttttcttttgctaacaagcttaagcagcacttgaggggaaactctgccttcaggggtgaacaagaaggtgcttttaagatttgccattatgctggagaggtgacgtatgatacaactggtttcttggagaagaacagagatccgttgaactctgagttaattcaactactctcatcatgtaaatctgaactcccaaaatactttgcctctgtcatggttgctgattctcagaataaatcaaccttgtcatggcactcagctgttgattcacaaaagcaaagtgtcgtgaccaaatttaaggctcaactgttcaagctgatgcagcaattggagaacacaactcctcatttcattcgatgcatccagccaaatagcaaacaacgtcccatgctatttgagcatgatcttgtttcacaccagcttaagtgttgtggggtgctcgaagttgtgcggatatcaagagcaggctatccaactaggatgactcaccaacagtttgctgaaagatatgggtgtcttctcctgcgttccattgcatcgcaggatcctcttagtatttcggttgctgtattacaacagttcaatattccaccagaaatgtatcaagttggctatacaaaattgtttcttcgtacaggacaggttgctgcactggaaaatgctaagaatcggatgctccatggagcccttcggattcagaagaacttccgtgggttgtgtactagacaagaataccagggactgaagaaaggagcaatgactttgcaatcatttataagaggtgaaaaggcaagagttcactttgatcatcttgtaaagagatggaaggcatctgttctcatacagaagtatgctaggcgtcgaattgcagctaccatgtttattgatcagctcaaatatgttgttcttctacaatcagtgatgcgtgggtgcttggccaggaagaaatataagtgcctgaaggaagagaaggactcataggctagtcacagaaaagttatacatgtaaggaataatgtttcacaagcgcggatgtatcatgaaacgaatggagattatcctcggcaaccagttatcacggaactccagggacgtgtttcaaaagctgaggctgcattgcgagataaggaggaagaaaacgaaatgctaaagcaacaattggatcaatatgagaagaaatggtcagaatatgaggccaaaatgaaatctatggaagaggcatggaagaagcagctctcctctctgcagttgagccttgtggctgccaagaagagcctaactgcagaagatgtggccagccgagcagctcgaaccgacgctgctccaatgcatgctcattatgattctgaagatacgtcgaccgggacccatacccctgaagggacagagttcaaatatcaaaaccacaactctgaggctagagtggcagcaccgaattcagataggcggataaacgcggtgaaccacctagccaaggagtttgaggacaggcggcaggtgtttgaagacgatgctggcttccttgttgccgtgaagtccggacaagttggttcaaacatgaacccagacgatgaactccgaaagctcaaggaccgattcgcgacatggaagaaagactacaagtctcggttgaaggagaccaaggtaaatcttcagaaggttggtgaggagaaatcccggaaaagatggtgggggaagaagagctcaaagtgaatgcattcaatctgaatccaagtgcatttccctacattccctgctactgcatccaagaagagacaatggaagagactgggaggtgaaaaacaaggcttcgaggttctctcctcttcatcgcaagcctgacgagatgatggtgatgttgttgatgacgatgatgagctccatcatcaatggcggtggtgctggcactcgatcgtccggtgtccagcttatcagagaaaagatttatataggtgaaagcaagaagtctgtacatgtatattagttctttgttgtcagtgtatgtatgccatcttgtatgtagagagatgaacctgagatatggaagggtaattaaatacagattatccgccatgagcgaatagagataatgcaacaccagctctgtaatatgtgtacagcaaggaaatcatcgaatttgcaaggcgtttttactcct

SEQ ID NO: 18055 - DNA, 2040 bp, Oryza sativa
  ref <308>: DATABASE ACCESSION NUMBER: AK099056
  ref <309>: DATABASE ENTRY DATE: 2002-08-28
tggagctcacacaccaccaccaccaccatcgccatggcgccacctgccatggccttccaagctctcgctctcggccccctccccctccccctccccgcggcgcgtcgccgccgccgcgtgcgagtcctcgccgtggccgcagaccacaccccgccgccgccgccgtcgccgtcctcccctcccgagccggcgaacagcccgagccggctcctccgtgagctcgcggagcggaagaaggccgtgtccccgaagaagaagcacccgccgcggcgcttcatcctgaagccgccgctcgacgacgagcgcctcacccagcggttcctcagcagcccgcagctgtcgctcaaggcgctcccgctgctatcctcctgcctcccgtcggcgccgctctccgccgcagaccggacatggatggacgagtacctcctcgaggccaagcaggcgctgggctacccgctcgccccctccgagacgctcggggacggcgacgacgacggctgccccgcgcggcacttcgacgtgctgctctacctcgcgttccagcacctggacacgtcctgcgagcgcacgcggacgcggcacgtccggagtggccactccaggctctggttcctgggccagtacgtcctggagctcgcgttctgcgagttcttcctgcagaggtacccccgggaatcccccgggccgatgcgggagcgggtgttcgcgctgatcgggaagagagcgattcccaagtggatcaaggcagctagccttcacaatttggtgttcccttatgacgatttggataagatgattcggaaggaccgggagccaccagcaaaggctgtattctgggcactgtttggagctatatatttgtgctttggaatgcctgaagtctaccgtgttctttttgaggcgtttggcatggaccctgaagatgagagctgccagccaaagctgcggcgccaactagaagatgttgactatgtatcagtggagtttgaaaagagacaactcacatggcaagatgttgctgcctatcggccaccaccagatgccctctttgctcaccctaggctatttcgagcatgcgtgccaccaggcatgcatcgtttcagaggaaatatttgggattttgacaatagacccaaggtcatgaacacactgggatatccattgcctatgaatgatagaattccagaaatcacagaagcaaggaacatagagcttggacttggtcttcagttgtgcttcttgcatccctcaaagcataagtttgagcatccaagattttgtttagaacgcctggagtatgttggacagaaaattcaggatctagtgatggcggagaggctgctcatgaagcatctcgatgcacccggtaggtggttggcagagaagcatcggaggttgctaatgaacaaatactgcggacgatacctccgggacaagcacctgcaccactacattatctacggggagtcggtgcaagacagatttgaacacaaccgccggctgagaaatccttccacgaccgccgtccagcaagcaatacacggccttgcttactgcgtctatggcaaaccggatgtaaggcgattgatgttcgaggtgtttgacttcgaacaggtccagccaaaagcagtatgagggtggtcacaaaacctgtgcttgtgctgagctgctgatacgctgacattaccggcgtttgaaagctgaaatgcttcagtgttgtgacctgtgaacagatccaagcgcagacagttctgagtctgatccccgaagtcgaaaagcaggttaacacacgtaactcatgcaccctcgtttctacgagatgaactggattagagatgttgtaaatcgaacgctgttgttttctgaatttacagttttgacgatttgatgtaaatttccatttgagcagaaaatgcaagcagcatcagagacaaaaaacagcataggaagaatttttcctgtgaaacatgcttgtaaaggagtttgtaatagatctgcagaacatctttgcaaccaatgatacaagcagcttcatctttt

SEQ ID NO: 18056 - DNA, 1788 bp, Oryza sativa
  ref <308>: DATABASE ACCESSION NUMBER: AK068467
  ref <309>: DATABASE ENTRY DATE: 2001-12-06
ggtctgccacgccttcttgaacagtttccccaattttctgaccgccgctttgtttgcagctcgcgcttcctgtcgacatggcgaagaaatccaagctgaagaaggagggatccagtacgacgaggaatccggcggccgagctcaccgacgacctcatcgtcgacatcctctcccgcctccccgcaagtcggtctgccgatgcaagtgcgtatccaggcggtggcgcggcctcatctccgaccccgaccaccgcaagaagctcccccaaaccctcgccggcttcttctaccgcagcgagaacgaatcacgctgcccccaagctagcgcgccatttcgtcaatgtcaccggcagaggccggcctctcatctgcccaaccatctccttcctgcctcgcttcgacttggagggcatgaggatggtggactgctgcggcggcctcctcctcttccgctgcttcatgagctcggacgaattctgctacctcgtgtgcaatccctccaccgaggaatgggttgccttcccagattccggctacaaccccgagtggcagttcttcacccatttggggtttgatcctgccgtctcctcgcacttccatgtctttgagtttgtgatgggtgattgtggatttgtggaaggggtggagatctactcttcggaaaccggattatggaatttcatggaaagtgaatgggaccctgaaaccaccgtatatgatcgcacaaggacctttttcaatggcatgctgcatttagttgaagaggggattgcgatattatcagtagatgtggaaggggagatatggcagagcattggcgccccgagaccggaactagaaaatgtggaagatatgtttgctttggtgtcttgtttcatcggtcaatcccaagggaaattgtgctacctcagtgcatatgacactgtcccttggaacctgtcaatatgggttcttgaggattattccaaggatgaatggacattgaagcataagctgactaccgaacagctgtctgagaagataaactgcaagtgcaaaaccgacttcgacaaggcttggtactaccacgtggtcgcagttcattcagagtgcaatttgatttactatattgctggcggagatacactgatgtcatatgacatgggtcataaacaatcgtgtgttattgaaaatcttgggccgggtaataacagtggatatcttccctatgttccactctactcagaaatattgtcacatggctgctaagtctgcttcctttgtactactagtgttgcttggcattttttgccatgaaatgagtgtaagggttgcagtcaaagctgactacggttctggatcgcctgacaaagttctcagaggcttcactgaagcattacgaggagctcaagcagaattatgagatggcttgtgatgactacaagacgggtcgatcaaatgcacatcttgcttagtctgatgatgcccgtcaagtgcccattttcaaccatgttactgtattctccgtcatattagattccctgtgatggttgcagttcagcatcattgagccatcatgcgtgagtgcttgatattactaatccagtcccgttcatgcttagccgtctgcctgttgatgccaagaagaacttgtctctctagatctgattttgcttcatctgtaaattgtgtaggcatgtaaaaattcaggatgtaaaacagtggttctgtttcgtggaatttgagttgtatcagttatgatgacattacttgcttgtccttttgtgcagtatcaggtctgttgcttgct

SEQ ID NO: 18057 - DNA, 3232 bp, Oryza sativa
  ref <308>: DATABASE ACCESSION NUMBER: AK068468
  ref <309>: DATABASE ENTRY DATE: 2001-12-06
ggctgcgtctcctcgagcagagcagagcagcggcgtcgccggcgttgctgctcccgcgccgccgcatcctcgctcgccggtgacgatccggaagattctctctctgtgccttgaataaaccctcttaaaccccccatgtcacgcgagcctgcggcagcggcggaggcggaggacgtcgtggcccgtctcggcaccgacgaggcgactgggctgacggaggaggaggcggcgcgccgcctcaagctgtacgggcctaacctcgtggtcgcccatcacccccaggtgggtggcaagcttcttgctacactaaagtgcatcgtcctgctctggggatgggatcactccttcaccgagtacattaaatacgagattggatgggagtcatgggagcatcttatcttcccctgctccagggagatgttatgtgtcatgttcatcaatttctcgtcatgggcggcattggcggctgcacttgtgtcccttgcccttaactcagctggtcagacaacctatgaactgatcgttatcgtctccttacttgtgggaagcctgtgtgcatgctgtgttgccaagctccttgccaatcgtgctaaggcaccgctggaagctaaagcttttgcgcgaaggaccaaggttctgagggatggaatatggaaacatgaggatgcgaccaatcttgtccctggggatatcatatatctcaagtgtggtgatattgtgccagccaatgcttttgtcctcaacatggcacagatcgacaccaaaaccatccgtcatgaaaggagtgttaactatgtgatgggctcccttatatactatggctgggctgtctcctgtggcgaagggactgctgttgttactgtgacaggcaataacatccccatgagcactctgaaacagctttatccaaaacgattctctcggcctgggcagcttaggaagggtgtcatggctgctgccactttttgcttctgcttagtacttgttggcatcacaagtgaggctcttgttaaattctttttccatcaaagcataggcacgctgcacagtggccactttatgccacttattggtctaataccaatgtcgattcctgctgtgctctacctggcattggcattggactctcagaggctttccaaattgggggttgccagccggggaacttttgctcttgaagacttggctagcatggatgctatgctcttcaacatgactggcactttgacatgcaacaagccctattttgacaaggacaagattgaagtgcttacagaaggtattgataaagatcatgctgtcctgttggctgcgcgggcttccaaagcacacaatgaactgtataaagaaccgattgatgcagccattctaggccttatggatgatccagaacaggcacgagttggcattaatgttatagagcaccgctcccgtatgtttgttgcaatgacattgatgtacatgactacttacatcgatgaaaatggctccaagtgttctgtgctcaaaggtgaccctgcattgatgcttcgtgactgcagttgtagcgaagaagtcagagagcatatacgcaaacgtattgataagctcggtcttgatggatatcaatgtattgctgttggacgtattgttaactctcggttggacatcattattcttctacctttcatagatgatctcagaagcgatagtgcagaagctgttgataatcttactgatatgggtctgagtgtaatagtacttacagaaagcccaatgacaattacaaagcacgtatgtggaagacttggaaaactgggcttaaatgtgttacatgctgactctatgcgggagttggtaagcagcaaaaatgagcttttcttgaatatcaatgggatttctgatctctttgtagaatataaccgttatgttatatcaaatctgagaacttattttggtcgtcgtagtgcaatggttggatatgaattttcggatgttgattctatccgtgaaagcgatattggaatcgcagttgccgatgccactgatagcaccaaaagtgaatctgatattgttttgactgagcatgccttgctgtctgtttcttctgctgttcaagccagtagggaaatttgtcagatcatgaaaggatgcatggtttatgctgtttcatcaactgtccatgcttttgctgtccgtcttattttactcctatggagactcgagctaccctgtttcccgatgctggtgattgctgcttgcaactactgcacatcaactgcaatgttatttgaaagggtgaaaccatcccagtcaccagatagtttgaaagcaaacaagattatcgcaactggtgctgcttttggaagctatattgccctgagtacagtcgtttttttcataatgactactaggactgacttcatatctcacataatcaaagctagattgcttgttggccatgatgaggagattaaatctgccttattccttcaaatgagcattgttaaccatgctattggacttttcgcacattcacgcgatggccactgctctgggcctattgttacaatttcttctgttctatctcaactggtggcaaccgtcattgctgtttatggtgacgtgaactctcctctaccaaagggcattggctggggctgggcaggatttatctggctctacaactttgtcttgcttttgagcctcatgttgatctgtgacctgtgtaaccttgcaaagttcaacatatttgggataacctgcaggaggctgttcactggttggaccgagtggatggagaggtgcaggaggctgctcaacaggggtaaaacgtggatggagatgttgaccttaactgctatctcaggcttgattcttgtctggtcgatatatgcatatcatgtcatgaaggtcccgcagcagtagggtggcacttgacaggtagccttgacattaacatatagctttaggtcgcaaattagtgactaagcaatgtagcaatgtatattattaacccgtgtaaagtaaatgtcatcgacatggttttgtttctgtctttttcttttttcttttcttgggtccgggcttctactgccgtataattttgataagagggaagtatatgggtggtcaacttgtgcggatgtgtcattcgaatctgaactctcaaaatatattttgggtatcaaacttgttttgggtgtcatgtaggcccaaacgagctctgacctgttttatgcacggatgtggc

SEQ ID NO: 18058 - DNA, 1382 bp, Oryza sativa
  ref <308>: DATABASE ACCESSION NUMBER: AK068469
  ref <309>: DATABASE ENTRY DATE: 2001-12-06
gacgggccgattcgtggctcgcgccgcgcggctggggtctaagctagggtttacgctcgcgaaaaaaaaaaagaaaagtgttgagcgaataatttgctcctagacctttgctgcttctcccctgtcgataaagccgaccacactgctcgcgtccccccgcgccgttcttttcggagattccgctcgcgcgcgccgccgccgccgcagccgcccgccggggagcccgggacgaggatggaggtcgtcgtggcgaggcagccgaaggcgaagaagcagataaacctcttctactgctccgagtgcgaggagctcgcgctcaaggtcgccgctagctccgacaccatccatctccagtccatcaactggaggagcttcgacgacgggttccccaacctgttcatcaacaactcgcacgacatccgggggcagcacgtggcgttcctggcgtcgttcagctcgccgtcggtcatcttcgagcagatctccgtcatcttcgcgctgcccaagctgttcatcgcctccttcacgctcgtgctgcctttcttccccacgggctccttcgagcgcgtcgaggaggagggcgacgtcgccaccgcgttcaccctcgcgcgcatcctctccatgattcccaagtcccggggcggcccgaccagcgtcgtcatctacgacatccacgcgctccaggagaggttctacttcggggacgacgtcctcccctgcttcgagacggggattccgctcctgctgcagcgcctccggcagctccccgatgctgacaatatcaccattgccttcccggatgatggggcgtggaagcgtttccacaagctattgctcaacttcccaatggttgtctgcgcaaaggttcgggaaggtgacaagaggatagttcgaattaaggaggggaatcctgaaggccggcatgtggttattgttgatgatttagtgcaatctgggggaactcttagagaatgtcagaaagttttggctgctcatggtgctgcaaaagttagtgcttacgtgactcatgctgtttttcccaagcagtcgtatgagcgcttcactcacactaattccgctgggtcagctgacaagtttgcgtatttctggatcactgactcctgccctcaaacagtgaaagccatcaaccaacaacctccatttgaggtgttgagccttgctggttcgattgcggatgcccttcaaatatgaactttgtttttggtaatgggctactcccatttttcctaaatgttagagttcactttcagctccagtaaaaacaaataatgtggagtgagttatcttaattatggctttggcctgacgtcttcataaacatctcaatatgtgatggtaaaataaggcatttgatgctcatc

SEQ ID NO: 18059 - DNA, 1719 bp, Oryza sativa
  ref <308>: DATABASE ACCESSION NUMBER: AK068470
  ref <309>: DATABASE ENTRY DATE: 2001-12-06
gttcgctgcaccgccgctactcctgagagatcgagacgtcgcctccttctccgtccaccgtctctcgtctccacctccccaatcccaccaccgcttcctcccctcccctcccgctgtagtcgagcatctccccccctccccatctccaaagccgacgcatctacttccaatctgattctccaccgctggggagaggtaagagtggggcgtcgatgaggcggatgaaggagcggaaggccccgtgagttggggtcttgccggcggaatattccatgagttatcggcgtgggatgattaatccaataattagatggggtgtgagaataaccttttctaattatagttgtgttgatcaactccttgacaaatgatgtttggtgaccttttaatcacatatatcattttaagttttagtcctgactcttggagtgctggaagtaaaaattatgcatggatctcttatgagagtttggatatagaatctctttgtgatttccagtgttaaatctgggattccactggccaatagaggaactgcttccatcgtttcgtcatctctaatctacagaggcacttatcaccatcccctgctactgctctcttattaagcaacttagttttactcttcctctaattatcttagattgattatttggtacaaactttcagactgcataatcgtgtccattttatccaggctgctatgatttccaaccggtttagaacattccagaattacctaattttactcttaagcgataaaaaagagaatgctcagtgttaacaaaaaaaaggattgtaaagcagtttcaatagatcgaacttacaatttttcatccaacatttgtaagtttgttgtacgtagtaccataataattgaggttatacagatatactgaatgtgtagagccagttgcattatatagaattttcttcctctcaatagtcatatctttagataggattcttctgaacaaagaaaggtgtagttcataatgtgatctagattctattaagaaataattaatcatgttgaattcaagttgtggcatgttaattgcttctgcatgttttcactagctatagtatatcacagggtttactgcttcttataaaaggatgatgaagacactgaacaaaatggagtttgaagtgaaggattcagtggtctggcaaaagtatttcacggctacaacaaatagcgtagtactgaaaggtgaactatgcatatggggcttaaagaaagatattatgattctcttaataccattggatgacctttctttggtcatcccgtcaaaagatggattcagagcagtgagagaattttctgtagctagagatgctaatattaacttgagcagtctggcaaacgctttcctaatttcccgccaacagattttgtgcactcttggctaaatcgcattgaaattcttggcccgtatatattctaacagaaaacgttttctccctcagtctttgtgatgcattgaattgaacaggaactgagaagtaatccaggttgtagcttcttcaggccacctttcaataactgaacttgaaatagagctgagaaggtcatcaaatttttctttatatttggcattatcatggatcaatactcaaagggagagagcatatttcacttactttccattgttaactccttttccgctccatcgaacaaatattgttgttatttcagtgtctttccaatcc

SEQ ID NO: 18060 - DNA, 3246 bp, Oryza sativa
  ref <308>: DATABASE ACCESSION NUMBER: AK068471
  ref <309>: DATABASE ENTRY DATE: 2001-12-06
gatgcaacggattctttggttcttgatttcctttttcttttttctgaccatttcaggatttgtcccaagttatcttttttttcccttttttcccttcttctggtcatttcaggattggttccaagctgttgattttcttctctcttttttttttgtcatttcagggattgattgcaagatcaagataggctgcacagtggcgtgtgtgattaatcatgtgtgcctgatgcacttgtagctggggatgcaggtgaatctgaggccgttactgtaccaagaacaggaggttcaatagaggggaagagattcttgacgaagcacacaaagggaggatcctaaattgatgtagcaggaatgtcgagtgggctcaagaagaagggcctggagtgggatttgaacgattggagatgggattcaaacctgttcttggccacaccatccaacgcttctccatccaagtgcagcaggagggaattgggccgagccgagggggagatcgattttggtgtggttgataagaggagaagagtctcaccagaggacgatgacggcgaggagtgcatcaatgcagcaaccacgaatggggacgatggccagatttctggtcagagaggaaggagcagtgaggacgagatgcctaggcaaggcacctgttctagtagcggtccgtgttgccaagtcgacggctgcacggtcaatctcagcagtgccagggattacaacaagaggcataaggtctgtgaggtgcataccaagtcgggagtggttcgtataaaaaacgtagaacaccggttctgtcaacagtgcagcaggtttcactttcttcaagaatttgatgaaggaaagaagagctgtcgctcacggctagcacaacataacagaaggaggaggaaagtacaagtgcaggctggtgtagatgtgaattccttgcatgaaaatcattctttgagcaacacattactcctgttgttgaaacaactttctggcctagattctagtggtccatctgagcaaatcaatggtcctaactatttgaccaatcttgtgaagaatcttgctgctcttgctggtacacaaagaaatcaagatatgctaaagaatgcaaattctgctgcaatagcatcacatactggtaattatgttgcaaaaggcaatagtctacatgactcaagaccacatattcctgtaggcactgaatccactgcagaagaacctacagtggaaaggcgtgtgcaaaattttgatttaaatgatgcttatgtggaaggagatgagaatcgaacagataaaattgtgtttaaactcttcgggaaagagccaaatgattttccttctgatttacgtgctcagatcctcagctggttgtcgaattgcccaagtgatatagagagctatatcaggcctggctgtatcatcctaactatttacatgcgcctccctaattggatgtgggataagcttgctgccgacccagctcactggatacagaagctaattagcttgtccactgataccttgtggagaacaggatggatgtatgcaagggtgcaggactacctgacattgagttgcaacggtaatcttatgttagcgtctccctggcagcctgcaataggcaacaagcatcagatattgtttataacccctattgcagttgcttgttcttcaacagcaaacttctcagtgaaaggtctcaacatagctcaaccaaccacaaaattactttgcatttttggtgggaagtatctaatccaagaagcaacagaaaagctacttgatgatactaaaatgcagcgaggccctcagtgtctgaccttctcttgctcctttcctagtactagtggaagaggattcatagaggttgaagatcttgatcaaagcagcctttcatttccctttgttgttgctgaagaagatgtatgttctgaaattcgaacactggaacatttactgaatctggtttcatttgatgacaccttggtagagaaaaacgatttgttggcttctcgagatcgagccttaaattttttacacgaatttggttggtttcttcaaaggagccacatacgagctacatctgagactccaaaagattgtactgagggctttcctgctgcaagatttagatggttgctgtcctttgcagttgatcgggaattttgtgctgttataaagaagcttctggacaccttgtttcagggtggtgttcatctggatgtccaatcaacagttgaatttgtcctgaaacaagatttagtatttgtggctgtcaacaaacggtcgaagcctttaattgactttctgttgacatacacaacatcttctgctccaatggacggaactgaaagtgctgctccagctcagttcttgtttacacctgacatagctggtccatcagatattacacctcttcatattgcagccacatacagtgatactgctggtgttttagatgctttaactgatgatcctcagcagctgggaatcaaagcatggaagaatgctcgcgatgctactggattgactccggaggattacgctcggaagagaggccacgaatcctacatcgagatggtccagaacaagattgacagcaggttacccaaagctcatgtgtctgtcaccatatccagcaccacatccaccaccgacttcaccgaaaagcacgcgagccaatcgaagactacagatcaaaccgcatttgatgtggagaagggccaacagatcagcacaaagccaccactgagctgcaggcagtgtctcccagaactcgcttaccggcatcatttgaacaggtttctgtcaaccaggccagcagtactctccttggtcgccattgctgctgtctgtgtctgtgtagggttgatcatgcaggggccaccccacattggaggtatgagaggtcctttccgctggaattctttgcgttcaggccccaagtgatatggtagattgactgccaagcatctgcaaatacagttcagctgtatcatgcagcatggagatgttttgcttcgagtctgtatattcttgtaacatagatttatcttttcacggaataactatatttgtttactactttactgtgcaacatttagaattcgaaacttgcatatctagaaattccattggacaggcatcctgaccttgatagaatgcagtactatctgaatggttttaccgtgagcagagcagctgacagagtgacagtgcttccatgctctttaataatactccatccgtctc

SEQ ID NO: 18061 - DNA, 1770 bp, Oryza sativa
  ref <308>: DATABASE ACCESSION NUMBER: AK068472
  ref <309>: DATABASE ENTRY DATE: 2001-12-06
ttgatttattagggtgcctaatccttgttttgcccatattaaatacggtcttgtcctaatagaaatcagaaactcgtgctgttccaagtggtttgggcctatcattagcgtctgtgcatgccgggttcgagttctattgaggctattttttttaaaaaaaaatcatagcgttatcttggtaatttttggctcgctcgcgcttgctttagcacacaacggttgctacatcatcactgtcatcacacccgctctcaacgagcaagcggtcgccgagagcacggcgccagcaagcagcccaagaagccaacaagcgattaattaggagatgagacaacggcccgcgtgtgatgtttaatgacatacacgacgctagaaacaatgcgttggatttttatgcatgcatgcaggagcaagcaggtccaagatactttgcttcaagatctaaaacgtcaactattttgatactggagggagtaaggggttggcaaaagtggtgaggagtcctgcaaacagtacaaaatctggaactgagaaaacttttgaaaacatggatgctgttgcatatatgcctgttgtaaggtctggaggttgggctgatattgggtcaaggcacacaatggaggatgtctttatttgttctgataacctcatgaaagagtttggagttgaaagttttgaagatggtccgagcgcattttatggggtttttgatgggcatggtggaaaacacgctgctgactttgtgtgcagcaatttggcaaggtttatcgttgaggatgaggattttccaagggagatagagaaagctctgtcctcagcgttcttacagactgatgctgctttcgcagatgcttgttctgtgaactcctctcttgcttctggcacaactgctcttgctgctcttgtggttgggaggtcacttctggtagcaaatgctggtgattgtagagcagtactttgttgtcgtggaaaagccattgaaatgtccagggatcacaagccttcttgcaacagagagaaggttcgcattgaagcctctggtggttatgtttatgatggctacctgaatgggcagcttaatgttgcgcgggcaataggagactggcacatggaaggaatgaaggcatgtgatggtcttggacctcttagtgctgagcctgaggtgatgatcagggatctcactgaggaggatgaattcctcatcatcggttgtgatgggatctgggacgtattccgcagccaaaatgcggtagactttgcacgccgaaagctccaggagcacaatgatcctgttacctgttgtaaagaacttgttgatgaggccatcaagaggaagagcggcgacaacctttctgttgttgtcatctgcttcaactctcggccgcctcctgtcctaacaactccaaggcctcgtgtacagaggagtatatctgcagaaggcctgagggagttgcaaagctttcttgatagcttggctgattgacatgaggcttcttccttgatagaagcctgacatactgtcgctagtgtacttccattgcttagcatggaatttttaggtttagtgcggctattccaaggcttaatgccagctatctcacaaattctctgagatagcagctgttgagtgattctggtgttgtaatgtattatgcggctaattctatctgcagtttaagtatttattggttcagggatatgctgtcttaaagagtctggaattatcagggaacatttctaagatatctgaaatggcgagtgatgttgtct

SEQ ID NO: 18062 - DNA, 3184 bp, Oryza sativa
  ref <308>: DATABASE ACCESSION NUMBER: AK068473
  ref <309>: DATABASE ENTRY DATE: 2001-12-06
gacggggtttttctcctccaatcctttcccctctccctctcctcctcctcctcctccctgcgccttccacttgcagcgattcctcctccccgcccgctcttctcgaaccttctggaaccttcccccatcccccacaagaagcagcagatgggcatcgtcgtcgtcgtcgtcaaccaatcctaggcgacgagcgctgcggcggcgcgcgccatctgctcccctccgccgtgctccggtgctccccgatctgcgcctcccgctccggttggtcggctgtcggaacacgcagctgcaaaaccctagccgagctgcggcgatctcaacgctggcggcgaggccctcctcttcgtcggcgtcgacggaaaaatatggcgcatgttttatttacttccccttgctgtcactgaacacatttcctaaagtcaaggacaagacatggtgttgcagaagaggttggactatggatcccatggccatcgtgctcccattaagccacgtgtcgcaacattggcgccggttaaacgctccacaagaataaggaaaaagcagatgtatgcacttgatttgcttgcgacagctgcagaaaaattgttggctgatcaagacaatttatctagtggacctaacataaatgaaacaccagaaggttatgttacaagcatgaaaccagttaaagcagaacagtttgatgaagcgtttccgttgagaagcgtggctgtgaaaaaagatgactgcaaaggttgtacagtaggctgtgcaggcatctgtggctttctcagacaagctaatatgtgcttggctgaaaactcgtcgactcaaaatctagctgattcagtactagagtcactaacagcaaagcctgatgtgttggctaaggactcatttgttagcagtaaaaaatcatgtcgattgggttttggtcttggcacaattccggagtatggatctgttggagtatgccaaccttggtccacaagatcagcagaggttaaacaagtgcatcgggcgagaccaacagcaatcagaagtcaagaagatagtgatgctgcagctctatgtgctttggtcgagaccatggatttggacaccaaacctcttgctgaggctagctctggtagtaactcaggagtgcacatctgcggccctgacagggggcataactcccatccctcgtgtttggctaaagtgcagcatgctgcagacagagatgatgacgaaaattcttctgggtgtgtacatccaagcacctcaggaaataaccgtggttatattccacattatataggtgaccgcaggataaggagattgtttgcctccaggttaaggaaggcagctcgcaacaggatatgtggagagatgtcttgtaaaggtaacaagctgagtttgtgtgaaaagaagatgcccactacgcgccgaagagtgcaacaaacaactttgaagaggaaaagacttgctcaactttactccgaaaaatcatctgatgaaggtatcctaactgaaagtattttttgataatggaagttttattaaaaactcagatcctaactgaaagtatgtattgtgttgtccgtttcccttattgtatctaaaggtcacaaattatttagattgctccaggatgtaacattgcacatagttggtacgacttaatccttcttacacacagcattggatattctgaacccctgctttgatacacttcctaaaaatacacgggcatgccatttctgccagtggaactccattttgtatgggtgatccaaatccgcatgtgcatctgagggctatgatggcgtcctggatgtttattttagttttggggttgacttaaaagaatcattgcttaatttataaacacaatgacttacttttttctctcttttcagtcaagttaaccatcaaatctttcaacatccctgaactactaattgagatccctgaaaatgcaacagttggttcattgaagaaaactgtgtcagatgctgttactactataattgaacgcggtctccgtgtcggtatacttcttcaaggaaaaaatattcaaaatgacaacaagacgcttcgtcaggctgggatttgccgtggtaaaaaactaaatgacataggctttactctggaatgtgaagccgggcaagattctcaccctggtgtaatagtgccagaagaaatggattttgttggtgcatctgttgtggacaagtctgctacgtaggttacaagaaagcatcttctccttgcattattagacaggaggcttggatttacatgtgatgattagaaaacattgtcaggatgcatctgatagtttatgtcaacgttgttgttttgcagaagtttcggaaactacacgaccatagatttttgctgtatgtggtcatctaagggttttaatattccatttccagggtgaaatgcgaagaacctgctgagaaccagcagcttatgcaagattttccaggctgcagcttgagtgatcctggttctgttgattatcccgtggaatggagcacacaagaaacatcagcaagctcccaagccatcgtcccttttgcagatccaaactcactggcgctggccaatgtgccgctttctaggtcaaagcgaccagattttgggcaaagacggataaggaggcctttcactgttgctgaagtggagttgctggtggaagccgtcgagcaccttggaacaggaaggtggagggacgtcaaattccgcgcatttgaaaatgttcatcataggacctatgttgatctgaaggacaagtggaagaccctggtgcacacggcgagcatagcgccgcagcaaagaaggggagctccagttccacaggaactcctggaccgtgtgctcgccgcacaggcctactggtcggagcagcaggcaaagctccatggcgatccccctgttcctgaaatctgccctacctgatcctgatgatgattgatggagaaggcaagaatggccctcgtgtacaaatcggtgtaaaaattgttcagaagggattggttggttgacgtttgattgaaatttgtcgacagttgaaaactcacaacttggtccttcctactgttggttcgttaacaggaggaggaagaagaagaagaagaagaagaagaagcttatttgtaaatttcagcagagtttactgtctttgcaaaaatgcaagtcgttttggacg

SEQ ID NO: 18063 - DNA, 1351 bp, Oryza sativa
  ref <308>: DATABASE ACCESSION NUMBER: AK068474
  ref <309>: DATABASE ENTRY DATE: 2001-12-06
tcagactctagcttcttcctctttctctctataaatcttttcccgagccaagaaaaccaccattaaacccaccaccaccgccacctcctccacctccatggcgatggcgatgcaccggttcagcctctgctgcgtcgtcctcctcgtgctcgcgccgctcgccgccgtcgcgtggcggccgttgccgccacggaatgggagcggcgaggttgaggggatcggggcgtccaagaagttcgaggggtcgtcggatttcgtcaagctgcagtaccacatgggccccgtcctcgccgccgacatcacggtccacccgatctggtacggccggtggccagccgagcagaagcgcaccatccgcgcgttcctccggtcgctctcgccgccgggctcgggctccggcgatggcggcatcccgtcgccgtccgtggcggcgtggtggcgcaccgtgcggctgtacaccgaccagacctcggcgaacgtgtccggggtggtgaggctcgggcgggagaagtgcgacgcgcgcgcgtcgcggggcgggcggctgacgcggctcgacatccagtccgtggtgcgggacgccgtgacggcgcggacgcggccgctccccgtggactcgagcggcgtgtacctggtgctgacctcgccggaggtggtggtggagaacttctgcgggcaggtgtgcggcttccactacttcacgttcccgtcggtggtcgggtacacgctgccgtacgcgtgggtggggaactcggcggcgcggtgcccggaggtgtgcgcgtacccgttcgccatcccgtcgtacgtgggcggggggcggagggcggaggcgccgccgaacggcgacgtgggcgtggacgggatggtgagcgtcatcgcgcacgagctggccgagctggcgtcgaacccgctcgccaacgcgtggtacgccggcgaggacccgtcgttcccgacggagatcgccgacctgtgcgaggggatctacggcaccggcggcggcggcgcgtacaccggccagctgctcaccgacggccgctccggcgcgtcgtacaacgtcaacggcgtcggcggccgcaagttcttggtgcagtgggtgtggaaccccatcctcagctactgctccggccccaacgcgctcgaccagtagccgccgccgccgccacgcacgaacgcagtgttcgtccgcccatggattcggattccttttcttgggaatccatggtagctttaaattcttgtatagatcgagccggtgaagtgaacaagggtggcgatgtttggggttttgggtgactttgggtgaatggatggtatgtttgggggagactgtttggaactttgagattattttgcc

SEQ ID NO: 18064 - DNA, 4125 bp, Oryza sativa
  ref <308>: DATABASE ACCESSION NUMBER: AK068475
  ref <309>: DATABASE ENTRY DATE: 2001-12-06
atcttcctcctccgagctcaagctaaaccctaaacccccgcacgctctcgccttcccgccgccggcggccacctcgaatccaaccatggccgccgccatcgccgccgcagccgatgactccatcgtctacaagctctccgctctcctcgaggaggtgcggccgagcgccgccgcactccgcgccgcgagcgaggccgcggatgccgtcgcgggcctcgtcaagaggatcccgacgcagcaggcgactcacgaggctgtcgctgggttcgtgagggacctggggctcgcgggggagaagctcgcgttcacgttccggccgccggaggtcgttcgggtcgctgggagccacgcggccggcggcgccgtcgcgaggcccgacgtctccgctgacctcctcgtgcgcttgcctaaggaatgcttccatgaaaaagattttctaaaccacagataccatgcaaagaggtgtctttacctccatgtcattgagaaaagcttgaggtcttctccattaattcagaagatttcatggtctaccttcctagacgaggcacggaaacctatccttcatgtatacccagcaaaagaaatcgcagaacttcctgggttctatgtcaggataataccaactgcaagctttttgttcaatgtttcaaagatgaatttatcaacaagaaacaatgttcgtgcatacacaaaagatggcataaacctgcccacaccaaagtacaattgtagcatattggaggatatgttcttggaggaaaatgtagaatttatcagcagttcagttgcagattggaaagccttgcaagaggcattggttttgctaaaagtttgggcacgtcagagaacttcaatatatacacatgattgcctcaatggatacttaatatctgccatccttgtgttccttactgtggactcggcaggaagcatgattaatagatcaatgacatcgagacaaatttttcgcgttgtgatgaagttcttggcaacttcgaagatgtggacgaagggcttggtgattcagccaactaagaagcgtacaatcaccaaagaggatatggtttgtttcctgaaaacatttgatgttgtcatctgtgatgtatctggacatgtaaacttggcatctcgaatgacgaagtcagcattcatagagcttcaagatgaggcagcttgtgcgcttaattgccttgataaatgcaaagatggtggatttgaagagctttttatgaccaaggttgatttaggtgctaaattcgattcatgcttgaggataaacttgaagggaaacttgaaaattactacatcaagcttttgcttggatgatttggcttggagaaaacttgagaaggatgtccagtctttgctgcaacaaggtcttacagatagaacaaagatgatccgtgtcctgtggaggagcacaccttctgaatggaatataatggataatttggtagcagtcctctgcttgttggcataatgcttagctcgttggagaagagtttccgtctagttgatattggtccaaaccctgagaatcgagatgaggctatcaaatttaggaaattttggggagagaaagctgaacttaggagatttaaagatggaactattgctgaaagcacagaaggaagacttgattcatgttgttgatcagttagacttttgcctcctggttggtggccaagatccggtctcgtcgtctggagctttgttcgaagcctttgattctttagcgaagaaattgcgcctattgggtgatgttcctcttaaaatatcaaccgtgcaacctctagatccaggtttgacatataattttgtatgtttcatattcactcttatcattattttccgtgatatgacacttgcttctgcttcacttctattattataccagcttttagacacacgtctgtgtttcctcctgagcctcatcctttggcatatgaaaaaaggtcttctcagaggctgccaaattttacagctacttgcatgcgatcattagaagtaatgattcaggtagtctcacttgatatattctgagaggatactattgcactttgtttcctttgtgcctttgtggttttcgactactgagtagtttagcggttagttagccaggcctcattgtgtccttatttcatactacctccgttttttgatagatgacgccgttgactttttctcacatgtttgaccattcgtcttattcaaaaaatttacgtaattataatttattttgttatgagttgttttatcactcatagtactttaagtgtgatttatatcttatacatttgcataaaatttttgaataagacgaatggtcaaacatgtgagaaaaagtcaacaatgtttaaaatacggagggagtagtttctcttccttcttttctaatcatttcaaaaacagctagagggatctggtaactggcccttggatcctatagccatggagaagacgaagtctgcatttcttttaaaaatgggtgaaagtctggaggatcaaggaatgtttgttactgccagtgaagatgaggtcaatgttcttacatctggatattcattcttgcttaagatatttcacgaaagaggtttgctgttacaaaaacgagatggagacggtaaagctcaaaatgttccatcagaagacaaggaactctttcttcggagccagcactcaagtatgatcaatggtctgcatggtcgttaccaggtgtatgggccggtagtaaggtaattgtcaaggttctgatggtggttaatcaaacagctcataccttgaaataaatgtcacttaccatgcacatgcatatgttgtatctgtttcaaaggctagcaaaaagatggatttcggcacatctattttcttcatttatctcagaggaggcagttgaattgttggttgcatacctattcttgaagccatatccattcaacgtcccttcttcacgggttgctgggtttcttaggtttttgcggttactgtctagttttgactggaccttttcacctatgatcatagacataaacaatgacttcaacctgaaggatgagaaggagataaatgttagttctctttttagttttttctattatctcttaggctgatgccatattgagtaactgatggatgcaagtacaggaaaactttatgctgtgtagaaaatcttatgaacaaaatcctcatgatatagagcctgcaatgtttcttgctacatcgtatgataaggcatctgaagcttggacgagacattcaccaagcaagccggttcttaaacggatggcttcttacgctaaaagcagtgcagagcttttaacaaatcttataatccaaggtcaatcaggccaatatacatgggagtgtgtcttccgaacacctttaagcaattatgatgctgttgttctcctccaccaagagaagctttgtcgtcctcaccaagtacttttccctgctgagacccctaatggcaagctggtaatttgtggcaaaccatgtaaagatttccacccttatatgccactcaataaaggagttgtgaaaagcttgcatgattcaagagagaaaattttggtaaattttgacccaaccacatactttctgcgggatttgaagagtgcatttcctaaaactttcaagctgtggtatgattcaatcggaggagacgcaatcggtcttacatgggagaactcaaagaagcgtggcagagacgaggccgatgaaaccatgctggatccagcttctatcctaaaggaggttggaaatgttggcaaaggtttggtaaggggcgtgtatctcctcaaagcaccaaagcttcagtaaactattgaaaactcgctgaaagttgtgtggaagagagaggcttgtgctgtttgtgcaattaacacaacttctaaccgatattcttacactggcaagagcaagacggtggtttccatggcactgattggacatggtaagggatcaacatctggcaatgtactgattagaagtaagcaaggaatgttgtgtttagactcaagttgattagggtataaaagtttgtatccaaattttgattctgaggtacagaaaagtatagcaatgtaattttgatccttccatctgatgatatttttgccc

SEQ ID NO: 18065 - DNA, 900 bp, Oryza sativa
  ref <308>: DATABASE ACCESSION NUMBER: AK068476
  ref <309>: DATABASE ENTRY DATE: 2001-12-06
gacattttggtttttatgatcaagaaaattcatcttgcattgatcactgtacaatgtacattgcttaaatgatctcagtgatcaggatcagaggagaagagaagatggagttcaaagcagccatgttcgcggccgccgtcgtagccgtcctcctatcgtcgccgtcaccggcattggctcagaagaagagcccgccggcggcgccgtcgccggtgtcgcttccaccgagcttggctccggcgccggcgccggcgccgcactacgtcgacctcgccgagctcctcagcgtggccgggccgttccacacgttcctcaactacctggagaagacgaacgtcatcgagacgttccagagccaggcgaacaagaccaaggagggcgtcaccatcttcgtccccaaggactcggcgttcgccgccatcaagcagtccaccttttccaacctcaccggcgaccagctcaagacgctgctgctgtaccacgcgttccccaagttctactccctggccgagttcaagaacctcagcgagctcaacccggtgaacacgttcgccggcgcgccgtacacgctgaacctcaccgacgacatgggcaccatctccgtgcagtcgatgtggtccaggcccaagatctcgagcagcgtgtacgccacgaggcccgtggcggtgtacgcgctcaacaaggtgctcctgcccatgcagatcttcagcaaggacccgccggcggcggcaaggcggactcgacgagcgccgcgtgcggcgtcggcgccggcgtcgtcaatggcttggtgatggcattggctggtagcttgatgctcctgtggtgatgatcagagagagagagagagagagagttcttggagtcaaatttgcaacagcagcacattgttcatgcttctcc

SEQ ID NO: 18066 - DNA, 1481 bp, Oryza sativa
  ref <308>: DATABASE ACCESSION NUMBER: AK068477
  ref <309>: DATABASE ENTRY DATE: 2001-12-06
gagcttccgctcctccttcctcctccgcctcgtctcggctcgcgctagggtttactcctcctctccttcctcctcttcctcctcctccggctccagcggcggcgaggttgcgagcgcgtgtgtgctgcggcagtgggtaaagaagggagaagggaaggggaggggatgggatacgacgccatggcccacgacgcgtcctcaccgtcgaccgcgcgcgacgcgaagaagaagcggataagggggaatcggtcggcgaagctgaagcagagcaagctcgacgtgcggcgggagcagtggctttcgcagggatgggaaggaggtgaaggctgtggtatcccctggagcagcggcaggagccaactccgggtcgccgatcctcgcatccccgcaccctccactccctcgccggcgtgcagagattcggacgagggaaggggatccagaggatttcaaggaggattcagttggcgctagccaggatgttggtagcagtgatcatgagtctccgttgcacagccctgtctcctacaaccctcctattggctgcttgcagcagaagcactgctcgggcaatggtggtggccgtagcttcagcagcggcagcagtgcttggtccagctctcggagtgtgactgattctgacgatgacactggtggtagccccgagaatgatgatgatggagttttggatgattgggaagctgttgccgatgcactctcagtggatgacaaccataatcaccaggatccagtgccggcagatccaccagttgtacctgcatcttgtccagtgcccgctaatgcagcaacaaggcaagaaccaatcaagagtagtacaagagcttggagcccagatgatgcattccgtccacagagtttacccagcctctccaaacaagtcagctttccagctagcatgggtaactgttgggtggcaatggggataggatctgcacaaaagggagtcccctcaaagccgacatcctgccctatatgctacgaggaccttgatccaacagattcaagcttcctcccttgcccctgcggttttcatctgtgtctgttctgccacaagagaattcttgaggcagatgggcgctgtcctgcctgcaggaagcagtacatctcagcttcttcaggtggagaaacggttggaagtgaacgtgagatggggaatttacgtctgtcccgttcttgtagtatgggtccaagatactaagatggcagggttatgacctagttaatcatcacagttcttctctatgcatggtactgtttggtatgttacctacgtttgccttttcatataaagaaatgtgaatatcggcataggctgtttaatcgtaatagaaagttccccagtaatttgttgacttttgatgagtttgctttgtgtatggtgaatatgttgctgagaggaccctttgttattcatggtgtgggagtctataaataatagctatacagggtgtttgttgtcg

SEQ ID NO: 18067 - DNA, 1566 bp, Oryza sativa
  ref <308>: DATABASE ACCESSION NUMBER: AK068478
  ref <309>: DATABASE ENTRY DATE: 2001-12-06
ggggtcgccgactcgccgccgccgccgccacgtccacttcagttgcagtcaccggcggcgatggcggactccggcagcgcgagcgagcggcgagaggaagggaagaagggaagggaggaggaggaagaagacgacgtcgtctgtctggacccgtcgttcttcgtcgaccgcagctacgagacgactacgttcaccttcggctcgcaagtgctccacctcctctgcctccgcgctgcttccactgattatgatcttactggacagttagtatggccaggtgcagttctgatgaacacctacttgtctgaacatcctgagactgtgaaggatcattcaataattgagctaggatctggggttggcattactggcatattgtgcagccgtttttgcaaagaagttgtcttgactgatcacaatgatgaagttctagagattataaagaagaatatagagatgcagtcatgttctgggaatgccaatgcagtgttgacagcagagaagctagagtggggaaactatgttcatataagcaatatcattgagaaacatccttctggatttgatctcatccttggagctgatatttgctttcagcaatctagcatttcctgtctctttgatactgtagagaggcttcttcgtattcaggctagtaaatgtagattcatattggcttatgtatcacgagctaaagtcatggatgttctagtgctcaaggaagctgaaaaacatggaatgcatgtcaaagaggtggatgggacaagaacaaccatctcaaatcttgaaggagtcatatatgacattaccctcaaataatgctgctcttcgcgcatgttgatgaagtgcttaggtgatcagtagtcatgaaaagtacatgcaacttcctctgaatgactacatcctttcggaggaggaaagaataccacactgccacagtaaacagcattattgatgaagggcttcaattcatacgctgtcatgctgatttgatgtaggttttttggagagggattcgatgtggtttttgaatgctttgattatcatggatagtagttttgtcacagctctctctgaatactatcttgtcaaggagatgaccaaaaccctgaagttcttgtgaggaagaagttgctgaaagcagtggcataacgtaagcttgaggttgctggttctgagctctgtaaagttcctgaattaccatgagctagcctgtaaaacgtcaattccaactgaagcttcagcaccattcacttatcctgcaatgcatgggatatatggatccaatcctgggttgttctttagcctgttcttggtttcgccatcttttatgttttgccgcgacaatttgtcaaggcctctgcctaatccaactttgtcatggaggcaaatgccacactcttaccggcttttcttggaggcagcccaagtctggatctccatccagccaaatgacatgaactgtactggatcttgttgtgttcccctgttgcagcacagtgcctgttagcactgatgcattgcacatttgcactgattcattgcactgcttcagctgcaaatctg

SEQ ID NO: 18068 - DNA, 1381 bp, Oryza sativa
  ref <308>: DATABASE ACCESSION NUMBER: AK068479
  ref <309>: DATABASE ENTRY DATE: 2001-12-06
ggttgtggagtggatctccgcctccggtgagctccagctccgatggcacgcggaggcggctacgggtgggcgctcgcggcgggcctcaacgccgcgctcgccgccatctccgccaagttcttcgcgcctccgcttctgaaatacagcatggtgatacttttcaatgtgacaatgtggggctgctatgtgaacagcctcaaagcactgtcatccctccaagcaaccgtcaccaattttgctgccaacttcatttcatcaggtcttgcagggtactttctgttcgaggagccactgccttctaaggtaatatgagaattctcccttctgtgtagtgcgtgcacatcaagctagttattcatgcagatcaaatagctaaaaattttcaaatttatttgtgttagcttatgtcctctgttagattgggctttttcttccctttcaaacatgggaagagtatcctaggttgatctgtcacattgcttcttagtagtatgagtaggtttatttattataaataggattaaatctagttattaagctaggccactttatctggattcatattactcgcttgaaaagtcacatagcatacaaagattatcttataatttactgttgtatgaaaaaattcttgagagatgcatgcagttggttgataggaaagaaaacacactggatctttaggttgttatgctaaaatagatgccgtttttcagatagagaaatagatggtcttgtgctttatatcatgagcaatgacttgcccccttgtataccagttaaatacaagccaaaccctgtcataaatacaacaataataacatatcacttgcctactatatctgtacagctgaatttatgtacagtctgtaaaatataataataataaaaaaagacatttggagggagagatgtccctccaaacagtttcaagaagaaatgtgagcgtgttggggattgaacacgggacctcagggttgaaaccacacaccctttgccactgcattatcaggtgtatctcagactgtagaatactgatacatcactttccccacttttgagtttacatgtatacaaaattgtaactgaactgcactcagcttttgaatttgatgtatgttcatacagtggtttgtaggtgctagtcttatcattgttggtgtttttatcctaagcaaatcaagcatcgagaagaaactgaactctgactagagtaagttttaaggccaaaattttattagctacgacacacattgtcagtttgtacttctataagcttgtggtatgtttgaccataacttgactcttttgtaaaaacttgtgtcaattatgttttgcaactttagttcatatttttgtaattagtaaataacttgagctc

SEQ ID NO: 18069 - DNA, 3074 bp, Oryza sativa
  ref <308>: DATABASE ACCESSION NUMBER: AK068480
  ref <309>: DATABASE ENTRY DATE: 2001-12-06
ggggcgggatgtggatgttgagtcgtcttcagctacactgatggagacagatgaggggttccagcccgtattctttcagccaagagcactcaagaacctgtaccggatcgatgaaattgaaagtctcatgccaatcatggacatgcgtgttgcaaatctatttgatgaggaaacaccacaggtattcacagcctgcggccgtggtcctcggtccaccttgcgcatcctgaggcctgggcttgccattagtgagatggctcgatcgatgttgccggctgagcctattgctgtctggactgtaaagaagaatatcaatgacatgtttgatgcctacattgtcgtgtcctttgccaatgttacacttgtgctctccatcggtgagactattgaggaagtcagcgacagccagtttctggataccactcactccctggcagtttctctccttggcgaggactctctcatgcaggtccacccgaacggcatcaggcacatcagggaagatggccgtgtgaatgagtggaggacacctgggaagaaaactatcactaaggttggatcaaaccggctccaggtggtaatcgccctcagtggtggagagcttatctactttgagatggacatgacaggtcagcttatggaagtcgagaagcaggacatgtctggtgatgttgcatgcctggccattgcgccagttccagaggggagacagaggtcccgattccttgcagttggttcctttgataacaccatccgaatactctccgtggaccctgatgactgcttgcagcctctgagtgtccaaagtgtctcttcagccccagagtccctcatgtttctagaagttcaggcatcagttggcggtgaggacggtgcggaccatccagccaaccttttcctcaatgctggcctgcaaaatggtgtcctgttccgcaccaatgttgacatggtcactggtcagttatctgacacacgatctcggttccttggcctgagacctccaaaactgtttccgtgcatagttagccaccggcaagcaatgctttgcctgtccagccgtccctggcttggctacatacatcaaggtcacttcctattgactccactgtcctgtgatacacttgaatctgctgcatccttctcttctgatcagtgctcagaaggtgttgttgccgttgctggtgatgccctacgaattttcaccattgaacacctgggggagactttcaatgaaacagccatccctctgcgctacaccccaagaaaatttgtgattcttccaaaaaagaaataccttgctgtcattgagagtgataaaggttcgctcagcgcagaagagcgagaagcggctaagaaggagtgccttgaggctgctggtgttacagaaaatggtaatgcaaataatggggatcagatggagaatggtgatggtcaagaagatggtgctgaggacagaaacacacttccagatgaacagtatggttatccaaaggcggaatcagaaaggtgggtttcttgcatcaggattcttgatccaaagagcagagacacgacttgtctgcttgaattgcaagacaatgaagcagctgttagcatttgcactgtgaactttcatgataaggagcatggtactctcttggctgttggtactgccaagggattgcaattctggccaaagaggaacctttcagctgggttcatccacatatacaagtttgtagatgaagggaggtcacttgaactgcttcacaagacacaggtggaggaagtacctcttgccttgtgccagttccaaggacggttgcttgctggtgttggttcagtcctcaggttatatgatcttgggaagaggaagttgctcaggaagtgtgaaaacaaacttttcccaaggacgatagtgtctatccatacttaccgagataggatctatgttggtgatatgcaagagtcatttcattattgcaagtacagaagggatgaaaaccaactgtacatcttcgctgatgatagtgttcccaggtggctcacagcagcaaatcacatagattttgatactatggcaggggcagataagtttgggaacatatattttgctcgccttcctcaggatctctcagatgagattgaagaagacccaactggggggaagattaaatgggagcaagggaagttgaatggggccccaaacaaagtagaggagattgttcagtttcatgttggtgatgttgtcacatgtttgcagaaagcctctttaataccgggaggcggcgaatgtcttatttatgggactgtgatgggcagtgttggggcactgcttgcattcacctccagggaagatgttgacttcttttctcacttggagatgcatctccgccaggagcatccaccattatgtggaagagatcacatggcctacagatctgcttattttccagtgaaggatgtgattgatggtgacctctgtgagcagtttccatccctcccagctgatatgcaaaggaagattgccgatgaactcgacagaactcctggtgaaatcctgaagaagctggaggacattaggagcaaaattatctgaaagatcattgcgcatagcgaaagaactagacaaactgttgggctctcaatggctgtaaaaacagaatctcctttcctgtccgagacctagcagcttcagatccgtggcacattcaagaaataagaaaacactagggccaatcgagtggagaggtggtaaagtccttaatggtctgatttgtagaattcttggtgctaatgacctggtgtctggaattcgttgttaatggtctgatttgtatatttcttagttaacaatggctaagttgacctttcagatcgaagcgagaataggtcacataactgcatcagcatcagagtgttcttctgtaactcttagagcatgctttagcctttgtgttagtatttgctgtgatgtagttggacaagttctttgttttgatggttgactcatctgtaggctgctgctactttcatgatgtacgatagaaccttttcattttttcaggtgatactgaagcagatgtattggtgct

SEQ ID NO: 18070 - DNA, 1799 bp, Oryza sativa
  ref <308>: DATABASE ACCESSION NUMBER: AK068481
  ref <309>: DATABASE ENTRY DATE: 2001-12-06
ggcccagcgccgcacctcctctcctcgtgctctctcgccccctcgccgccgtgcgcatccccctcgcgtcctcgccccctcaccgcccggcggcaatcgatgtgctcctcctccgcagtccgcaccaccatcgcgccgcgcgcccctccgtaccgcgaaaaatcgctgcgcctcccctccatcgttgcgcctctcccacatcgccgcgccggcgcccaccatcgtcaccgccgcccatcgctctccaccttgcctccattgcggctacgccctccctctttcagtgctgacgctgtccccccgcctttcctccttccgcccacctactaccgatgccgccacccctcgcagtgactcctccccgaccccgacgccgacgccgacgccgtatcccccgcaaccaacgccaccgccgtcgacgcctactcctgtggcagtgtggaggactgctgcttccctgtctccatcaggtgtgtgcacgatttgtgtttgttaaaatgcttatgtcaaaaagctgtgggtataaaatgatatgctgcagattatcttttcctgttataggttgatcaataatggtttccctaattcaactttcatattgctgaatcttttggtctacattgatagctgatccattgggggtgattatacaaatgatttccgttggtaatgatttttccctaccttgcagacagaggaataccggacagttgtttttctttcttttcttctgttagggtgggttcatttcagacatacccaatttgttaggttgaccacgtccccattttgatccgcgacgtcacagacaattctcttgtaatgtatatgtgcattgtttgtcagaaacctgtcgaacgggaggcaccatcatacttgctagatctttcctcttagagcatggacaggggactattatctgcataatctagaccacacaatagaatattttaagcagatttttttcataagtgcgaaccactgcctatgttactatactatagttcctttcgagaatttgcacaaagtctatagaaaatcataatataagtgcgaccacggacttcctgaaagttagaaaaatcttctcaagcatatagtttgatgttcatttcataaaaatatcttgatatgattatataagtgaacaggatcaaattagtttgaatgtacaagctgatatgaaatgaccatcatccctctatctcccacccatttttttcttgaattttcttgcgttaaccatagcttctcttctggatttggaatttttttctccgccgcctctccgacgactgcctgccgccgccgcctcaaccgacatcgccgatccggtctcccgtcgttgtccctcggccgctgaagtctcctcggactgtctcaaccggcatcaccgccgtccctccgccactcaaatcgtcacgcatagccggtctcctccgacaaactgctttggcgacctcctcctcggcctccgcctcaaccgccgcctatacggagccacgccgccgttcctccgccgccgaaaggttaaactttttaattgcatctcagacttttgcatggtcttcaactggcaataatcttcagacattttttgaggagctgaatacatttcacgtggggctttcatcagaagatgcagtagaacgcttgcagctgtccggtgcaagcagattggagaagtttatctgcctttttctgatcattgtttacctacattcctgttctgaaatcctcatattttttacttccttttggaatagaacaagagcatcaagttcctcagctttatgtgg

SEQ ID NO: 18071 - DNA, 3108 bp, Oryza sativa
  ref <308>: DATABASE ACCESSION NUMBER: AK068482
  ref <309>: DATABASE ENTRY DATE: 2001-12-06
gtcttcttcctctcgccgccgcagcgcgcggccgccactccatccaccacaatggcgaaccccacgtcccaccgcctcctcctcgccgcgtagccctatcggcgagccgctgccggtggcttctcggcatccccgcgccgtagagtctccgccgccgccgtgtgctccgcaacattggggtcgagggttttcgattcggcgaagggggggggggggggggaaagctcgtcccgtgggaggcgccatggggagcgaggcgaaggagatgaagtacaggagaagggctagggttccagagcccttcgattacgggcaatgcggcggcgaccggagtggcgtgctggattggggcgcgctcaaggagaaccccgtggagctgctccggaagctcgacgagctgcgggaccacatcaccaggtcctgcgagatcaccgaccagccgcgggagcgccaccgcatgagccgccgcacggcctcgctgcgcccctcgcacgccgagccgccgccgctaggccgtgggccggagcactaccgctcacgctacacgggaaggtacgggtctggctttccgcacagtccgaatgaccagctgcatcggtctatgcatagagataggtatgagaggcagccgagtgggcggttccggcaatggccggagaggcagtgggagaattctgggtatcttggggggaatcaccatcagagcacctgccagtgtgcacagtgccttcatggccagagagctgtgatgcaggaggagcacattcccatgacgaggtactttgcaggccagcaggggtctcacctgttcgataggtccccatcagtctcatcggagcttgaccggaggtctgtcgcttcgtcattgtactctcatttctcggtgtcgaagaggaggacagagtttttcaggaagaaggcagagagtttctgtcgtcctgtgagaggcgccgctcctttcgttgtatgcagttcttgtaaccagctgctgcagctgcctcctgggaaatgcacagctcggaagcagattcaagttcggtgtggttcgtgctcggagatcgttagtttcaagcttaaggaagtgaaaattcatcctttggttgcgccgacatctttccctgcatcaaaaacagtggggagttccagtcgtcaggttaacaaaagttttgggtggtaccaacatcaggatgaaggaaattctagtttccataagctgcaagcacaagagagatggcagcagaacaaggatcttgcagacaatatttctgtgtcttctacttctagttatgacagaatagacaaagagtgtggatcaaacaggagcagtcagttactatcagtatctgttagaaggtccagacttgcaaatatcccaaaggatatactatgtcaaggagatgcatacagtcaagtagaaacttcagcatttaatacaggcaatctacaggccccagttatagaggacaaatgtgtcgatccattttccagtcgtctaaaggattgtagtggtggagatcgcacaagcaaggaatgtagcctaaatatcatggcagattctgttgatgctaatgttagggatgaaagatcggacgtgacatatgagcagaacagcaaagatcataaagaaggatttggagaagaaactgtcagcagtagacatgagcaaaagctcaaagaaagtacaagtggcttttgtgatgatggaagcatgggtaacatagacaagctgacggctgataatgatgataccagcagccttgaagatggagacgtgagcaaaaagtatgaagaaaaaatcaaacaagatgacaacaactttcaatcagaattcattactgagcgatatagcaaatgcagcaaagaagataataacagtgtcattcaagttgaaactatagctacgatatgcaaacaagatgacttagatgattgttatagtgaattgctctccccaaattctgaacatgccataatgccatcgaagcttgagtcatcagttaatgagcgcacaaattctagttctcgtgtttcttctgaggctgaactagacgaagttcagtctgcagctactaagaacggggattcaaagttttttgctggttttttgaagaaaggtttgaaggacatttctttgttcaatcaatcagtggacagtgctaaggtttcaatcaatggccattcaatctccgaacgtgtcctacggaaggccgagaagaagtctggtccagttggccctggttcatattggtatgactaccgcgctggattttggggtgtcatgggacatgagtgtagtggcatcatccctccatttataaaggaatttaattatccaatgccgaaaaattgtgccggtgggaacacaggagttattgtcaatggtagagaacttcatcagaaagactttgaattgcttgcaggaagaggtctcccacggatatctggaaaatcatattctgttgagatcaatggaaatgtgattgatgaaacaactggcaaaaaattacgaaagcttggaaagcttgctcctacagttgagaagttaaaacgtggatttggcatgcacgtccctgaagagaaaagttagctctctggctctgatgatgttcccttgctttgcaaaaactcatttccacgtaaaagctgtcaagggagttaaattggattgtggcatggaagaagcctttagattgtacttcttgaagcttgagtgtgcagcaacagtaatacacgagtacctaagacgacctgttttttatatatatttaccacttactcattcaaagttgacaaattgtcgtacaaattccattacttcatttgaagcattctttaggtatatatgacctaagcatgcgaacagctctaagttcctcatgtgtctgggtatgttgtttcctgtcccctgcatatgttgttgatacagagcaatagagtatagacaatattctgggtgtgtatcgttgtgggcttgtaatatgtctgctataccagtgcctttttacattatattacacatgtatgtaaagttgtaaatatttaatcttaaccaccttttgctaggtggcagatgtgaatgtttgatgatttgggcttgaggtttcattc

SEQ ID NO: 18072 - DNA, 1664 bp, Oryza sativa
  ref <308>: DATABASE ACCESSION NUMBER: AK068483
  ref <309>: DATABASE ENTRY DATE: 2001-12-06
gcttctagttcccatctcccagtcctatcgcgtagcccacactccaccctatcgcgccttctcttccatcgccacggcccacactctgccgagcgcgtctcgatcccctccgccttctctcccgtcctcctcctgccgagccacgccgtgccttcccgatctcctccacgttctctcccatcctcatccctccgagccgtgccgtgccttccggtcgcgcccgacgccaccccttcccatccccttccttttttcctctcaccactcccgatatgatcgattaaatccaataggatgtgaagttcatcttgattcagctgtgggggttgaggggaggggaagctcgacagtcggctggagttaacctcattagggtgtggttgttgaggggatagagtgcagccaagggaaacatcccgtcgggcaagacccacgctgtgtcgctggcgacgtcttctcccccagatccgtccaggtccggcagttaggaggaccgcaaccagaagcgctggcacataacctgagacgatatggcaccacggagcggttggcacttgtaaggtcacaagagcgacttgtacgtaggaatcctcaatctgaacaaacgatttccctccgccggtcgacatcgtcatggtctccacctgaagccgcatgatacaatctgcgtacaactcctgcacggcagaactaactcaagatggctggtggtcgcacctattgggacaaagccctcacaaagatattcctcgacttatgcattgctgagaagacaaagcgcaatcacaacaagaagggtcgtaccaacataggttggcagaatttatatcgcaatttcagagaacaatcaggcaagaactatgacagtaaacagcttcaaaacaaatttagcacctttaagagacaatacaagctatggaagagcctaaagaataagagcggaggtgggtgggacaacaattctagcaccataaggtgcgatgatgattggtgggaagaccgtattgaggagaatagggatgccagacagttccgtggaaagccgcttgaacatgaggatgagctgactactcattttggttgcatggacaccgaagaaggtacaatgttgtgcgtaggtggtattggcaagagaacaccaagcagtggaagcgatgacaaccttactccgatgtctaacgacaatgtcggcttgtctagtgctggccgtgtggcttaaagggcagggaaggagcaggtggttgaccgcccaccacccaagaagagtaaaaatatggagtactatgtagggtgcgtatcagagagtatgctcgaaagaagcaggaatgaaagcagtgtgctcaggggagagcaagatgagataaaagaattgctgcaacttgtagaagaggatggtgtggctcaaggatctgagttgtatttcatagctactgacctatttaggtcagctgcacgatgggcagcttttaggtgtatttaccctgcagagaatcgtaaagcatggctccgatggacttgggacaatgctaggaaaaagtgataccagtccatgcttagttgtcgcacacggtgtttgattgtatatacccatcgccaacacgacgtggcattatgtaatcggttgtttgaccttggcatactcttatgttatgcattatgaccct

SEQ ID NO: 18073 - DNA, 1915 bp, Oryza sativa
  ref <308>: DATABASE ACCESSION NUMBER: AK068484
  ref <309>: DATABASE ENTRY DATE: 2001-12-06
cctcaatgctagctaaaccatagctagcttgcctacctcctcctcttcttcttcttcttcttcaaaagcttcttcagagtggtggcgatatcgactacacactgttcttggctacatcgattgattgatcagagagagatataacgatatcgatcggatcagttaaatagagtaattgatcgatatggggaagctggtgagcaagagctggcaggagtcgaagctgctgtggcacatcgcgttcccggccatcctgacggccgtcttccagttctccatcggcttcgtcaccgtcggcttcgtgggccacatcggccaggtcgagctcgccgccgtcaccgtcgtcgagaacgtcatcgagggcttcgcctacggtgtcctgctaggcatggggagtgcgttggagacgttgtgcgggcaggcggtgggtgctgggcaggtgtccatgctaggcgtctacatccaacgctcatggatcatctgtggcgccaccgctgtcatcctcaccccgacctacgtcttcaccgccggcatcctcatagggcttcgccagcccaccgacatcgccgccgttgccggcacctacacccgttgggtcatcccgcagctcttcgcctacgctgccaacttccctctccagaagttctttcaatcgcagagcaaggtgtgggccatgacggccatctccggcatcgccctggcgctccacgttgtgctcaactacatcttcctcacccgcctcggccacggcctcgtcgccgccgctctcatcggcaatgtcacctggtggctcatcattctcgcccagttcatctacctcgtctccggctgcttcccggaggcttggaaggggttctccatgctcgccttcaagaacctcgccgccttcgtcaagctctcgctcgcctccgccatcatgctctgcttggagctttggtactacacagcagtgctcatccttgtcggcctcctaaaggatgccaaactccaggttgacgtcatgtctgtctgcatcaattaccagctctggaccttgatggttgcactgggcttcaatgcagcagtgagcgtgagggtgtcgaacgagctgggcgcgaaccggccgaaggcggccaagttcgcggtggcgatggcggtgtcgacgtcggcgatcgtcggcgccgttttcatggccgtgttcttcatttggaggacgcagctgccgcgcttcttcagcgacgacgccgacgtggtccgtgagtccgccaagctcggctacctcctcgccgcaaccatcttcctcaacagcatccagcccgtcctctctggtgtggcgataggagcagggtggcaatcactcgtggcgttcataaacataggctgctactacctggttggcatcccactgggtgtcctctttggcttcaagctgaagctcgatgcaatggggatttgggtgggtatgtcacttggcacgctgcttcagacagccatactggccttcatttccttcaggacaaaacgggagagacaggccatgatggctgaggagaggatcagagagtggggagggaggaacgacgacgcgctgccgtccacgacgacgccgacggctgatgatcataacgtagatagatgatgatgagatcagatggttaattattccttcaaattaattaaacttgcagttaaatagtggagttatttatacacacatcacaaaagctgagtaggcttgtagaattattttgtacagattcatatatggtctatgtagagagagaagctcggtttttataggtgctaaacctcagcttgaatttcgttttgtcttgccttccttttcttccattttggttggaagatgatcagctggaaattattgtactactgaggttcattttcacattgaggtgattttttgagctccgtaatt

SEQ ID NO: 18074 - DNA, 1109 bp, Oryza sativa
  ref <308>: DATABASE ACCESSION NUMBER: AK068485
  ref <309>: DATABASE ENTRY DATE: 2001-12-06
gacggtcctcatcaagcgttttgccgatggggaaatctacgtgcagctgcaggagagtgtgaggggttgcgatgtgttcttggtgcagcccacctgctcccctgttaatgaaaaccttatggagctttttgtcatgatcgacgcatgtcggcgggcgtcggcgaggtctattactgttgtcattccatactttgggtatgccagagctgacagaaaggctcaaggacgtgaggccattactgccaaactttctgctaatttacttacagaagctgggagtgatcgtgtaattgtatgtgatattcattccactcaagcattgggatacttcgatattcctgtggatcatatacatggacagcctgtgattctggattaccttgccagtaagacaatatctaaggatcttgtggtggtttctcctgatgtgggtggtgttgtcagagcacgtgcatttgctaagaaattatctgatgcccctttagctatcgttgataagagaagacagggtcacaacatgtcagaggtcatgcacttaattggtgatgtgaagggtaaggtcgccatcatggttgatgatatgatagacacagcaggaacaattactagtgcagctgctttgttaaaacaggagggagcagaggctgtctatgcttgtagcacacatgctgtcttcagccctcctgcgattgaaaggctctctggaggcatctttgaggaagttattgtgacaaactccattctgctgccagagcacaaatgcttcccccagttgacagtgctctcaatggcgaaccttgtggcagaaacaatctggcatgttcatcgcgatggctctgtgagcagcatatttcaatagcggcggatgctatggctaccgcgatgccacatttgtgtggtgtggagaaggcacctgatggttgtgcccatctgcgtaggaatcaattttggtgacaagactaaataaggttgtagtgccgtgtaggcatcacacatgtatcgtgtgatcaattttgttcttgcacccactaaatagtgttttcctgttaactcgacgcaggatatccattgtatcaagtataagagaatcagtctcgtgcagttctttc

SEQ ID NO: 18075 - DNA, 1529 bp, Oryza sativa
  ref <308>: DATABASE ACCESSION NUMBER: AK068486
  ref <309>: DATABASE ENTRY DATE: 2001-12-06
gttatctgctaatcatccctgaagagccaaagagtttgtacgctgccctttggcctccatccatccatccatggctcccgtcgtctcccgcggcggcggcggcggcgggcgcgcgatgggggcgaaggagcggaaggaggcggcgcagcgcgagaaggaggccggcgacgaggcgtacggcgaggagctgtacaagagggccgccgcccactatgccgccgccgccgacctcgaccccggcgacacctcctgcctcatcaaacgcgccgcagccaacttcagcatgaacaagtgcaaggagtgcgtggcggactgcgacgaggcgttggggaggaggaggaggagggacgcgcgctgcggctgcgacgagaagctggccgccgacgcgctgttcctcaaggcgctggcgctgctcaacctcgccgtctgcgccgcggatcacgagccggcgatcacggcgctggaggggtcgctggagctgcgccccggcagcaaggagacgcgggctaagctggacatggcgaagaggaacagggacgcgtttgcggagcaggagcggctcgatcaggaagctgccaagacccaccgagacagaggcctagaacttctccgtaagaaaaagtataaggaagcagaaatgcagttttctgaagctataaaaaggaacccaaggtatcccaagaacttcagtgacagagctcgatgccttgtcgagctaaattcattgcctaaggcgcttgaagatgcaaatcgatgcattgagctggatgatactttagggatgggatatctccgtaaaggtctggttcagattgcgatggccaaatatgaggatgctattgcaactctcgtagacggtttgaagcatgacccacaaaatctcagtattcataacagcctaagagaatgtgcagcacgcattaaaatggctaaagacagtgatgccatagcaaaggacttgacgaagcaccaaagagaaatagaatgtctgcataaacaactgaacgaaggtgagaacaaagcatccaaggagcgctcaaggcggatgaaatctgaaaagctggtcaagacattgtcaagccaagttgaacaacttaggtcagccaatgagcggatgcaaatctagaacgcgaactctcagaatgcagagagcgttttgaacggcttcaattgatccaaaaccgcatacttcaacatttcacctgtcctatatctcatgaagtcatgaatgatcctcttatggcagctgatggacacacctacgaagctaagtttatcagggattggttccgcagaggccataacacatcaccaattaccaatgttgaacttgaacacaagaaactcgttccaaatcgggcgctgcgttctgctattgaggagtgtcgcaaataacacaatatgatgctacttttaacctctgctacaagcatcaccaaaactgttttttgtgttaagtaacgaactgaacaactatgctttaataacgaaccatgatatagcttttcaatatgcagattcggatttgt

SEQ ID NO: 18076 - DNA, 2169 bp, Oryza sativa
  ref <308>: DATABASE ACCESSION NUMBER: AK068487
  ref <309>: DATABASE ENTRY DATE: 2001-12-06
gaaaaggagagaagagaaaaaaaactttgggcgagaggagaggaggaggaggaggaggaagaaggcgcagtgagatctccgatccttctagaagcttctggaatcgcgcggtccaggtagaattatacacttgagggggctgatgcgtggtggtgcgccgccggagtggtaggtggcggtcggggggagtgggaacttctagaagggcgtgtcgtacgtgtgcgagtgggttgggagtcctctggatttatcggttcgtcgatctcgcgggagtagtagatgtctctggatgcatgcgttggtggataatagtttgatggggtcatctccgcgttggatagcaattaaggaataggaagaatatctccagcaagactttcatctgcttatcatcagtatgtccatcgaagagagaacattaagtttgataaacaagaccactgcgttaaatccaaatgcacaagaatttgtaccttcatccctcagatctatcaatgatgtttcaaatagatcagacacatccaggatttctgtatcaggatactccaaagacactattgcagatcaacaagatcctgttataccaagtaaccctgatgaagaagcacatcggtactggcaagaacagcttccagatgatattacccctgatttcaaagttctgggacaagatgagatgcctggacctgataatatttcactcactggcttgtcaataaatgatagcattggtgcttcactattttctccaaaccagacatcgaatttgcaacaccgtgcttctccttttattagggacactctgagcacacgatcaaagatcgagtttcctagcccaacttatgtagaagaacagtcaagagctactattatgagtccaactgcaagcgctatgagtccaactgcggctccgtgggtaaaaacagtaagaaatggtgtgcaatacaatgcaaacagaagggatgccagccattacaatggagattctagcattggagctccagtgcaaaaccttactgatgcatacttcggaagcaggcgcagctttagctcaactatggatatcatgagtcagctggagaataaagttgatggacgattcaatcagaatctgaggtcactgtcgtttggacattcaagtcctccatcaccagcatcatatggtcaaaatggtcttgcaaactataacaaagaagcttttggtctggcaaacaatacatatagatcccactcagctgtactcgcagatgatatactttccccttcagctggtcgggaacatatttctctggatgctcctagggggaggtacaatacaactaatttgcctgtttctggtcttggttcaagcagaggctctcagttcatggcaagctcattcaatggcaatcatgacatagtctcaaacaacacgctgcaaaatatagctggagttcaaacaggacctgcttggcttgaagctgatactgcagcaaacatgtttttggaatcaaaggatgaagctcatgattttgcaagcctacggcatgcgcttctggaacaggataggcaggttcttttaactggtgccaatcctttagcaaaggaactaaacatcaaggagctttacaatttgcaaagcagactagctcaggaaaaggctagagatgtatatcgccaaagatttcaaatgccagaatttcaaggcctggttcaggagcaaaataccccaattgacctgtgtggtcttcacgtaagcgaggcgatacacgccctgaactatgagctcaacaaccggcggaagattgctcgatccacaggccgtcgtctccaggtgatcataatatcaagcacacgtactccggcgaggctgaccgccgccgtcgagcagtacctcctggagcacggcattcagtatacgcaggcacagccgggccttttccgtgtcctgttacagtgaagtaacaggatggtaggctcatcatgtttgtgtacacctttgaaagaagaagaaaaaaaagaggaggaacaaaaaagaattgacccctgtactactgtatatggcagagatgagtagtactagcagaatagaaatttgaaatagctgttgtaatattcgtatagcaaggcttttttttttgtcagcaaaaaacgttgtaaaatttgcggaattaggcgatatgttcttcc

SEQ ID NO: 18077 - DNA, 1560 bp, Oryza sativa
  ref <308>: DATABASE ACCESSION NUMBER: AK068488
  ref <309>: DATABASE ENTRY DATE: 2001-12-06
gatctatcactgtaagatggtatcagagctcatgggctgaaccctagccctcgatccccgttgtccgccggcgctccggcttgccggcggcggctccctatcgggcaaatcttcttcacgtcctcctcgtccggatcagcagcgggattcacagcaagtcagtgtgattcgtccgtcaagcgtgagtgcatcgctcattgcagccgctcgtcacgcggttgctccgctcagccgttgttgctgctcttccactactgctgccgctgtgtgctgctggtgctaattcaggagacaatacatcaagtcctgtaagcaagtctctgtccagtcaatttgtcaaattttcttctgctggtcttgatggcaacatccgacccctttcttggaggtggagctctgctctccacggacattaagctaaatggtcaaaattatcaagaatgagaactttcagctcgtatgcttttgaggtcgattggtcaagcatctcacctcacagatgatcctcctgatgagaaaacggatgcaactaaaattaaggcgtggaaaacagcagatgatcgtgttatgggattcatattcatgagtgtagaggtgcctattcggatgagtttcagggatcacactaccgctaaagagatgtgggactacctcaaacagaggtacactcaagaaagcggagctttgcgtttttccttgctgcagaatttgcacaacttacaacaacaagatcagtccattgaagaattttataatgcctttactcggttgtctggacagcttgaggcacagactccaaaaggtgcttcaggttgtgcacaatgcaaggcgagagagaagcatgatcaagaaaatctagtgtatcaatttgtcatgagactttcctctcaatttgagtccattcgagttcagttgcttggacgtcctacacgtcctactatggcggaggctcttgcagatctaatcgctgaggagacacgtctttgttccttggacactactcctactcctgtggttactcacaatgtcatggcagcacctcagcgtgttggagctcctatgggcgggatccctgaattcagttccatcgccaaaagtgatcgtatttgctctcattgcaagaaggttggacatatttccgatgattgcttctatcttcatccagagaagttggctgattatcaagctaggcgtgcagcggtcccccgtcctcgtgcgacggctagtgctcctgttttcttggatatcactgctgctggtccttctagtactagtgctggtggcagtgcctctagcgccgtctcatgtgctcctcagtcattggttgcaagaccgtcttatcaagccagtgattggtcatggccatcaccatagttggtccccaaggcctctaagtgtgaggtcatcttcgcctaccacttttgttgccatctcctacttgttgcttttgcttgctgtttggagaaaaaggttgttgctgctatagtatatatctgtccttcagttcagttcaagtcttctgttatccattaaatctatctaagtcaatttcatatcttc

SEQ ID NO: 18078 - DNA, 2694 bp, Oryza sativa
  ref <308>: DATABASE ACCESSION NUMBER: AK068489
  ref <309>: DATABASE ENTRY DATE: 2001-12-06
gctctctttcttctgacttcttttgtgcttcttccaagcttccttccagtcctcgctctcgtcctccctccgtcactcgcagcgcagaccaaggaaggcttctcgcctctcgccttcgcctcgcttcgcttccaagtcccaatgccgacgcaacagcttacctcacgcggcgcgccacgcgcttgagaggggccgccaaccgcatggcggcgccgggcctggacgaggtcatggcgttcctcaccgaccacgggttcgcgggcgccgcctccgcgctccgcgacgacgtcctcgcccgcgccgcgtccgccgccggggacgccggctccgattccgatgccgcattagatccccagctcccgcccctccggttgccggcgtccacgtccggaggcggtggggcgccggcggcgccgcctgcaagccctggctccagctctgactcggcgtcgtcctctgccttcgtcagcatgcgctcctcgccctcagggatgctgaatccatatggagtctggtcgccgcggcactcgggcacgtcgtcatcggagatggagtttggcacagcgcgtcagtacgacgccaccgacttctttttccaagaaggttggctttacgacgaccatctcttccatagcaagtcggagctggacgacgacaatggagaagacaaagaggaggacaagtttgttcttggtgtccacgatggctcagggaggatagagatgggagtgcttagtgccggtgatgaccaccgtcatgaacatgttggcaatgacggctgtgagggatgtgctgaggtgtacacatgttcatcaccgctctgcggatgctgtggtgagggactgaagaacggggggctagaggtggtgaaggattctagctccactgtctatgggaggtaccagatcattgatgaccagacagagatacttgatgagtgtggcatggatgggtttcagttgaagcaccctgcggatgttgtgcttgagtgtcatttgccaagagattctggggaaggagatgagcgatcggagctgagtgtagtggagaaggagcttcaaatgctcagttcatttggtactagggttgatgcagatgcttttacaagtcctggacttgtacacgatatcacagacaatgccaaactggatgatagcattgaaaagaatatgaaaaacagtagcgacaaatatctgaaggaaggttatagcatagagcctttccctgagagttctgttgatgatacctttgagtttggagatattggaccattgaatactgatgcgcaaaactcagctgctgctaaagctgaggaaggaaatccagagacaaatgttgatctcgctctcgctaatttccatcgagaatatgaggatttgaactgagaattgtccaccgcaagaacaggaccggctttgaagtaagcaaagatttccccattgtcataaattcagttatagcaggaagatattatgtcactgaataccttggctcagctgcattcagtaaagttgtgcaagcacatgatcttcagacaggaactgatgtttgccttaaaataattaaaaatgataaggatttctttgatcagagtctggatgagatcaagcttctgaagtttgtgaacaaatacgatccattagatgagtatcatgtgttgcgtctctatgactatttttatcatcaggaacacctttttattgtcactgaattactgcgagcaaatctatatgagttccagaaatataatcaggaatctggtggtgaagcatacttcacattgcctagaatacaggcaatagctcggcaatgtttagaagccttggtatatttgcatcatttaaggatcattcattgtgacctgaagcctgaaaacatccttatcaagagctacagcagatgtgaaattaaggttatcgatcttggaagtagttgcttcttgacagacaacttatgtctctatgtacaatcacggtcatatcgagctcctgaggtcattctggggcttccttatgatcagaggattgatatttggtctcttggttgcatccttgcggaactctacactggtgaggtactatttcctaatgaaccagtgcccataatgcttgctcaaatgattgggataattggcccaattgacatggaaatgcttgccctgggagaggagacgcaaaagtatttcactgatgattacgaccttttcaccaagaatgaggaaacagatcaattcgagtatttgatcccagaaaagtcttctctgcagcatcacttacaatgccctgattcagagtttgttgattttctatcctatttgctgcaaataaaccccaggagaagaccaacggcaagtgaagcgctacaacatcaatggctttcatttgcatactaatgactaatgagaaaccaacaggtcatttcgtttgttttaagtgctttgttcaactgctcctaagctggatccctgcaatcttctaaagatggattgattttctgatgtttccccatgagtccatgacatgaaacattttacactttccttgagttttagaaggatttacctttgtgcttgctgaactagcatgcggcacaattttcttgtttcgtttcttcagggcaattcttggagtggaagccctgctctcagtgttaagattcgtgagtgtatgtaaatatgaggaaattttcctgtgt

SEQ ID NO: 18079 - DNA, 2565 bp, Oryza sativa
  ref <308>: DATABASE ACCESSION NUMBER: AK068490
  ref <309>: DATABASE ENTRY DATE: 2001-12-06
ggtgctgtgcgtcgtcgtcggcgccggcgatgcccctccttctactgcgtgccggcgccggcgccaagccaccactctccttctccgtgcctccgcctcctggggatgtccgaataagcagcagaccacccaccacggccacgcgctgctcctcttcctcttccccaaagctctcctccgccaccgtccaattccgctccgactccgacccatggaaccaacccactgttgatgacgacggcgacttcgacttgaaggggaggaaggccatccccggcatccacgtcccgcgccaacgctacatcgccgtctccaagcccgccctcctcgacgctctcctctccctcttcccatcccaacctcccactccctctcccacctctgctgcggctgctgacttcaagcgctttgcaagatgcctggacgccctcctccacgcagagcacaaggagatgctcgaggaaatgcgaacctattacatgctcacccacaaccatcaccaacacaccgctgccgctgatgacgatgacgatgaccaatccgtgctcaacggcaacgccaacaccactgctggtttttttggcattacagacaacggaaccttgcttcttaccagaagcttgggtctcagaacactcctgggattgtcaccagaccctgattcacacaacagaattgcttttgcaactcatttccagcgctccttcatgaaccttctgcgcaatgctcaatttgaagagctctctgcgcaagacctgctcttgacatacgccctaaacaccgattacctcttgactttgcccatttatgtcgattggaaaaaggcagctgagtccaatgctatcatattcaggcgtgggtatgcaacggagaggcagaagggcctactgttggttgaaaagcttgattacctacagtctaaactcttgcaaaatatcttctttggcttctccaagcccttgaggaagctggggaaatggctcaatgaggcattgaaaagatcaacagggaatgagggatttcagatctggattgaaaaacttaaagtctggcttaaagagcaaacctatgcggagaattcgctttcgttgattgagaactcttcatgggataaacttagatctgatcaattaccggatgctgatcttcctatttggattgctgctcaaagggcagtctctcgttacgaaggaatcctgtcaccagttggtcctcgtggcagacttctaagaagattgcttgcttggactggtttaatcccttctctgccagaagcaacaataaagtcagatatcgatacaaaagatcttgaaggctatgtgaggccaaattttctgccaagaataacacttgcaaatatatgggcgccagcaagcagagaatcttgtaacaacaatctctgggagataacaaaagcttcttttggtgttttatttgggaagtctactcttcaggaaccagcattccaagaactgatcctactttatactgatgaggctgatcaaagcaaagagagagaaaaatcagacatgatgccattgcaactgaaaatttttgaaaggatccccatccctgatctgccagtggtttttcctcacaagaagttgtccttccgcatcctagatacagtaaggttggatattgctaccgtaataggtttgttggcttatgtcgtgaactacaaatttgagagtttagcctcatctccatcggcttttcttcttgatatagttgcctttactgcactagcaatacttgtgttccgtgtggcgctgggttacaaacaaactagggatagataccagcttctggtcaataaaacgctctatgagaagacattagcaagtggatttggttcagtttattttctccttgacgcttctgagcaacaacagtataaagaagcgcttttggcatatggtatgttactgtgcaggaaaaagtatcaggtgtcatctcgtgtgagcatcagagatacatgtgagcagtttatgtacgagaaatttaaggcgaagatcgaaatgcctattgacaaagctatggagacactattgcgtctggggctggtgattgagctgccaactgacggcggctcccgtgtaatcgcacttccatgttcagacgcatacgagatcctgaaaagccgctgggacagcttgttggaacacaagacggaacaaggctgatgaagaagactgtattattgagatggacggacgttgtctgtattcatctgtgagaactgttcagtggagaagttgaaggaagaggttccacagccttgaggttttgtatatgcatacaagactcttgtagcagcaaattagtagtacgtaggtgttgaagaagaagaatatatgaaatgaaatgaaatgaaaatgtgagatgttgcccatgaaatggatgatttgaatcagcaggatgtgtgaagaacgggccaaatgtatataccatacggccattggcatctagccaagctagtgatttgagatgagaatgagatggtggtgcacttgtgtaaatgatatattttgctactacatttattatagcgaaaataatggt

SEQ ID NO: 18080 - DNA, 4643 bp, Oryza sativa
  ref <308>: DATABASE ACCESSION NUMBER: AK068491
  ref <309>: DATABASE ENTRY DATE: 2001-12-06
ggtctttccctcaccctctccctcccctctcgtgccatcgccgcctccgcctccgcctcccatcgcctccccctccgcctcccctcgcgtcgcctccccctccgcctcccctgcgccgtcaccatcgccatccccgtcccctcgcgccgccgcctccacctcctcctccgccgccgatggccaagccctcaaggtcgccggatctgatggcagcgagttcgtggtcggcgaatccggtgatctaacggctgatgaaggggatggtggtgatggagcgcgaggtccgggtcacgctccgaggagatcgcctcggccaggtaccccgctgtgaagcccggccggagccgcgcgacccacgccgcgaactgctcgtccggcggcgcgcggacgggggactcggcctccaccacgtccgcgggcactcctgcttcttctcctccagatacgccataggagctgaagcgacggaggctgcgagagaagcggcgggcggtggcggcgaggagtgccatggcggtcgggctcgcctgctccggccgaggcgcttctggagtatataaatcacctcctgccattttgcagtagcagcaatctgaatgaatattgcaaatccaagacttgatgaccacttttgctgatcagacaagaagaacggccaagaaacattgtttggactacgccccatggcagattggcagatggagaatttacgcatatgcaaatcctgcaatttctgcataaattataatgatgcctgagctgtgtggctgcagatgctcccagctgcaatctctttagttaattacctaaatgacctgtgctttcagatgtaccagacacctcctccaacactgaagtagagctatcagctcatcgcccttctaataccaccagatcagatagcgtcggctagggaggctgaagcccaccgagatggcacaggtgctgggaggtcgcttgtgcatattccgatttgagattgcactcattaatgagaggttttgttctcttcttgttgttgtgggttgcttatgcactgtgccacaggtgctgggagatacagcatagtcatctgagcaactccggctctttgccggtttgcgcccgtcaagatcttcgaggacgacatgcatcttgccatctctgtttgcttcacatcttccacatgttcagcatggatggtcacttagctccatggcctgagcttgtcaagttacacagaaagctattcctgatgttccagcgtttcccaattgaatagaaaggaactaaggaaggcgtaaaaagacgaatgcggtactatcttttatttattgtcatcccttccactcttccagaattaatacttccaataatttgcatttctaacacatctcctttcacacacgttggatatgtgactaccatatgctttcctggcttcttgaccagatgtataaaagaaagtaggtcctatgtcaatatcttcctactttctttgtgtgtttgtggcggggggggggggtctccagactttaattactttacttacagcatattaagagatgtgcttcaatgcgttcaataaacaaatcaatcttcatattctgaatcatccaatttttaacttctactgtttggtaggtttctctattcgcatgttcaatactcaatcttgaacccttatacattgctttcatttatctgatgacatttacatataaatctctgttaatagcattgtcatttaatgctagcagctctgcattattcattttcatttgccacttgtgatgttcacctcgaggaaatcatttataacatgattttaattggtgtggaagcaaacaaagcatactgctagattatagtataaacttgtgaaagatatatttcctttgccttgtttatatcctaatagattaattgtgtttagagaaatacctgagctgaaaatgctatcgagattatggctaaaagaatttgattttggtagaatatataagagggaacaaaaaaatattcatttcacaaaagtcgtgtgtgtgcatgtatctgcgcataggcattttttttagcaaaaatactatatggtgattcttttacaaattgtcaatccattgttccatctgtgtaatgggactatctttttccctatggataatcatggcaaattcatagttgaagcgatgaaaacagatctacatgtaactagccatttgaaagtataacatatcaattttgctgaacgagttaaaaatgaacttttgttactggagtatccttggatttttgtgaagtaatcgacataaaagataattcctaccaaatttatttagcttttgcaactagccattaaaaaatgtgccaagaataaactgcaaaacacaatcctatgttgtgtcattttgagcatgtgcaaaccaacaattgtactcaccgatatcctttgttgataacattcactttccttagatggttggttgagattgtaccttcagcttcagtattgttcgtcttaaggaaactaccgactaaacggggaatcacacagcaccatccaacattaggtcaatctgggagtccccaatatgtcatttcaaattgttcagctactctatgtgagcagaaatgcaggttgtccgatacagatgaaccatgaaatcctattgattgaattgcacagttgcttgatttgctttgtatatgtactggttatgcattttgttctcatataagtaatgttgagtgccaaccccagtttgtagaaatacaaatataaaatgtatcccagtgatatttccactttgaatcgtttataatttggaccacatgattgttctatacaactttttagttgttatttgttgcatgcttacaatatctaatactggaaagaaaaaatattaaaattgctaaggacaaaagaaattacatacaagttacattcttttcttgtttcttaaattgtagtaccatatcacttatcttaagtaaaaccatgttctgttgccacttattaacattttttttcaaaaagaatccattaacaaaaccatggtatttcttcaccgtttgtaattacatatataaaaaagttaatattttgcatggagctgttgaatgaatatttccttgatgtttaagattcttaaaactatgtagatccgagtggcaattttcactttggaggtatgcaactgatcctctcattctattattttttacattatacaagggtctatccctataaagcttattctacagacttgtctacattatgcttgaatggaaaattcatctagcctgcaactcctacaatatctaccatacagatcttggttatagtcatacacttctgctagacctaaaaactcatgggacaatatgtaatctgtattgcattggaatattggaattatttcttaccgctaacttaattcatacactagctaaatgtaagataattggaattatttcttaccgctttgatctaatagaggaagtatcagcgtaaccatttaagtaaaacaatctttttaccccaaatgataggttgatcccaactctattagttgcttatattcacaacatttcctcccattgcaatatttctttatatacaatttggtttaaattaatattttcatctatatttgtcatgttttgcttatcagtgccctcacacgcctgttgatatatgatatattatatagtttttgttatgtagacatcacatggtttcaattagattacaaccatatttgaattatcaagatatttgctttgcatgatctacaatgtattttagctttgaaacagctgccagtatcattgttttctatttgcaattagaatattggcagaataatatggccacttcaaattttcacttagttctattgcttgacagaattaatgtggtttggttgggttggtccaattgaaagggttgctgtcattctgctctgtttactggtgacgcattggcttggaaattaagtcttcagccagcttttgcgcaaaacaatttagaataatttttgcttgctataattttatttgtttgtaaaaaattgtgtcaaaaaaatgtcacagaattgctagctattttgcagttctaactaggctagatgactctattgtagttttgaactgacatactgaagtttttcgtctcagtcattctgtgatcccaaacaaaatcagcatgatgtgtctcagtatgctacccattgtttccagcactggctttccgtggcaatagaagtttctcaaatctttcaaggaaagacaaatcttgaggataacctgccattccttccagtgcgtcttaagtttaagagttggaagacaaatcaatatcagagtatgggaccatgttgcttgcagccaccgatcaattgtgcctaaattaaatctgaaggattatcaagaagaaaatataaattctaagaggcatacttatattatcgcagctgctctatattaccagaaatgttagccgctagctttagattatctgtgcaagttggctttctcttccattgattctattgattgtattgcataggtgcttcatctgctttgattctgtaccggatatgagttctcagatcagtaatgtcgagttctatatgaatatagcaccagcccaagtttgc

SEQ ID NO: 18081 - DNA, 3440 bp, Oryza sativa
  ref <308>: DATABASE ACCESSION NUMBER: AK068492
  ref <309>: DATABASE ENTRY DATE: 2001-12-06
ggtccttttcctctcctcctcccgtcttttccaccaccaccaccctcgcgtgccctaatttctcgctgctccttgtcccccacctcctttacttgagcttgctcaccactgcctccatatacagagagtcttctctgtatttctctctctcagtgggaggctcacaagaatctttcagctcacatctcactgtccttgcctttctctagctaggtactactactgctagtactaaccactgctcgtgttcttgggacttcttcttcttcttgttcttgttcttaaaatcatttggggttttgagctccagggaggtccaagaacagagcagcaggatggtgcagtggcgtttctgtaagtgaatcctactaccttcagtttcttgagcagtttcagtagtgtagagcttatgatgtaatgcagcaggtgccatgtgtgttgtgctctgaagaaagctgttctgtgggttgctttgttactatgttttttgtgttcatgtttcttggtctgtatggctctacatgttgggtgtttttggtcagattttgtctctcctatatctgctagtctgtttttctgcaatagatctttctgttagatttcttgtcttgtagggaagttggtagaggatgtgctctcagggtaaggattgattgtcagtttgcttagttctttcttttgattcaccagttgggatttagttagtatggatagataatctgctaggttggggttaaatgttgcctctgatatggtgagtgaaactacttttgtggattttgtatggattgtggttagtgggtgaaatttgtgttcttgattgaaacatctacctagttcttgaatcttcaatggcagcattattgtactgattgttgtatggtccaataatgtatttagggggattctacttactgctagtctgctcccagatatgaagatttgattctgttttttttcctcttcaaatgtttcttttttataattagttgaaatatgctattatccagagtacttttgggggtttatggattgtttcctcctactcaagagaggtaaacaaagtaacttcttcagtacagattttccagagatgccatttcttcttcatcattcctcctttgattacttcatgattgtttttacctgcttctcagcccatatcccttggaacattcacttccatgaaaattaccacctaaggaaaaaaaaacaaaatggtcagtaattgagaacttgctatattagttacctgaaagatagtaacacccagcaacacagatccatgtttcagtatacttgtggtataggagtagtatagtatagtatacccccacactgctttcaatttgtcagtactactactgtggtagtaacatctagccaaggaggatacaacggtccaatccaatcagatcaacaaacaacaacacattgatttctttggcctactaccatgctttcaacattctttcattttgtttcttcttggttaatgcttgaatttctagatgaaatggatggcacaagaccactcttgaggaatcctaagtttcctataaatcccttttataaatacttttttttagaaacaactgttttgtctcaacttaaaaaaaataaaatcaaaagcatattgcttgcaagaattcagaagatgttctaggtgaaattcttgcagattttattgcatttctctctcatgagtccttcattacaattaggtgaaaactaaagaggtgccatattaaatagagtgaatttattgcaaattaaattggttttcgatttgtcaaatttgctcgagacacctaaccaactaacccttattgtccaaataaaaattccatctcgtgcgcaattagccctggccatagctttaattcgtcattagtaggcaaccagtgggggctccaaatggtcctagaatcatcacttttactttggatttgcttctgcctcttgcacattcccttattttgtagccttcttgagggtattaggtaggtgttttggcagattatctccccattgatcagctcccaattaatgccagatggtgacactgctaaagatggaagacaagcttgcgagaaaacagtggtagccttattatttcctctcacaagaattgtgcccacaacttgtcctgacatctgtgaatttgtctgtatgttgatagtaatagctggatgaatcatgggtgcttaacaatgctcttacttaccaatagtgtttatggtcggttggcccttgcaacctccaaagaaccaattggagcaattcagccttctcttttttttttctctctctgtcattttctgtgctttaactgttatctgaacgagtagttaactgtataatgtcaaaggaataatcttgcacaaatttagtaccaatgttgttgtagaggagcatgtataagctttatctgtggtactgtggtagtaagtaggatgtgtagagtgtgcaggtcacagttatggatcactgaacaaataaattaactcccctgcttttgacaccccaaactgaaacatataaatgctgcaatgaataaagcaactaactttacactatcacagccctagcttctgttctggccagtttcttgctccctccagacggtaatcactttactctgtatcaacatttgcatttaaactggttgtggttgactggttgtttgactagattagcacaactagaaaccatgccaagccattcctgatctgcagtgtgtcgtttctttcttctgaactgaagatttgatcttttctgtttgcaaagttcatgcttacacacttactacacttgaaatctgtaagataagtgctctacattgaactaaaaatacgtaaattttttgtacatgatctgatttctcatgtgcttgttttcctcttagctaatgacttttatcttttctgttgtagaaattagaatccatgctcatttaccattgtaagatgaaatcctacattgagccaaaaatctaactttcttttctttttgtttgtacatgacctcgtcctctatttggatgaagatttcacctttgctactaatagacgagccttgcaaacaggctaaagaaatgatcttttttttttatttgagtaaatttcagaaatctacaactatttgggtcaaaactatcaatttgctacacgtcatactcatgcatacatgccaagttcacacgcacgcacaactggttacagttgcagaacttgcagtttaatgataaaatcgtttgatatagttacaacagttttgcgaaatgttcgccttaatcttatagaaaagcgatacctttgaccaaataactacagctttctgaaatttactcctttatatatattttgcatcacgagaaacaattttaatcacttaggtggatatctactcatttgttgcatgtgaacaaaatgaatacg

SEQ ID NO: 18082 - DNA, 1689 bp, Oryza sativa
  ref <308>: DATABASE ACCESSION NUMBER: AK068493
  ref <309>: DATABASE ENTRY DATE: 2001-12-06
ggatacctttcttctcctttccccatcgcctcctcacccagagagaagaggaggttggaggaggaggcgaagaggctagctagctagctagggtttcgtgctccccatcgcctcgcgcgcgcagccggatccgatcgggcgtcctcgtcggcgtcggcggcggtgcccctgatatcagtgttgtgattccgttgcaatggcatctggaactgatgagaaagccaagatggagggtttgacatcagctgcagcctttgttgagggtgggattcaggatgcatgtgatgatgcatgtagtatctgccttgaggcgttctgtgagagtgacccttccacattgactggttgcaaacacgagttccacctccaatgcattcttgaatggtgtcagagaagttctcagtgtcctatgtgttggcagcctatcagtttgaaggatcctaccagtcaagagctgctcgaggcagtggagcgtgaaaggaatgtaaggaccaatcaaactcgaaatacaactatatttcatcatcctgctcttggagattttgaggttcagcatttacctgttgttggtaatgatgctgaacttgaagagcgtatattacagcacctagcagcagccgctgcaatgggaaggtcacaccaccttggtagaagagaaggacacaggggtcgttccggctctcatggtcgtccacagttcttagttttttcttcgcatccaaacatgccttctgctggttcagtttcttcatcgtccgttcaaggggaagtggataatgaatcaagtcctgtccacacaactggtgaattatcactgcatgctaacacccatgaagaagcaggcaatcaaagtcctgggatgcttacctacgatgctgatcaagatgctgttgtttcatctggaaatagtacccctgtatctagccctaggtttttcaacaggaggcattccactgggcaatcaactccagtaaacaacgacagagctgggccttcagatcttcagtctttctcagactctctgaagtctcgcttaaatgctgtctctatgaagtacaaggaatctattacaaaaagtactcgaggatggaaggagagacttttttcgcgtcattcatctgtggcagatcttggttctgaagtaagaagagaagttaatgctggaattgcatccgtatcaaggatgatggggcgtctggaaactagaggtagtaatggtagaacaagtgatggcccagcaatatccacttctgaagttattcccagtacagaatcaagcaatgagagagttacagaaaacaatccaactactgcagcgacaggtagtggcaacacttctgcgtcttctgccccttgtgttacaacaaccggttcaaattagcatgttataggttccgaaagaaggcctgcacattcccattcttctccatcaaaggattgccattgccaggcatgggcaggtgaccaaaagcaacgtcatgttgtcatcctcagcattgcataaatcacctccagaaaatcggaatgacaaatttgatgtattggtttgataaaagggctcagcccgaggtattaccttaggatgccgatttgttctgcttcatctatgtaaaaagggaaaaaaatcagggacaagtttttaccggtataaataatggatttggtgacatgatagcaatcataatcgtg

SEQ ID NO: 18083 - DNA, 1323 bp, Oryza sativa
  ref <308>: DATABASE ACCESSION NUMBER: AK068494
  ref <309>: DATABASE ENTRY DATE: 2001-12-06
gctctcgccgccgacctcgtcggccgtctccaccgccggccggactacgcttccccatcggtgcggccaccccctcgaggccttcacatcagcgccgccaccaaccggttgcagtatcgctgatctcctcctcttaccaggaggcaagatgtcgtcgctcgccgcggcaagggcggataacttctactacccgccggaatggagcccaaagaagggtgggctcaacaagttccatggacaacatgctctcaggggacgggcgaggaagctggaccagggcatcctgattataagattcgagatgccattcaatatttggtgtggtgggtgcaactccatgatagcaaagggagtgaggtttaacgctgagaagaaacaagttgggaattattactctaccaagatatggagcttcaccatgaaatcaccatgctgcaaacaagaaatagttatacaaacagacccaaagaatactgagtacgtcataattagtggagctcaacgaaagactgaagattatgatgtggaggatgcagagacactactgctacctgcagatgaagaaagagacaagcttgcggatcctatgtataagcttgaacaccaggaagaggatcttaaaaagaagaaagaagctgaaccagttttagttcgccttcaacgactctccggtagccggcattctgatgactacgctcttaacagagcccttcgtgatcgtcttaggagccaaaagaagagagttgctgaagagaaaagatcagctagaaagatgggacttggagtacggcttttaccaccctctgcagaagatgccactgcagcggcttctgtgaagtttgcatcaaaatttgagaagagcagaagggacaaaagagcagcaattaaggctgcttccatcttcccggagtcatcaagctcaacttcaaagaacaagctggatcttgcactgaagaggcgaaatataaaagctggtgctgcctcagcgctgatggcgagcagggtgaagccgtcgtcatggcagagcgccggttctggaagttcaaggactcagatgccgatcatggcaacacgtaagtagccaccccaagaagaaaggcatttttcttcttctggaagaagaaataccatctgcttagctgcgccatcagaagttaaaaccagcttgtttcggttgtttctttgctccagtttctgtacgagtatgtgtaatgtgtagtgtataacttgaaatctttttggctgtatgcattccggtgtccagctcatgctagtcggtttgttacattatcttgtacactaagaatttagtaatctttgtat

SEQ ID NO: 18084 - DNA, 3530 bp, Oryza sativa
  ref <308>: DATABASE ACCESSION NUMBER: AK068495
  ref <309>: DATABASE ENTRY DATE: 2001-12-06
ggtactactgtcgtatcgtctcctacctcgcctctctttccttttttccgtcgattcaccattgttgcttggggtgcaagcgcccagcagaggccagttttacgcaccaaatggcttgcatatcacatatctcctgaagaagaccaaacgagaagccatcttcactgcccagtccgtgcccggcaccatcagcatagctcttctttcttctatggtgtgttccttgatgatgcaactcaccaccacatggccatggcgtttctttttctgcttgtttttccacctgctgttcctcttcccaaccaactccttgaatcaaagctactgtgaccctggtgatgctagtgcactgctgggcttcatgcaaggtctcagcggaagcggcagcggctggacggtcccaaatgccacttctgaaacagccaattgctgtgcttggcttggagtcaagtgcaacgatggtggccgggtcatcgggctggacctccaaggcatgaagctaaggggcgagctggcagtctcgctcgggcagctggaccagctccagtggctcaacctgtccagcaacaacctccatggggccgtcccggcaaccctggtccagctccagaggctacaacgtcttgatcttagcgacaatgagttctctggtgaattcccgaccaacgtgtctctcccagtgattgaggtcttcaatatatccctcaactcattcaaagaacagcatcccacgctccatggttcaacgctccttgccatgtttgatgcggggtacaacatgttcacagggcacattgataccagcatctgcgatccaaatggagtgatccgtgttctccggttcacgtcgaatctcctatctggggagttcccagcagggtttgggaactgcacaaagctcgaggagctatatgttgatctaaatagcatcactgggagcttgccagatgatcttttcaggctgtcttcgctgagggacctgtctctgcaggagaatcagctctctggtaggatgacaccaaggtttggtaatatgtctagcctttctaagctggacatatctttcaattcattctctggataccttccaaatgtttttggtagccttggcaagcttgagtatttctctgcacagtctaacttattcaggggtccgttgccttcatcactgtcccattcaccatcactgaagatgttgtacctgagaaacaattcattccatggacagatcgatctcaattgctcggcaatgtcacaattgagctcacttgatcttggcacaaataagttcatcggcacaatagatgctttgtcagattgccatcatctgagaagcctgaatcttgccacaaacaacctcactggtgaaatccctaatggtttcaggaatcttcagtttctaacctatatctcactttcaaacaatagcttcacaaatgtgtcctcagcattatctgtccttcaaggctgcccaagcctaacaagcctcgtgctgacaaagaatttcaatgatgggaaggccttgccgatgactggaatagatggttttcataacatccaagtgtttgtcattgctaatagccatctttcaggatcagtaccttcatgggtagcaaacttcgcacaattgaaagtgctggatttgtcatggaataaattgtctgggaacatccctgcatggattggcaatctcgagcatttgttttatttggatctttctaataatacactgtctggaggaattccgaacagtctaacaagcatgaagggccttcttacatgcaacagctcacagcaatccacagaaactgactattttcctttcttcattaaaaagaacaggacaggcaaagggctacggtacaatcaggttagcagtttcccgccctccctaattctcagccacaacatgctcataggtcccatattgccaggctttgggaaccttaagaacctgcatgtcttggacctcagtaacaaccatatttctggtatgattcctgatgagctatcaggcatgtcgagcttggaatccttggatttgtcacataataatcttactggaagcattccttcttcattaacaaagctgaattttctatcgagcttcagtgtggcgttcaataatctaactggtgcaattccattaggagggcaattctcaacattcacaggttctgcttatgaggggaaccccaaactctgtggcatccgctctggcttagcactatgccagtcatctcatgctcctaccatgtctgtaaagaagaatggaaagaacaagggtgtcatattaggaatagctattggcattgcacttggagcagcatttgtgttgtctgttgctgttgtacttgtgttgaagagtagctttagaaggcaggactatatagttaaggctgttgcagatacaactgaagctctcgagttagcaccagcttcattggttcttttgtttcagaacaaggatgacggcaaggcaatgactattggtgacatattgaaatctacaaacaactttgatcaggcaaacatcattggttgtggtggctttggtctagtgtacaaggcaacactaccagatggagcaacgattgccatcaaaagactgtcaggcgattttggccagatggagcgtgagttcaaagccgaggtggagactttatcaaaagctcaacatcctaatcttgtacttctgcaaggttattgcaggattggcaatgataggctactgatctactcttacatggagaatggtagcctagaccattggcttcatgaaaagcctgatggtccatctagattaagttggcaaacaaggcttcagatagcaaaaggagcggcgagaggtttagcgtacctgcacttgtcatgccaaccccatatactccaccgtgatatcaagtcaagcaacatacttttagatgaggatttcgaagctcatttggctgattttgggcttgctcggcttatttgtccctatgatacacatgtaacaactgatctagttggcacactaggctacatcccccctgagtacggccaatcttcagtagccaatttcaaaggtgatgtttatagttttggcattgttcttttagagttattaactggaaagaggcctgtagatatgtgcaagccaaagggagctcgggagttggtctcatgggttttgcatatgaaagaaaaaaactgtgaagctgaagtattggaccgtgcaatgtatgacaagaagtttgagatgcaaatggtgcagatgatcgatattgcctgtttgtgcataagtgagtcaccaaaactgaggcctctaactcatgaacttgtactatggcttgacaacattggtggtagcactgaagcgacaaagtgaggcaaattctataatagcaaccactgtggaaatccatgtgatcaaattcacccccacccctttctctttgtattaaattttcttccacagtgatgtgagatattgtgtgacgatcgtatacaaaataagagttccgggagtctatctaacctgctaattc

SEQ ID NO: 18085 - DNA, 2423 bp, Oryza sativa
  ref <308>: DATABASE ACCESSION NUMBER: AK068496
  ref <309>: DATABASE ENTRY DATE: 2001-12-06
ggcttctcctcccactctccccctctctctcctctctcctctctcctccccccgagatccgctccggccacccgccggcgaggccgccccccgccccgcccgccttgcgatcttgggacagtgcggcgcgtcccggaacgccggttcttggccggtcgaggtggtggtggtggtgataaacggtgcggtgtctgaggagtgggcggttgctgccgtgcccggaggagctaggaggcggcggcgggagagcactgttcttggaggctgcttttgaggtggggtgggggggaggcgttcgttcgccgccggcgccggtggcgtgcggtcgtgggcgggaggtggtggtggtggtgctgctgcattgggtgcgtcgtgggtggattcggatggttgcttggtaggatttcccttttcatggtcgatggggtggaaggcggccatggtggggggtaagttggccggcgtcggcggcgagaagctcaggtgcgccgcggcgcccgccgcggcggcgcggtcgcggatgaagctgtggatggtgcgcgccaccaccacggtgctcctctggacctgcgtcgtgcagctcaccgccgtcggcgacacctggggcccccgcgtgctcaagggctggccctcctgcatcacctcgcccgacgacgacgccgcctccgccacgctcgccgccgcccgcccggagcccgtcgtcgacaaggccgtgctaccgcccaaaagaatttataggaacaatggttatctgatggtctcatgtaatggtggacttaatcaaatgcgagctgcaatatgcgacatggttgtaattgcgagatatttgaatgtcactttggttgtgccagagttggataagacatcattttggaatgatccaagtgagttccaagatatattcgatgttgaacactttataacctctttaagagatgaagttcgcatattgagagaactgcctccaagggtaaaacgaagagttgaacatgggatgtaccactcaatgccaccaataagttggtctgatatctcctattaccataaccagattctccctttgatacggaagtacaaggttctccatttgaacagaactgatgctaggctagcaaacaatggtttacctatggagattcagaaactgcgttgccgagtaaactatgcctccttgagattcacttcgcaaattgaggagttgggaaagagagtaattaggatactccgccaaaatggccctttcttggttcttcacttacgttatgaaatggatatgctggctttctctggctgtacacaaggttgcagtaatgaagaagcagacgacctcacaagaatgaggtacgcttatccatggtggaaggagaaaattataaattcagaattgaaaagaaaggatggtctttgcccattgacgccagaggagactgcccttgtcctcagggcattggacatcgatagaagcatgcaaatatatattgcagctggagaaatatatggtggaaagcgcagaatgtctgctctcacttcagcgtatcctaatgtggtgaggaaagagacacttttggaaccttctgatctaatgttcttccagaaccactcatcacaaatggcagcactagattacttggtttctttggaaagtgacatctttgttcctacatatgatggcaatatggctaaagttgtcgagggtcatcggagatacatggggttcaagaagacaatcttgttagaccaaaaacttattgttgagctagtagatcaatacaacaacagttctttgcgatgggatgagttctctttaatgctcaaggctgcccatgcaaaccggatgggatcagcttcaaagaggacggtgattcttgacagacctaaggaagaggactatttttatgccaatccccaagaatgcctgcaagattctaatctcttacatacatcatgatatccactatgttaatatttcatccacgctatactgttccattctttcgtaaatgcaactgtgaatcaagagttggggtcctcgctattttgaagtgaaaaggcggctcggcctcaagcttgagccatagatgaattcaaactcaaggacaagggaggtaaggggggtgttgtttgtagttggtaaatacacataatagaaatggaggcagatttgtttattccacaaaataaagagtaacactctttgtatagatggttgatagaatctaccatgaaggccaaggtaatttaaagagagatgctggatccccatctcggatctcgggtggtgtaacatagcaattgttcttggtagccccccctccctccccatcggcaaaaattttgtccaccaaagttgttggaaaaagaattatatatacactgtttattgaatcgatacagcctttatgaagatatatggtaacttgtgc

SEQ ID NO: 18086 - DNA, 2486 bp, Oryza sativa
  ref <308>: DATABASE ACCESSION NUMBER: AK068497
  ref <309>: DATABASE ENTRY DATE: 2001-12-06
ggctcgcgtcccccgttgcgttggcccccctctctcttcgcctcgcccccgcgcggccgcaccgctcgcctgagatccgcgtcggcgctcgccgtctccgcctccgatctccacagggcgggcggaggagaccgcataggtgggggggagatggcggcggaggagggggcgaggtcgccgacgaggatgctggcggaggggcacctgcgggtggccaccggcgggggcgcgccggccgacggcgggatcgccgtccgccacctcccacaccaccacgcatctaagagaggtgctggtgggaaaaatgaacaatacaaccttgaggatgtagattctgtaccatctaagatgtcgaacaaactagttaatgggaacaataaggttcctgctacattagatgactataaaaggcttttagttcctgtaattgaggagtactttagtacaggagatgtggaactggcagcttctgagttaaggagtcttggatctgatcagttccacagttactttatcaagaagctcatatccatggcaatggatcgtcatgacaaagaaaaagaaatggcgtcaattctgttgtctgcgttgtatgcggatctactaggctcttccaagatgagtgaaggttttatgatgcttcttgagtcaacagaagatctatctgtcgacataccggatgctattgatgtcttgtctgtttttgttgctcgtgctgttgtggatgaaatactgcctcctgttttcctcactcgagccagagcactgcttcctgaattttctaaaggtattgaagttctgcaagtttctgagaaaagctacttgtcagccccccatcatgctgagctagttgagcgcaagtggggtgggagcactcactttactgtggaagaggcgaaaaggagaatccaggatattctgaaggagtatattgagagtggagatattgatgaagcttttaggtgtataagggagctgggccttccatttttccatcatgaggttgttaaacgcgctctcaccttgagcatggagaatctgtcatcacagccattaatcctgaagctgttgaaggaatcaactgcaggttgcctgatcagttctaatcaaatgtctaagggtttttgtcggctagcagagagtattgatgatctgagccttgatattccttctgccaagattctctttgacaagctggttctgactgctacatctgaaggatggcttgatgcttcattcactacatcttctgcccctaatgaagatatgcgaaatgcaagtggtgaaaagatcaagcatttcaaagaagaatctggacacataatccaagagtattttctctcagatgatgccccagaactcattataagccttcaagagctttctgccccagagtacaatcctatcttcctcaagaagcttatcaccctcgctatggacagaaagaatagggagaaggagatggcttctgccctgctttcttcactcagcttggaacttttctccactgatgacatcatgaagggattcatattgctcctgcagtcagcagaagacactgccctcgacattgtggatgctcccagtgaacttgccctcttccttgccagggcagttattgatgaagttctgattccactgaatttggatgagatcggtaacaggcttcgccctaacagcagtggtagtcaaactgtccagatggctcgtgcccttcttgctgctcgccactctggtgagaggatactgcgttgctggggtggcggcactggctgggctgtagaagatgcgaaggacaagatcgcaaagctccttgaagaatacaatactggcggtgacttgggggaggcttgccaatgcatccgtgaccttggaatgcccttcttcaaccatgaagtggtgaagaaagcgcttgttatggcaatggagaaggagaatgaagcaaggatcttggctctgctacaggagtgcttcggtgaggggctgataacaatcaaccagatgacattaggcttcactcgcgtcaaggaaggcctcgatgatctgatcctcgacatcccaaatgcacaggagaagtttggagcatatgtggatctcgcaactgaacgtggatggctgcttccacccttcgcctaggcggttaaacttgatgaatcttctcaatgtacatctccacccctgctgtctttagcaccataccaaaagttttcctgttcctagtgtacttgttgtgttaccgtataccggaggatgataggttggttggccgtgttggtacttgttgaggtagtgttcatcattggtttggtttgggagtttatgccctgggagagttatgaataaccatatcgtttcaggttatgacatgctatgcaatgaacaatagagctgttcatgaccagtggaatttttgtaattagctggcgatgggcttccagcttctgaagctccgtcattgtgaatgtgcttgcccatctttgctgctc

SEQ ID NO: 18087 - DNA, 1353 bp, Oryza sativa
  ref <308>: DATABASE ACCESSION NUMBER: AK068498
  ref <309>: DATABASE ENTRY DATE: 2001-12-06
gattccaaacccactaggttacgtaaaagcggaagcccggaggccggagcagttggtcgccaccgtcacgcgcgttccccttccctcgccggagagagaaaccaccgacgcggccgcttccggaggaggaggaggagttggggtggaggggagctatggcggggaggtacgaccggaaccccttcgacgaggacgacgtcaaccccttcgcgggtggaagtgtacctccagcttccaactctcggatgccacctcttcctcacgaacctgggttctataatgatcgtggtgccacagtggacatacctcttgattcaaccaaggacatgaagaaaaaggagaaagaactgcaggcaaaggaggctgagctaaacaaacgggaaagcgaattgagaagaagagaagaagctgcatccagagctgggattgtcattgaagagaaaaactggccacccttcttccctattattcatcatgacatttcaaatgagataccaatccacctacaaaggatgcaataccttgcattttcttcattgttgggattggcggcatgtcttttctggaacataattgcaactacagcagcatggattaaaggggcaggtgttatgatctggttgctagccattatctactttatatctggtgtacctggagcctatgtgttatggtatcgccccctttacaatgcgatgaggactgagagtgctttgaagtttggatggtttttcctgttttacttgatccatatactgttctgcatctggtctgctgtggctcccccatttcctttcaaaggaaagtctctggctgggattttgccggctattgatgtcataggaaacaatgctattgtggggatattttacttcattggatttggactgttctgccttgaatcactactcagcgttgttgtcatccagcaagtatacatgtatttccgtggaagtgggaaggctgctgagatgaaacgtgaggcagctcgtggtgctatgagatcggccttttgatagagctgcttcgatggacgggagagaataggatgtgtcgttctgtggtggcgccttgtacatccctacacctatgttgttcgtatctaagttattccattttacagcagcatatagctaaaggattttcctgccttaatgtaatatatgttcactggggccttttatggatacctcaagagctttttacctaggttcagatgtgcctatagttaatgttttccttttgaaatcctgcatgatcacaatggttcctagggccgtattgattctttgtggcaggaaacagtttggtttactaactatttttcttctttgttaatatataaatattaag

SEQ ID NO: 18088 - DNA, 1897 bp, Oryza sativa
  ref <308>: DATABASE ACCESSION NUMBER: AK068499
  ref <309>: DATABASE ENTRY DATE: 2001-12-06
gagacatgaggaaattcatagcagcactgcggcttgcactagcagcagcagctcatctgctgctgacgctgccaccggcacaatgctactggctcaacccggagatctacgacgccggcgggctgagccggcgagccttcccggaggggttcgtgttcggcacggccgcgtcggcgtaccaggtggagggcatggcgaagcagggtggccggggccctagcatctgggacgctttcatagagaaaccagggacgatccctaataatgccacagccgatgtgacggttgatgagtatcataggtacaaggaagatgtgaacataatgaagaacatgggctttgatgcgtatagattttcgatctcttggtcaagaattttaccaaatgggactgggatggtgaaccaggaaggagttgattattacaacaggttaatagattacatggttaagaaaggcatcaaaccgtacgcaaacctctaccactatgacctaccattagcactccatgagcagtacttaggctggctaagcccaaacatcgtgtaagcatttcaacttgaaaactatgaacttcaaaatttgtaagctgattgaagcatatatttgaccaaagaaaaaatgtgtattctactgtgaagagaggcgtttgcagactacgcagatttctgcttccagacgttcggagacagggtgaaggactggtttaccttcaatgagccgagatgcgttgctgctctaggatatgacaatggcttccatgccccgggaaggtgctctggctgtgatgcaggaggcaactccacgacagaaccataccttgctgcccaccatctcatcctttctcatgctgccgccgtcaagcgataccgcgaaaagtatcagctttatcaaaaggggaggattggaattctcttggattttgtctggtatgaaccattcagtgacagcaatgctgatagggctgcagcacagagggcaagagattttcacctcggatggttccttgaccccattatccatggtcggtacccatactcgatgctcgaaatcgtcaaggacaggatgccaaccttcagtgatgaggagtccaggatggtgaaagactcaatagattatgttggcatcaaccactacacctctttctacatgaaagaccctgggccatggaacctgacaccgaccagttatcaggatgactggcatgttgggtttgcctatgaacgaaacggcgtgcccattggagctcaagcaaactcctactggctttacattgtgccatggggaatcaacaaggctgtgacctatgtaaaggaaacatatggaaaccctacaatgatcctttctgaaaatggtatggaccaacctggcaacgtcagtatcactcagggtgtgcatgatacagtaagaatcagatactacagaaactacatcactgagctcaagaaggcgatagacgatggtgccaaagtgattggatactttgcttggtcattgcttgacaacttcgagtggaggctcgggtacacttcccgttttggcatcgtctacgtggactacaagacgctaaagaggtaccccaaggactcagctttctggttcaagaacatgctctccagtaagaagaggaactaaagtatgcagacaaaaggatcaagctgtgaaagcctcaaaggcttccactgtcagatttcagaacaaagctaactctagcgtatgctcatcgtagcgcgttagtttagctttagttatatgtgaaaaacaaccaatgtggagattggtagcttcactagcttctgcaacagaaggagaaataaatggattgaacttcaatacagatttgttcatcagaaccgtaggctatttgtacaataaagagctgacagaagggactattc

SEQ ID NO: 18089 - DNA, 770 bp, Oryza sativa
  ref <308>: DATABASE ACCESSION NUMBER: AK068500
  ref <309>: DATABASE ENTRY DATE: 2001-12-06
gaccgggattccgcgccgcacctgctcgacggattgcgtgcccaccccaagcagctagccaaggtctccacccgtgggcgtgccatggcatcgctccgcgcggcccccgggctgccattctcgccgcgcccggcgtgctgccgccctcccagctcgcctggcgtgcagttcttcactccggcttctgcaggcggcgccggcggagtcgggcgccggcgctcgtacccgaggatcgaggcctcggcgaggcacggcgcgaggaaggagaaccccaaggtcaggaaccgcaggctgcagaagaagttcaatggcacggcgacgaagccgaggctgtccgtgttctgctccaacaggcagctctacgccatgctcgtcgacgaccacaacaggaagatcctcttctacggcagcacgctgcagaaggccatctgcggcgacccgccctgcggcgccgtggaggcagctgggagggtcggggaggagctcatcagggcgtgcaaggagctggacatcaccgagatctcgtcctacgaccgcaacgggtttgctcgaggggagaagatgatggcgttcgaggttccggtctcgcagtacgggttcctgccaagatagcagcagcaaattgttagagatagagatgcctttctgtagataggatagtaatagtgtgtatttgatgaaaaatgaactggaaacatgtgaattggtggctgtgtgttactgtgatgcatcagtttcttggagagcatgcaagttaattcaagtttcac

SEQ ID NO: 18090 - DNA, 2533 bp, Oryza sativa
  ref <308>: DATABASE ACCESSION NUMBER: AK068501
  ref <309>: DATABASE ENTRY DATE: 2001-12-06
ggagttgactcgccatttcgccatttcgtcgagaggttgctgtgccagtcaccaacccattccggcggcggcggcggaggagaccgagatggggatggagaacccgccgctccggtggccgccggggttccgcttcagcccgaccgacgaggagctcgtcctctacttcctcaagcgccggatcgccaccggccgccccaccccctacatcgccgacgtcgacgtctacaagtcccacccctcccacctccctgagaggtcggcgctgcggacgggggacaagcagtggttcttcttcagccggatggaccgcaagtaccccaacggctcgcgggcgagccgcaccaccggcgagggctactggaaggccaccgggaaggaccgctccatctgcaacggcggcggcggcggcaccgcctcggggcgcgcggtggggagcaagaagaccctcgtgtaccaccacggccgcgccccgcgcggggagcgctcggactgggtcatgcacgagtacaccctcctcgccgacgcgctcccgcccgccgcgcgcgaccgcgaggcgtacgctctgtacaagctgttccacaagagcggcgccgggcccaagaacggcgagcagtacggcgcccccttccgggaggaggattggctcgacgacgacgaccaccaccacgaccagcttcctgctgaggcggctcttccggctccagccacaactagtggtagagctgcaacaactgaggagcatgctgactttgagcttccgggtggggatcttgatgtgctccttgcgcaaattgaaaatgatcaggatataatcgaagcgcaattggatttctcaactcatgttacttcccaagttcagattcagcatcgtgttcatcaaggttggctcagtgatgatggcggaaaatcagatgttgcggatgctacgactagtggcagtgctttgttgatggcagagaatacgtgcgctgaacttccaattgatggtctcgagcaacttctgatgcaaatatcggatgatcaacagacagttgaaatgctctctggtttctcagcatccgttccccaatcgcagcttcaacatgattatcatcagggttgtcttggtgttcatagggaggaggttggtgttgcagattctaccactgttagtagtgctgtggtgacagaagaatgtactgtccgtgagcttcaggatattgaagggcttctgatgcaaatagaaaatgaccaggaaaatgccgaatcactgccagatttctccacaccagttcatctccatgattgtcatcaggccgccttcggagattttcaaggaagccagagggctacattcaacattgcaaatctttctactatggtgcaggaaagcccaaattttgatctgcaaactggtccaagtaatcaaattactgagtctattctcaccaccgagccaatgaatggagaaacaaatgctgtggaagaaacaagtcctctgcgctctatgtcagtattgggtagttatgataggcaggatggtgatgatgaattccttgaaatcaatgatttcttcgacccagaagatttagaacagattttgggcagtacaagaagtcagaacttgattcctgctgatgatggagtgtttgatagtttgcaatactctgatgctccaatgtttctgcctggttcatttgacagaactggtgtggtggctgaaaaccattatgttgaatttggtgctagtggaattcagaaccagggatttcagcatacaactgaattattggcacataatcaagtcgctctaaatgtgcggaaccatatgaaggacaaccatgttgtcttctcacattcatcagatgctaccattattcatacagtgaatgagcaaccgcctaaccggagttcaaatgcttcacaatcatggttcaatggggctctatctgccttgctcgattctgttcctagcagtccagctatggctgctgaaaacataggtcttaacagaacactgcaacgcatttcgagctttaggtcacaacaacctgcaagagaagaagttagcagtactcttatcaacaccagaagaagaggcggtgggctaattttcatctcgttaatggttttacttgttgctatcatgtggacctttagcaatgggtctgcagtcaagcttagcaaggggttatggaagtttccctctacataataggatgcacccggttatcctggtggccagtgcttcttactacttcaagtactaattcttgttttgctatcctttcctctattcctttacattgaaaaaggcaacaatctaggaaaatattagaggattatgtggtgttagcacttactttcagaatattatgcgagagatgttaaaacaaaacaaaatgagaaaaagaaacatctgaggtgaacttctggatgtttttgtcctcatcattttgatgaaagtatatattgaatgtaattaaacgatgatggattgttgagaagtgcagttgctgtgcacgataaatgaaaaatccatttttgttgc

SEQ ID NO: 18091 - DNA, 2119 bp, Oryza sativa
  ref <308>: DATABASE ACCESSION NUMBER: AK068502
  ref <309>: DATABASE ENTRY DATE: 2001-12-06
gatttacacgcgcggtggtataatatcttcgccatcgcgtgccggttgcattgcacctcgtgattgaccgtgctacgacgtacgtaccatcatggctgctactatccccgcttctccggccactctgcagccatgcaagaaaaacgtgagcggcagcatgctcatccggtcgcctccgcgcccttggaggaggaggctcccccagcacgttgtaatagttgatgcgagctcatcgtctcgtggcccgaaggcagcgacgggtggccggctcgagacgtcgactgacgctgcagcggtggccggggaggatggagacgtgatccggaggctgcagaacggaccggacgtgcgtggcgttgcgctggaaggggagaacggccgggccgtggacctcacgccgctggcggtcgaggtgatcgccgagagcttcggggagtggctgcgggaggagctccagcagctggagagcgggagggacggcggcgaggtgcgggtgtccgtcggaagggacccccgcctgtctggcgcgcggctcggcgcagcactgttcgcggggctggcgagggcagggtgttccgtgttcgacgtggggctcgccaccacgccggcttgcttcatgagcaccaagctcccacggttcagctatgacgcctccatcatgatgactgcatcacatctcccatacactcgcaacggcctcaagttcttcatgaagcgcggtggtctcacgtccggcgaggtggaaggggtctgcgaccgtgcggcgcggaagtacgtggccaggaagatgggccttggcggcgggcgaggcatgccgccggtggtgatgcgcgtcgacttgatgagcgcctatgcgcagcacctccgcaacataatcaaggagcgtgttgcccacccgacacactacgacacccccctaaagggcttcaaggtgatcgtgaatgccggcaacggctgcggagggttcttcacgtgggacgtcctggagaagctgggagccgacacgacggggagcctccacctggagcccgacggcaagttccctcaccacatgcccaacccgggggacacgaccgcgatgtccctcacgcgcgatgcggtcctggaccacggcgcggacctcggcgtggtgttcgacaccgacgtggaccgcagcggcgtggtggacgccacgggcgcggccatcaacggcgatcggctcatcgcgctcatgtccgccatcgtgctggacgagcaccccggcacgacggtggtcacggacgcgcggaccagcgacgggctcacccgcttcatccaggccaggggcggccaccactgcctctaccgcgtcggctaccgaaacgtcattgacaagggcgtgcagctcaacgccgacggcgtcgagacgcacctcatgatggagaccaccggccacggcgcgctcaaggagaacaactttctcgacgacggtgcgtacatggtggtgaagattattatcgagatggtcaggatgagactcgtgggattggagggaagcgtaggaacactcatcatggaccttgaggagccggctgagtccaagctgatgaggatgaacattctgggagaagccaagtatgcaaaacaaaggggcactcaagcagtcgagacttttaggaaccatatccaggaagggaaactaaatggttgggttctcgatgactgtggggattgctcggttagccaaggatgcctcgtggacacgaatgatgatccttttgatgttgatgcgtacatgtacagggctaaattttttgatgagtacaagggagaactggggtgggtccacattcgccaaagtgtacataaccccaacatagcaataaatatgcagtcttctatccctggtggatgcaaatccacggcaaaggatcttcttgacaggtatctactgacgagtggagtcaatgagtttgttgacatcaccgaagtacaaaagtttgtaaagtagatattatattataatcattagctttctacactttgtatgtataacttttacatccctactggaagatcgaacaagagctttgctctttctgtagagtatgtagagactataatattttgatatcctttcaatagaaacctgcattagttt

SEQ ID NO: 18092 - DNA, 3677 bp, Oryza sativa
  ref <308>: DATABASE ACCESSION NUMBER: AK068503
  ref <309>: DATABASE ENTRY DATE: 2001-12-06
gattagagaagcaaacaaggaagcggcgctgctactgtcgccgcataaccctcgtcttcacctctcccgtagtattcccggggcggcggcgaggccgagatggcggcggcggcggcggcgtggcgggacgacgagctggtgatcaagtcgcccagcgaccaccgctcctaccgcctcctgcgcctccccaacggcctctgcgccctcctcgtccacgaccccgagatctacccggacggctaccccgacccccacgcctccaagccccacgaggacgaggacatgggtgaggaggacgatgaggaagaggacggcgatgaggatgacgatgatgaggagtacagcgacgaggaaggggaggacgacgaggacgacgaaggggaggaggacgaggaggatgggagcgagccgaagaggaggaaggagaagggcagctccgagccgctcgttaagaaggctgctgctgcaatgtgtgttggaatgggaagttttgctgaccctccaaaggcccagggattagctcattttctagagcatatgctttttatggggagctctgagtttccagatgaaaatgagtatgacagttacttgtccaaacatggtggttcgtccaatgcttttactgaaactgaatacacatgctaccattttgaggtcaagcgggagtatcttaagggagcattggacagattttctcagttctttgtatcacctcttgttaaggcggaagctatggaccgtgagatattggcagtagactctgagttcaaccaagttctgcaaagtgatagctgccgtctttaccaacttcagtctcatacttgttcacaagggcaccctttgaacagatttacctggggaaacaagaaaagcttggttgatgccatgggcagtggaattaatctaagggaagagattttacagatgtacaagactaactatcatggaggcatgatgaagctagttataattggaggagaaccccttgacattctagaaagttggaccatggaactatttagtaaggttaaaggtggtcctctcttggatatgagtccaaagactgatatgcccttttggagatccggtaaacttcacaggttagaggctgttagagatgttcacagcctgtgcttgtcatggacactaccttgtctgcacaaagaatacatgaagaaaccagaagattacttggcacatctccttggtcatgagggaaagggaagcttactttgttttctgaaagctaaaggttgggcaagctcattgagtgctggtgttggcactgatgggacacaacgctcctcatatgcctatatctttgaaatgtctatccgtcttactgattcaggactgaaaaatctttacgaggtcataagtgccgtataccaatatataaagttgcttaagcagtctgagccacaagaatggatattcaaagaacttcaggacattgggtacatggagttcagatttgcagaagagcaacctccggatgattatgctgtagatcttgcagaaaatatgctatattattctgagaagcacattgtttctggagaatatatttatgagggatgggatccagagctggtaaagcatgttttgagcttcttccatccagacaacatgagagttgatgtccttagtaaatcatttgacaaacagtcccaagctattcaatgtgagccatggtttggcgcacaatacatcgaggaggacattccgtcatctttcatggaaagttggcgaaacccagcacaaatagatgatgcttttcatttgccacgaaagaatgaatttattccaggggactttaatctgcgaaatgctaatatgccaaaacccctgagtgatgataatcctcgatgcattgtggatgaaccattcataaagctctggtacaagatggacatgacatttaatgtacctcgtgccaacacatactttttgatttctgtcaaggatggctatagcaatcttgaaaactctgtcctgacagatctatttgtaaatcttcttaaagatgagctgaacgaggtcctctaccaggcatatgtggctaaactggagacttcaatgtccgttgttggtagcaaccttgaattaaagctttatggttacaatgacaagctgtccaccctgctgtccagtatcttggctgcctctcaatctttttctccaaagtcagataggtttgaggtcatcaaggaggatttggaaagagcttacaaaaacacgaatatgaagcctatgagccattcaacctacctgaggttacaagtcctacgtgaaatattctgggatgtcgatgaaaagttggaagttcttatgaagttaaccttttctgatctggtggcatatgtgccaaagcttctttcgcagttgcacatcgagggcctctgtcatggtaacctatcagaagatgaagcaatgaatatatcaaaaatattccaaaacacattgtcagctcagacactgcctgatgaggcaaggcatgaagaaagagttctttgcattcctgatgatacaaattttgttagaagtgtccgtgtgaagaatgaacttgaagagaattctgtggttgaggtttattttccagttgaacaagacattgggaaggatgcaacaaaactcagagctattacagatctttttagcaacattattgaagaaccttgctttgatcagctcaggacaaaggagcagcttggctatactgtggactctagtccgcggatgacttaccgtgtgctcgcatattgttttcgagtcatgtcctccaagtatagccctgtttacctacaaagtcggattgatagcttcattgatggtgtatctgctttgctggatgggcttgatgaagagacttttgagcatcacaggagtgggttaatagccgataagctggagaaggatccttctcttagttatcaaactggagattattggtcgcagattgttgacaaaaggtatatgtttgatatgtcaaaactggaagctgaagagctaaggacagttcggaaggaggatgtaatcagttggtacaatacttacattaaaccatcatctcccaagcgcagacgattagcaatccatgtgtatggctgcaactcagacattgctgaggctgccaagctaaaagagcagtcatggattacaattgatgatgtcaaatccttgaaaaaatcatctcaattttattcgagcctctgctgagggaggaaattattgatttggtataatcttacaagaaagaaacatcatctccaaggctctgatggctagcaaacccatcggtttggtgaccggaatttctgaggcagccaagctgcagcagtcacagagtgtagttgatgacgtccaatccttgaaaggcgtcttcgcctctgccgaagatccagcgatcagcacagtttcatgcagcttgtaaattgacgagcttccattcaaagctgttgataaagagagaattttttttgctggtaaggtgtactaatagtgttttgtgctgttgataaagagaaccttttctttgccagtaaggtgcctatagtgttttggtaggtgctatacgatggatctcatattatcgattgttatttcattttttatgtatacaaattgttgctggatttcaattttggaatacaatgatatcatattttagaatc

SEQ ID NO: 18093 - DNA, 1848 bp, Oryza sativa
  ref <308>: DATABASE ACCESSION NUMBER: AK068504
  ref <309>: DATABASE ENTRY DATE: 2001-12-06
gacttctcacactggactagagacagcaatggcgttcgcggcgaccaagccgagcaagtctccccttctcatcctcctcgtctccggcgtcgcgttcctgctcctcgcctccgccgccgagtgctacggcggcggccgccacgatgtgacgcggtcggccgtggcgcggcgctccggcgtcgggagccggcggcagtacgtgcgccaccgcctgaccggcggcgccgtggacgttccgcacaggtacatgctcgccgagaagggcagcaactcgactcgcgctaaccacacctcgccggcggcgtcgaactcgacgccgtcagcgacgacgacggaggcgccggcggcggggaagcaccaccgcagccacaagcaccgggtgcggaactggatcatcgggttcgtggtcgggtccctcgccggcgtcgtctccgggctggcgatgtcggtgctgttccggatggcgctcaactgcgttcggggggggtaccggagcaagtccgacacggtgatcttcatcccgaagctgatcaagagcaaggagcacctggcgttcctggagaaggaccaggacgggctggcgtcgctcgccgtgatcgggcgcggcggctgcggcgaggtgtacaaggcgcagctcccgccggagcgggaaggcgacgcgccgcggttcatcgccatcaagaagatcaagaagcgctccggcgacggctccggcggccagaacaacaacctgagcgacgaggagagccggcagcttgacaagtggacgcggcagatccagtcggagatccgcaccgtgggccacatccgccaccgcaacctcctcccgctcgccgcccacgtcccgcgccccgactgccactacctcgtctacgagttcatgaagaacggcagcctccacaacgcgctcaaggccaccaccaccgacaccacgacgaacgactacaacgacaacaacagcggcgagcatccgccgccgtcgccggcgctgccgtggccggcgcggctgcggatcgcggtggggatcgcggcggggctggagtacctgcacgtgtcgcagcggccgcagatcatccaccgcgacctgaagccggcgaacatcctcctggacgacgacatggaggcgcggatcgccgacttcggcctcgccaaggcgatgcccgacgcgcacacccacatgacgacctcgaacgtggccgggacgctggggtacatcgcgccggagtaccaccagactctcaagttcacggccaagtgcgacgtgtacagcttcggcgtcatcctggcggtgctgggcaccgggaaggagccgacggacaagttcttcgcgcagcaggtggtggacgacgtcgggatcgtgcggtggctgcggcgggtgatgcaggaaggggaccccgccgcgcaggccggggtcatcgacgccgccatcgccggcgcgggccacgacgagcagatcctcctcgtcctccgcatcgccgtgttctgcaccgccgacgaccccaaggaccgccccaccgccaaggacgtccgctgcatgctctcccagatcaagaactagcaagcaaattgctcgtgcttcgcgtgcgcgaggcgtcgtgaattctgccgtgttaggcagcaagcgtgtccacggattcctcagtgtggaatactggtagtgcttagtgctggacttgttgggtcgtcgtcgatcaggtcaaaggtgggtggggcccagttgatagggaccgtggcacaattatttatagcgggaaagggaagtcagtgaacgacgctgtgcttgccgtgtttacacaagtgctgcgcttgttaattaagtgaacagtatatacacaggaggattagact

SEQ ID NO: 18094 - DNA, 1294 bp, Oryza sativa
  ref <308>: DATABASE ACCESSION NUMBER: AK068505
  ref <309>: DATABASE ENTRY DATE: 2001-12-06
gatcggcgcctcaaatccccagtcgaccagggtgctcccaacaagaatcccaccgccaccggtcgccatggctgcggtcgccaacaccgtcacaaccctccccctccttccctcccctcatgccttcgccgtgcccgcaatgggctcgctgcccttcctccggcgccgaatgcgctcccgtcgcctcgccgctgtccagcaggatgcggccgtctggacccccgcccccgtctcctccttcggcccagccaccgccgacggctcgctcgtccacttctccgtggacctctccgacgctaccgacctcgccgcatcctacaccacgccggggcagtatctcctaatccgcgtccccggcgaggatgagctcaaaccggcgttcatggccatcgcctcgccgcctgggggtgccgcgttcgagttcttggtcaagaccgtacctggtaccacggcggagaagctgtgtgggctccgcgacggggacgtgctggagcttggcgcgataatgggtaatgggttccccatcagcaggataaatccgcccgatgaggcgcaaactgtgctcctctttgctacagggaccgggatcagtccggttcggtcacttattgagtttggttttgctgcggatcaaagagctgatgtacgactttattacggtgccagaaatctccaaacaatggcatatcaggataggtttacaaactgggagtcaactgggcttaaaataataccggtattgtcacgagcagatgatagttggaaaggagaacggggatatgttcaggatgctttcttgaaagcccagaacatagcaaatcatttttctactggggcagtgctctgtggacaaaaacaaatgtctgaggagatcacatcagcccttgtagcagatggtgtatcaccagataaaatcttgaccaactattagcaaggattggcgagcctcctgtaaagctcagtgcttcctttggcctcaagatgttcttttttctgttgtattttagctgttctcgtcctatagttttttatatttctcagcacatagatatgtatacattataatcattcttcagagtatggccaccttttcaggccatgtaagcattgagctccaggcttatttgcagttatgcggtcccttgcggaacttgcaaatagcagagtaacatttggcaactcttcggctcttgtattattggcaagagaacatggtggtgtttggttcaataatgttaacgtaaacgtaattgggaatgcttccgccggtaaccgattacgtgctttgtctggt

SEQ ID NO: 18095 - DNA, 1049 bp, Oryza sativa
  ref <308>: DATABASE ACCESSION NUMBER: AK068506
  ref <309>: DATABASE ENTRY DATE: 2001-12-06
gtctagtcgtcttcttccctggatccaaatcgaaaatttctctccccctgttcacaccacgcctcactcccatggcgaccgaggaggacgcgtcgaccatggcggcggccgaggcggaccccaagcccgccgccaccccgtcttacccggagatgatactggcggcgatcgaggcgctggacgacaggaacgggtcgaacaagacggcgatctcgcagcacatcgaggggaagtacgaggggctcctcccccccgcgcacccgtcgctcctcacagcgcacctcgcccgcatgaagcagaccggcgagctcgccttctccaagaacaactacttccgcggcgacgacccgtccctcccgcccaagcgcggccgcggcaggccgcccaagcccaaggacgccgccgccgccgccgccgcaccggcgcccgcgcccgcggcgccggcggcctcctcgccgcgcccccgtggccgcccgcctaagcccaaggaccccctcgccgaggcggtcgcgaaggccaccagtggcatgccccgcgcgcgcggccgcccgcccaagaaggccaaggtcgaacaggaagaccccattggcgctcccgccgcagcttcggctcccgccgcggcggctgaggccgcgccgcctgtcaagcgcggccgtgggcgcccgcccaaggtgagacccgccgcgccggtcggggagccagccgctgcttgattagctccgattctccgcatcgccgcgatggcgacgatggtaagctcctttaggttgtaacgtagtcttcagattatgtctcgtactgattggaggcgcggctcgggttgctgcttattgtaagttaatcggatggtgggaggtttaggtgtgctggatggatcatccgttgctgagagttgtgattgaattcgtgttatcgcgtgctgattattatggtaatgttggtgactttcgtgtcgtttgtgttaattctagattggtggctgcatttagtgttatcaaatgatgttgaattgttctatgccatgccggacaaaaaaataagtctgattt

SEQ ID NO: 18096 - DNA, 2054 bp, Oryza sativa
  ref <308>: DATABASE ACCESSION NUMBER: AK068507
  ref <309>: DATABASE ENTRY DATE: 2001-12-06
gaacgaaactctatcccctctcttcttctctccgctccgcgtgtccactcctctcccaatctgtgttggctgccatcctatgcacctacctacacctccctgccgaccaacaaccctgagcaggcgagctcccccacggccgctgagggccacgcggcgacgcctcgtgcccggtggccgtgcactgcagcgctagtgcggttttgcctccccagcgcctacgtctacaccgcgccgcgcaccccacggccctgccgccatgctcctgcatctccgcctcccttcctagttcctacatgtttcactacttagctgtgttgccaaatcacactcgggcctaattccatttcagcactatactacattactaatttgatatatatgttctgtatgcaggttttggatcagatgcagtgatgaatcctaggtgacagagcctattaggctagaacagaccaatatggcaaggagtagaaggcggtgcattgttcaaagccatgaggaatatttgtcagaggaacacattgcagaagaaaatgcccctaaacagcttgccacaccatctgaacaagaaacaatatgtagtgatgttcaagagggtaatgaagatactaatgacgatgttggagaagccaatgaagatactgatgacgatgctagtatgaatgctggagaaggcaatgaagaatctgatgatgatgttgaaattaatgttcgagatgaaaatggaacaattgaaacacgtgggaagacaaaactgaaagatatttggaaccttccgaaaaggcttaggattgtggttcagtgcaatgatctcaaccaggcagtaggagatgaagctggaattttgtctaaatttcttggaatggtagctaggaatggtactttgtgtagcttaagctacacagactggagatttctaataggaaagagagagagaaaaacaaaatccctagatgagtttctttgttggtatccagatgagattcctttatgctcctcggatggaagaattcatattaaaaacaattagagagagatggaggggacataaagcaaaactaaaagaaaagtattttgatgtgaataagagcaaagaagctaattgcaacaatgtcccagctgatgtgcttcctgaccagtggattgctcttatcaatcattggatgagcgagaaatcgaagaaaataagcaagcagaacaaggaaaattgtcgaaagaagaaggcattacacacagcagggacaaatagttttgctcgtacaagagaagagatgagacaaaaagatcctgcaaagaatcctcacagagctattgtgtacatccaaacacacaagcgcaaaactggcaagaatctaaatgggcatgtggataatttgaagaaacttgtagttgaacaaccagctttagcagacactagtgaaggaaggactgcttggaaaggagatgcattgaaccaaatacttggagatgacaagcctgggcatgtgcatggtcttggactagttccaaagcctaaacaagttctcgatgtgccaaattcctgacgcttaaagaatataaatgttactagactggatgataactggagtgaagatgttgtggctgctagactgcagttggaaaagatcgaaaatcatgtccagaatcatgatgctgagcttttggaattgaaagcgaagacaaacaagttggaaaaagaacaaatgaatcagggaggtttagatcgagtatctacaaacaaagaagctagtgttgatggccctatttcgaaaaggaggagagtgtattctgaccatcccttgcaagaaatttgtattgctgaggaggaaaacgatatggttcaggaggaaaacaatatgatgaatatacagagccatgttccaaatgaggatttgcaaccaaaaaccaagcaatgtgttgaagacaagaacaaacaaaattgggaacaacatgactatgggaaacaaaggaaggttatttctgcacagaaaaaaaaaactaacaaggaaaaccatgtgatgaatgcacgaaaagttgttgaagcatccaag

SEQ ID NO: 18097 - DNA, 2224 bp, Oryza sativa
  ref <308>: DATABASE ACCESSION NUMBER: AK068508
  ref <309>: DATABASE ENTRY DATE: 2001-12-06
ggcggcgccacagtagcagtagccaccacgcacgcacgcgtcggtgcgtgttccccccccccccccctcccccccgcgacaaattcctcctcgcctttcccctcctcctccctctcctcgccgccgatccgccgccgccgccgcagccgggatcttccgtcggatagtatggtattgtgctggacacactgttgactttcgtctctatgattatctctgataccgatcggagcattgcacctcttccttcgatcaatgggcattgtgaaggtagcaagttgtgcgcctacagaagagcgggcttacagctgtggagacgaggacattacacaagaggagaaaatgctgcttcagagatttcctattcatgaatccgatgactatgaacatgaagaggtcaattgtgagcttgcaaagtctggagatcagatctgtagtgtcccttatgggctttatgatttgcctgaattgaatgatattctttctttggagacatggaacttatgtctaacagaagatgatagattccgtctagcagcctatctcccagacatggaccaacatgatttctttgtaacaatgaaggagctgtttagtggcagtgacctgttctttgggagtccagtgaagagcttcttccacagattgaatggtgggttttattctccagaagtttcccaggctagagaattactgatgatctttgaaagacgaagatattatcattttctgaagtcccatcatgatggcatgattttcaagtttgcatccatggacaaggtaggaggacgatgtggggcgagtactggtcttcagggtaaggttaacagttggaatgacagaagacatgaagatcccctcacaggtgttgacataagcggttctcctttcaatagaagtctatcaattgccaatgaggttaaagatgcaacccttccacctttgaagcgaaccaaacgtatgggacagtaaccactcattgttcagccaagcgcaagggaatagtctacagagacaaatcaatggaaatgagctcattgaagagtcctgtctttcatgttcctggtgagcttactacatgtattagattgcccaaaggtgtgctgaaaataaagaccgattgtgcttccctcattgatcacaatgaaggaattcatcgtacaccagaaccgatgctagcagaccaactgggaatacaggtctccagcttaccttgcgcttctgcactggatgttcatggttttgcgatgaattcagcttattactaccacataaacacaagcaagagtactttgagaaatctacatgtgcgtccctaccaaagagaaggcacacttgatacttaccctcactcagttgaaagtccgtttggagtgcaaattatggttccagaggagcttaaaaggggttactattctcgaatgccgaattccttccatcagtcaacaaccaaacatagtccggaatattgcaatgaagcaccccacgagaagaaccttttgaagaactttggtcaacaaaatgccgtaattcctgaaagttctcctgatccatttacaaggaatactgattgtcatcaaacaaatggatacatgacgcatggtctgaaaactgctgaaagtatttctgaggtgttgacccttggtacagacaccgctggcccttacaaacacctattggagcagtctgaaacaatgcgttacccagaaggattgaagctgaagactcctgccagccagtcagttacagaagttgaagaaggtcataggtaccctttcacatacaaaaggaggaagctgcagaagaggcttgaccttgttgatcctgtcaagaaatcaactatggtggattcagagcctctgagcgcactggctagcgtggcaaatgtaaaaatcaaaggcaatcaagctttgaagattggcagctgagaacaaggatagctgaacatagaaattggagcatggcttatgaacatctagctaacatagtaaataaaatgttctcttttgttttgggttctggttcgaagtcaggtggagtgcattcattgttaaatttgatagtagacaaaatgacatgaatctctagtgcaaagcattcagattctctgctttctatcatgcacatccctccctgaatacctcgtcttccagatgagccgcagtttacttagatatatacattgtgttaatgtttttcttttaaaatagtgctgttgacttgc

SEQ ID NO: 18098 - DNA, 1485 bp, Oryza sativa
  ref <308>: DATABASE ACCESSION NUMBER: AK068509
  ref <309>: DATABASE ENTRY DATE: 2001-12-06
aaaaacgcgcaaaggaaaaaagaaagaaaaagtaaaacgaaggggaggagtcggccggcggccatggagggcggaggaggaggaggggaggagatgatgatgacgtcgggggcgacggggcggatcgtgccggtgttccgctccgtgctgtcgcggcgggcgctgctccgcctcgccgtcgcgctgcactcgctgctcctgtgggtgttcctcctcgtcggcggcggcggctggcggcggaggcggggcgatgcgggggagggggcggaggcggggagggcggtgaggacgcggaggagggcggcggagaaggaggacgtgcggcggaggagggcgctcgcggaggaggtggccatggtggaggacgcggacggggagggggcgaggcggtgggagacgttcgtcgtccccggggcgaggaggaacgcgctcttctgccgcgtctgggcgcccgccgccgccgccgccgagatgaggggtattttggtcatcatacatgggcttaatgagcacagtggaaggtatttgcactttgcggagctgctcacatcatgtggctttggagtatatgcaatggactggataggccatggtggaagcgatggtctacatggttatgtgccttcactagattatgttgtagaagatatagatgtacttcttggtaaaattgtgcttgagaatccaggggtcccctgttttcttcttggtcactccactggtggagctgttgttttgaaggcatcattgttccctcgtatcagagcaaaactggaaggcatcatcctaacttcaccagctctgcgtgtaaaacctgctcatcccattgtaggggctgtggcgccaatattctctctgttagcaccaaagtttcagttcaagggagctaacaagagaggcatcccggtgtcccgcgacccggctgccctgctagcgaagtactccgatccgctggtttacaccgggccgatcagagttcggaccggccatgaaatcctacgcatctcctcctacctgctgcacaacttgaagaaggtcaccgtcccattcatggtcctccatggaaccgcagaccgggtgaccgaccccctggcttcacaggacctctacaacgaggcctcatcgaggcacaaggatctgaggctgtacgatgggttcttgcacgatctgctctttgagcctgagcgtgatgagatcgccacagacatcatcgactggatggagcgaatgctagctctgcaaaccgtgtgaaggagagcagtttgcctgaaaaaggagaaaagaaaaattgtatgataagttaggaaaatggccgtgtatgtcattgatctcattcttgatggaattatctgaaagtgatctacaagcttcaagtggtgattttggttgattgtttcatgtaggactgggtcgaaaactgaaaaagggtttgtgatctgtaattatatatatacacccgcaataatagaattaagatttttaagg

SEQ ID NO: 18099 - DNA, 3163 bp, Oryza sativa
  ref <308>: DATABASE ACCESSION NUMBER: AK068510
  ref <309>: DATABASE ENTRY DATE: 2001-12-06
gatcataccaagtgtcctccttcctcctcatcctccccaaccactgcatccgggtcggcgtcctcctcctcctcctcctcctcgcaggtaaagcagcatccaagcatcctttccaatccatgctcagagttggaagtagagctgctgctgatgatggtgtgtggatcggtgctggttggtttctcgttcttgcttgagtgtgagatgtgatgttgatgtgcgtgtgtgtggagtctggactggaaggtttcttgagttcagagtgcagatcagagaatcgtacttttgctttttacagtgtgttcttggtttgcccacacgatctgttcatcttttgtttcttttgttttgcctttcatgaacaaacgaccacagctctgcttgcctgctactgtccttctcagtttggcaaatgaaaggatattttttttagggaaagaaagcgaaaattactagtgctagaaagcagtggcaagtgagaataacacttctgcttgattgattaggttaggagtttatagatagttcttccctcttggtactgtcagtctgtcactggtgtgtaagtagagtgacagtgttgatgttcttccttgagataaacggcgatatccttttatcacttcctgagagagcacggcacgctttactcccttttattctggaaatattgttctcttccatgggttacagtttgtgtttcgatacagctttgcttgccatgattttttttctggccacttttttagttagagaagctaaagaacttacttttggtttcgggttaggcgtgccgtagattcatatgcaattcatggtccgcttgtttcttttgattattgagcttgagtgattcggtaacatcacaacagtacacccacatatcatggacacatcaagtgcgtgtagtttatttagtatttagtgttttgagtggagacggcaatagctggattctgtatttggtggtgactccttattggttgattgtgacctaaataaatattattgatttgctaacgaatgctggcaaacctttgcccgttttttcgccttgcactttcatgaactaaatgattcttggaatctaggagtattaattggacagactcttggattctactctagatcaataaggttgactacattgataggggattccctgtagaatactgtgcatcaaaatgaataccgattaatagtcaatatgtagacatgaccatttcgctggtcattcaacacattttggtgcgtacattgctttgttctagcagtatttttgctgaccagtgtacaaaatggtaggctagagctataatgctttacatccttttcattgcatcagcgcagtggaaattaacttccacttgacataatgctcccaggccccatcaggattggtgtggggttgtttatttatgtggaatagtttgagaactatattgttttttaagtaattccacttgtacagactttcttgttgctttcttaccagtcctttatactgaaactgattgtccggtcattctagcagtcacctgcattacaacggaaattgatttgcaacaactctgtttcggacaagcaaaaaaaaaaatccatgggaagaggagcccttttttcgtttgaattattccaaataccaacttatttacttgaaatccaaaaaatcaggaagaaaaaagagagagtagcaaacagtttattacacgaatgtccagtcttttcttgctgctttttctggtgcttttttattgatcaactgccatgatataattagtaactagtctctttgccttcaacaacagcatccggacttccagagttctagccaggcacatgactttgttggagtcaagtaattggtcataccttaatttagattgatgaactttcggttgcttttggttcttctctgtgttgtatttgagataattttgcagtattgttcaaattttaaactcttaagtcatccaagacatctttattctcacgagttctttgctatctgtagttctatatactcttttatcattagccaaaaaagaagtgaaataataagaagttataagtcagatattttctttgttcaaaatggagtaatcatgtcttttgatatgtttgatctgacacagaatgcaacgggcaattcaagctatcgggtcacatggcagtctcctcaagtctgctgttctgcgacacatcagtgctccaaaaccatctattttacctgctgtatattcacgctccatgtcagtttcatctgctcaaatagaggagagtggatttgagactgccactgtggcagatattttgaagtctaaggggaagagtgctgatggatcttggctctggtgcactactgatgactctgtctatgatgctgtcaaatctatgacgcaacacaatgttggagctctggtggttgttaaacctggacaggataaatcaattgctggtattgttactgagagattacctcaggaaaatcatagtgcagggacgatcttccaagtcaactaaagttggagacatcatgactgaagagaaccagctgatcacggtgaagcctgataccagagtcctgcaagcaatgcagctgatgacagagaagcgcatcaggcacatcccggtgatcgacggcacgggcatggttgggatggtctccattggagacattgtccgcgccgtggtcagcgagcaccgggaagagctgaaccggctcaacgcctacatccagggtggctactaggacgccgacgtcgacgttggtcactcgctcctgccattgaggctgtgcctgtctgaaaaagactccctcttccaaataacgctcgctcgggatgatgacgaaataggccgcgattttcctggagaaattgttgccgaatgtttctgcttgttcgcgtgtattatatcaatctgatggtggaaacgaacacccaaataaaatgaaccgtgtacaccgtcttgtgcagcagcctgctgtttgtgaattgtggcaggttgttgttgagacgagtcttgatgtttaattagatggatttgccgctgtagtttgggaatcctgggcgttttcacaagtcagacgctgaacataagcaaagcctctggccatgtttggggattgtttgtggagtttttaacggctgatgcttctttt

SEQ ID NO: 18100 - DNA, 1680 bp, Oryza sativa
  ref <308>: DATABASE ACCESSION NUMBER: AK068511
  ref <309>: DATABASE ENTRY DATE: 2001-12-06
ctctagtattgattgatgaaatcgacaagcttgggagagggcattctggtgatccagccagtgcattgttggaacttttggaccctgagtagaatgttaattttcttgatcactaccttgacgttcctattgatctatccaaggtcctttttgtttgcacagcaaatgttattgagatgataccaaatccattactggacaggatggagatcattgcaatagctggttatataactgatgagaagatgcatattgctcgggattatctagagaagaacacaagagaggcttgtggcattaaacctgaacaggctgaggttacagatgctgctcttcttgcccttattgaaagttactgccgagaagcaggagtgcggaatcttcaaaagcaaattgagaagatttaccgcaagatagctctgcaacttgttcgccaaggggtatcaaatgagccaactcaagaagctgccattgtaacagcgagcgaagaacctaatggtggcgatagtgcaaacaagttgaaagatgagactatggaggatcctgctacagagaatgctgcaatgaccaatgctgatactgcctcaaaggaagctagcgaattagatttactgaatagaacagtcgatcatgatgtgcatccagctgaaacacccaaagaagctgttttaactgattcagccctatcgacagacaagttgtgcacaccagagggcaacaaggatatggagggagccaaggaagagtcagctgataaggcagttgagaaggtagtaattgattcgtcaaaccttggagattatgttgggaaacctgttttccaagctgagcgaatatatgagcagactcctgttggagttgtcatgggtttagcttggactgctatgggtggttctactttatacattgaaacaacgaaagtggaggaaggagatgggaaaggtgcacttgtgatgaccggccagcttggagatgtcatgaaagaaagtgctcagattgcgcatactgttggtagagctatattactagataaagagccagaaaatctgttctttgcaaactcaaaggtacacttgcatgttccagcagggtccacccctaaggatggccccagtgctggatgcaccatgatcacatcaatgttgtccttagctatgggaaaacctgttaagaaggaccttgcgatgacgggtgaagtaacattaactggccgaatccttccaattggcggggtcaaagagaagaccattgctgccaggagaagtgcagtaaagacaatcgtattcccagcagcgaataaaagggatttcgatgagcttgctcccaatgtgaaggagggtcttgaagttcattttgttgatacatacaatgaaatatttgatatagctttccagagtgagactcagacagaaacaagctagcagttcaggttcaagtgttgagattgttgagagacatgggcaccaactgaatacccaagggagttttgcagctagactattctttgcaacatcaaaaataacttgattgatcaccctttttttttgtacgcgccgtgtagcagtaaatgttaagtaaaaattttggcaagaatgttgcagcaagatggctggggaagtatcacaaagaaaactattgtaaactaattcttataatgaacgaggtctggccattcatcct

SEQ ID NO: 18101 - DNA, 2232 bp, Oryza sativa
  ref <308>: DATABASE ACCESSION NUMBER: AK068512
  ref <309>: DATABASE ENTRY DATE: 2001-12-06
gacacacaagccacaccaatagcacaaccggcaaacaattcctctgctcgctcaacagcaacagcaacaacacacttaccaaatttgtgttccccttttcctttcagcagcaacagcacactaccaaatcctcagctcgatcttctctgcctcagcaacagaacagcaatagcagctcaccaaatcctcacaccagcaccagcagtgccgtcctcacaaccagcagctccctccgcgcgcggccgccgttggctctgcctgccgccgttgacgccgctgcgtcctcgccgggagctccagcaccagcgtttccttcctcacctggagctccacacgctcctgcgccgcgtacacgcgcagctctgccagcgcagctccctcagcacctctctgcacgcctcgacaagctccggcgaggctagggtttagccgtcgcccgtcgccagccaccagccgattggctctgataccatgaagttttgggaatttttctctagaagcttcactacttttttcatttctctaactctgctatatacatgtacatatgagtagtatatgggcctcatgggccaacacatacataactcaacattatccatacatgcaaaattcagcaacaaaatgataaattttgctatgatgaattgctgacccttttttttttgttgcaggaccagtttttattagatggatcctctgattctggcatgtggattgtccctattactttaggatgcaattcacatgatatgcagaaaagattcttactgaaacataaattcagcgacataaagggcatcaattcacagtacgatgaccaagaccgacagaatagtggaaacttctggattaagctgaatattgatgaaacaggattttatagagtcaaatatgatgatgaacttacaactgcacttcgaaatgcattgcagatgaagaagctctccctaatggacaaaatcggcatcgtggaagatgcacatgctctttctattgctggcaagcaaacattgtcgtcgttactacatttactgtatgcttgccgtgacgaggatgatttcagtgttctttcacacataaattctgtaacttctagtgtagctaaaatatcaattgatgctactcctgaattggctggtgaaatcaaacaactttttatcaagcttcttctccctactgctgaaaaattagggtgggaccctaagaacagtgaaagccacctggatgcaatgcttagaccagtgctcttggttggcctagttcagcttgggcatgataagactataagtgagggagttaggcgtttccaaatcttctttgatgatcgcaatacttcccttcctccagatactagaaaggctgcatacctctctgtgatgcataatgttagtagcacaaacagatctggctatgatgctcttctaaagatatatagggaatcaactgaagtggaggaaaggttaaatgtattaggcatactatcttcttgccaggataaggatattgttcttgaatcgttgaattttattttcacagatgaggtgcgcaatcaagatgcatatcttgtccttcgaagtgttattattgacgcacgtgaaactgcatggtcctggttgaaggaaaactgggatcgtatcacgaagacatttgcagcaagcgcaatcttatcggattatgtcaaatctattgtcacattgttcacctctaaagagaaggaagcagagatctcccagttcttcgcaacccgcactaagcccgggtttaagagggcactaaagcagagcctggagaatgtgcggatcagcgcaaggtgggttgatggcatcaggggtgaagctgagcttgctcagactgtgcatgatcttctcatcaaactctgatttgatgcctccagaatttgatgcatttgctgtgatgccaactttcgccaaagcatacattgtcatagcagctcattgtgagaaaaacatgtaggagtatgccgtcagcttgagttcaaataattcctcctggatgcaaggttttcttaccatttattctttatcaataatggatgctaagtctttccttagtatcccacatgcttcttttttttttttgagaaaatcccacatgcttctttcaacatagcagctcattgttgccctgtttatgaagtcataattcaagaagtgtcgttatgtattgtcaatctctcgtatgtatgttcaggcatatgtacagacattt

SEQ ID NO: 18102 - DNA, 2160 bp, Oryza sativa
  ref <308>: DATABASE ACCESSION NUMBER: AK068513
  ref <309>: DATABASE ENTRY DATE: 2001-12-06
gaccgatccctctccctctcccgccgccaccgcctccgcctccgcctcccctcgcgccgtcgccgtcgccaagagccgccacttccgcttccgcctctgcctcgtccaagtccaagccaactacctaaacctaaaccctattcttcttctttcgcctccgccgcgatgtcgtcggagcctccacccgatgccgccgccgccgccgcctcctccgcgggggatctcgcggccgatctctcctgccaccatcagcaagaagcagctcaagaaggatgcgaggaaggcggagaaggccgagaaggcgtcgcagcgccagcagcagcagcagccgcaggccgacgccgacgaccccttcgcggccaactacggcgacgtccccgtcgaggagatccagtccaagaccatctccggccgcgtgtggaccgagatcggcggcctcgacgaggccgccgccggccgctccgtcctcatccgcggcgccgcgcaggcgatccggcccgtcagcaagaagatggccttcgttgtgctgcgcgagagcatgagcaccgtccagtgcgtgctcgtcgccagcgccgacgcaggggtcagcacccagatggtgcgcttcgccacctccctcagcaaggaatcaatcgtcgacgtcgagggcgtcgtctccctccccaaggagcccctcaaggccaccacgcagcaggtggagatcaggtgaggaagatctattgcatcaatagggcgatccccacccttccaatcaaccttgaggatgcctcacggagtgaggctgaaattgaaaaggctgaacaagctggagagaagctagttcgtgtgggccaagatactcgcttgaactatagagctattgatctccggacacctgcaaatcaagcaatattcagaattcaatgtcaagttgagaacaaattcagggaatattttctgtcgaaaaattttgttgggattcacagcccaaagctaattgctggatccagcgaaggtggtgcagctgtattcaagctacagtacaatggacagccagcatgtttagcacagtctcctcagttgtataagcagatggctatttgtggtgggtttgaacgtgtatttgaggttggacctgtttttagagctgagaattcaaacactcacaggcatctgtgtgagtttgttggccttgatgctgagatggagattaaggaacattattttgaggtttgcgacataatagatggtttgtttgtagcaatatttaaacacttgaatgaaaattgcaagaaagaactagagacaataaacaggcaatatccatttgaacctctgaagtatttagagaaaactttgaagctcacgtatgaagaaggaattcaaatgctgaaggaagctggaacagaaatcgaacccatgggtgacctcaacactgaagctgagaaaaaactaggccggcttgttaaggagaagtatggaacagaatttttcatcctctatcggtatcctttggctgtgcgtcccttctacaccatgccttgttatgacaacccagcttacagtaactcttttgatgtctttattcgaggagaggaaataatatctggagcacaaagaatacatttaccagagctattgacgaaacgtgcaacagagtgtggaattgatgcgagtactatttcatcatatatcgaatcgttcagctatggtgcacctcctcatggtggttttggtgtcggcctggagagggtggtaatgctgttctgcgccctaaacaacatcaggaagacatcacttttccctcgcgatccacaaaggctggtgccataatttgctttttttcccaagagcaaggtttggactcagtacggactgggcagttttcctcggctggtttttttacctggacattattttcgtatttattaatgtgctgtactgcaaaagctgctcctttccacaacatttggaatagttgccgatacatttggaatagggctcaacgttggcgttgtgatttcgttgatgattccgctattcgtaacaatggcgaatccagagcagaaatgaccctatgtcagaaacatatcacatactcgtatgcctatatttccaaaagataagggattatggaaggatgacatattcaagtcccaaaatacaaggtgtggtttgacc

SEQ ID NO: 18103 - DNA, 1748 bp, Oryza sativa
  ref <308>: DATABASE ACCESSION NUMBER: AK068514
  ref <309>: DATABASE ENTRY DATE: 2001-12-06
gggttgcagagtagtcaggcatcttgtgcagcctcctgaggatgctctcggccgcctgcttggcgttcgcgtcgccgcggtggaatgcgctcaccagcgccgtgggcagcatcctgtcgccggtcacctccctcacgcacacgtcgtccccgtgcaccagcagcttctccaccacggagaaacacctgtgccacaggctgttccccctgtgctgcctcagcgccgcgagcacgcgcctcgccgcgccctgtccggcgagggcgaccacggccttctcgacgtccaccctgtcgtcgacgagcgtgcacagcgctcccagcgccgcgtccacgacacgggcgtcgtcgttctccaggcaggcgaggaggccctcgacggcgccggcctcgaggaggcagaatgtcgtcgccggcgtgcacacgccacggtgcaccgggcagacgttcagcggtgggttcttgctgctgctatggttatgcacccttgcgtctttcaggcgcttgagtatggtcatcttctttggccgcggctcgtcctccggcggcggcggaggccgggacagcttgatggaatggtagctgaggttctcgagccccacggcggcgagccgttgcacctcgccgctaccggctgctccggcgaggagggcggtgagcaccgaggcgaagtcgtggtccatggccgccttgagcacgtccgggttgtacagcgtcgcggtgagccgcacgagcgtgcccacgaggccctccatgtacggcgcggcgtgcctgctcgtcgtcatcctcgccgcgccgctccccatctcctcgatcccgcgcagtatcgccggcacggcgccctcctgcacgagggccaggttgagcgagacgttccggtacggtagcctcgacaggagcgtcaccgcggcggcgtgccgctcggtgatggcggcgcggccggcgcggaagatgctcctgaccagcctcctcggctggccctgcgtcttgcagagcctctcggcgatggtgtgccccatgtgcgcggacagggtgatgagcagcctcgtcgaggcgacgccgagcgcctccgtccaggagctcatgagctccacgatggagtggccccggtggttctccctgacgaccgagaccacggcggcgagcgccttggcgtgcgcggtgagcgcgagcaggacacggatgatgctgaggttgagctcgtcgggcatgaagcacttgagcatgtggacgaagttgtagatggagtacttggacgtgaggacgtggccttccttgttcaccacggtgttgtccggatcaatgccggactcgacgacgttggcgaggacggcggcggccatggccttgtagctgagcggctcgtcgtctacctttcggatgaagagctcctccaccatgaccgggacgacgcctgcctcgacgagcgtcttgctgttggggcggtgagaggaaagctggacaaggacgtcgagcgcggccttacgcgccacggtgttgcagctgtgcaccatcttgatgaggacccccgacgtgcttccgttgatgtcaatggtgagctcctgctcttggattagctcggctaggtagccgaccatctccatttgcatctcttctgaacctgtttagaattccacatctcagctcaaatttcaattaacttatgagaagaaaagattcttaactttgaagttatttagctcttatgttaaaagaaacatttggggcgttcaagtgatgaaagttgtgagg

SEQ ID NO: 18104 - DNA, 925 bp, Oryza sativa
  ref <308>: DATABASE ACCESSION NUMBER: AK068515
  ref <309>: DATABASE ENTRY DATE: 2001-12-06
gacactctgtgcttaagttgagttcaatttcatttccaatcacacagatttgctctcttcttcttcttcctccattcaatctctcggaatccgaaccctagcctggtagggtgggggcacgatggggtgggcggcgcggttcctcacggcagtgtccttcctcgccgccggcgtgctcttcgcgccggacgctctcctcggtggctccggccgctccggcgccggggtcgcggcggcgaggctggcgcacgtcctctgcttcgccaccgcctggggcgccgcgctctgggtcaccttcatcggcggcatcgtcatgttcaagtatttgccaaggcaccagtttgggagtctacaagggaaaatgttcccagcctacttcatgttgatatcagtatgctcggctatatcagtggcagcttttgcgtatctacatccttggaagacggcatctaccattgagcgctatcagcttggattcttgatctccgcccttggttttgacctttccaaccttctggttttcacgcccatgaccactgagatgatgatgaggcggcacaagatcgagaaagacctcggcatcggcagcgaggtcgggttttcgaagaacgcggaggtggcgaggacgaacccaacgctggcggccatgaacaagaagttcgggatgatccatggcctgtcgtctctggccaacatcatggcgttcggtagccttgcaatgcactcctggtacctcgccagcaagctccagatctgacggcatcatcaccactgcttctcccatgtctccatgttctgtgcctctgagttctgaagcttgttgccgtaagctgctgatcaaaagttgtatactaggtttatgtaacagataaactgatgaaggaacttgtgatagaaactttgcaataatttggagaaatgatgt

SEQ ID NO: 18105 - DNA, 1458 bp, Oryza sativa
  ref <308>: DATABASE ACCESSION NUMBER: AK068516
  ref <309>: DATABASE ENTRY DATE: 2001-12-06
ggcagctgctcctctcgctaaaaaccaaccccccaaccgcctctcccctctcctctcctctccccctcgcatttgcagttgcagagcaagaagcagagagagaagaagaggaagcagaggaggaggagtccaagaattgaagcaggagaagaggaggtggtggtttgattcaagaagaaggagaagagcaagagcaaggatgttgcgaggagggacgagcttgctggggatcgtcaacttcgtgacgttcctgatctcgatcccgatcctggggggaggaatctggctggcgtcgagggccaactccaccgactgcatccgcttcctgcagtggccgatcatcgccatcgggctcgccgtcatggtggtgtccctcatggggttcgcgggggcgtgctaccgccagacgtggctgctccgcctctacctcttcgccatgttcttcatcgtcgtcgccctcctcttcttcatcgtcttcgccttcgccgtcaccgaccgcggcgacggccaggtggtgatgaaccggcggttcctcgagtaccagctctccgactacaacggatggctccgcgaccgcgtcgccgaccccgcctactgggccaccatcagcgcctgcctccgcgacggccgcgcctgcgccgccatgcgccgcttcgcccgcgaccccaacaccggcatgctcgtccccgagaccccctccatgttctacgcccgcgacctctcccccatccagtctggatgctgcaagccaccaacatcgtgtgcatacaactatgttaacgaaacgttctggaccgcataccctggcgttccgaccgtcgtgaatgatgtggactgcagcaagtggagcaatgaccagcagacgctttgcttccagtgtgactcctgcaaggcaggcgtcctcgctggcatcaagaagagctggcgtaaggttgccatcctcaacatcgtcgtgctgatcatcctcgtcatcgtgtatgttgctggctgtgccgctttccgcaacgccaggaggatcgaaaacgacgagccgtttggtatggcaaggatgaccaagactcaacctagcaggttccagttctgagatagtgaagaactgggagcctttgcccctttgcctgtacaaaaagaccacaattggtggtgctaaggctctgtctgaatctcttatatattatttactggaatgtggaatcagctacactttgggtggtgaaaaaggaaagtagttcttgtttcagaatgttcagtctggtttggttttgtgcttgctatagtgtttagggttaggtctgttgtgtactgggtacaagatgagatctgcaagaaacaagagtagttccctcatttagcaatgtattgtgctgtaccattggagattttgatttggcataatcttagatgaatatgttatcatcatgtacatgatgaatgtattgctctgtagttccttctccc

SEQ ID NO: 18106 - DNA, 1562 bp, Oryza sativa
  ref <308>: DATABASE ACCESSION NUMBER: AK068517
  ref <309>: DATABASE ENTRY DATE: 2001-12-06
gagtgagtcgtacaagtgtagaacaacacttgtgctacctagcttagttatctcgttgccagctgcacagttccagcttcagtttcagctagcgctagctgatccactaatcacatcactgcgtgcttaattagctaggattaatcgattcatagatatctcctacaaattccaagtgaaacagcagcatcagcagtggctagctgagtgatcgatcgatcatggcggaggcggcgggtgatgggggttggccggagccggtggtgagggtgcaggcgctgtcggagagcggggcggcgacgatccccgaccggtacgtgaggccggagacggagcggccgtcgtcgtcgtcggaggcgaacgccgtcgccaacatcaacatcccggtggtggacatgtcgtcgtctccggggacggcggcggcggcggtggcggaggcgtgcagggagtgggggttcttccaggcggtgaaccacggggtgccggcggcgctgctccggcgtgcccgcggcgtgtggcgcgggttcttccagcagccgatggaggtgaagcagcggtacggcaactcgccggcgacgtacgaagggtacggcagccggctcggcgtcgacaagggcgccatcctcgactggggtgactactacttcctccacgtcagaccaccccacctcctctcccctcacaagtggccccacctcccccctgacctcagggagacgacgacagagtacagcgaggaggtgaggaggttatgcgagaggttgatggcggtgatggcggtggggctaggggtagaagaagggaggctacaggaggcgtttggtggtagagagggtgctggagtgtgcgtgcgggtgaactactacccgcggtgcccacagccggatctaacactagggttgtcctcgcactccgaccccggcgggatgacggtcctccttgtcgacgaccgtgtcaagggactccaggttcgccacgccggtgcatgggtcaccgttgaccccgtgcctgacgccttcatcatcaacgtcggcgaccaaattcaggtggtgacgaacgcattgtaccggagcgtggagcaccgggtggtggtgaacgcggcggaggagcggctgtcgatcgcgaccttctacaaccctcggagcgacctgccggtggcgccgctgccggagctcgtgtcgccggagcggccgccgctgtacagccccatgaccttcgacgactaccgcctctacatccgccgcaacggcccccgcggcaagtcccaggtcgatcgcctcgccgccgccgccgccacaatacctaattctactaccaccactcaataatatcatcatcatcatcatctccggccatcgccgccgtcgccggccgtcgccgtgtatgattcataattagttagctgattagtaataaattaattaatatggacatgctagctagctactagctatatgtgcaggcatgtgatgaaatggaattgatttaagtttgttgcgatctgcaattgattgtcttgtcatcgtcggttctcgatcaaattaatgatcagtttatatact

SEQ ID NO: 18107 - DNA, 1614 bp, Oryza sativa
  ref <308>: DATABASE ACCESSION NUMBER: AK068518
  ref <309>: DATABASE ENTRY DATE: 2001-12-06
gtccctgctgctggtactgtgcgtgggccggagggcgagagtgaagcttgagccgtctcgccgcgggcgctgctgctgctgctgctgctcgcgtccgattccgacgagaggctgggaacttcaaagctgaaaaggactaatggagggtggaggcgcaaaagatggttctgcagcggcagcgcaaacaagggggagtggggatgatggttcccacaagccgctgccgccttgctgtctcaaggcgaaggctgcggcagtagagtctgaggcaaaatgccatgccacagtggtgtcagggtggttcacggaaccccgctcgcgctctggtaaaacaagcaaagtgcagtacttcaacaatccaatgtggcctggagaagctcattctctgaaagtagagaatattctgtatcaagggaaatcaccataccaagaaatcttagtttttgagtcctcaacctatgggaatgttctggtgcttgatggtattgtgcagctgaccgaaaaggatgaatgtgcataccaggaaatggttactcaccttccactgtgctcgattccatcccccaaaagtgttttggttgtcggaggtggtgatggtggtgtgctacgagaaatagccagacatgcctcagtggagaacatcgatatatgtgaaatagaccagctagttattgatgtctgtaaagatttcttcccacaactatctgttggattcaaagatccccgtgttcaacttcatgttggtgacgctgtggatttcttgagaaatgcccctgaagggaaatatgatgctatcattgttgattcatctgacccaattgggccagctcaggagcttgtggagaagcccttttttcagacaattgctagagctctaaagcctggtggagttctatgcaatcaagctgagagtatgtggctgcacacacatctaattcaagatatgctttctatctgtcgtgaaacattcaagggagctgtgcattatgcctggacaagcgttcctacctatcctagtggtgtcattggttttttgctatgtgcgaaagaaggtccagcagtgaacttcctttctcctgtgaatccaattgagaaactggaaggagctatggaagctggaagggaaatcagattttacaattcagaggttcatcgggctgcttttgttctgccaacatttgtaaggagagaactggaatcacacaatacttgtgctgaaaaggataaatcagaaaccaagccagtcgcgaaaccaaagaagatgaaaataatgccgaatagtgccattccgactgcttcctagattcgggcggccatatgcgacaaccatgttcgacgtccttagctacagtatatgccaactataagaggagaatgtcgctgtaactcttctgtcttaagtatggtatgttatgcctgactgaataaaagggaggaacagatgagatgtgaaccaaaataatgttcttcctgatccgtgagcactgttgtagtgttgcctgttgtacaaatgtatattgtcacagcactgatgtgtttattatatggatgtggagtgaatcgcatggataatgtgcctttttatcccctaaaatctgcaatcttccctggttc

SEQ ID NO: 18108 - DNA, 1447 bp, Oryza sativa
  ref <308>: DATABASE ACCESSION NUMBER: AK068519
  ref <309>: DATABASE ENTRY DATE: 2001-12-06
gacagatagagagaacttgcagtctttcagataaggctacactgccactcgaccaattcttgcaagaattggccatggcgttctgcactcctactgccaccactcctcctcatgccactccacctcctctcaccacctcatggaagcagctcgccttctgcaactcttcccggctagccgccgccgccgccggcggcggccagagggcgcggccggccggtgcaagtgttgaggcgcgcgcattggcgccggcgtcgacggcggcagacgcggcggcggctgcggcggcacccgcccctcccaacgtggactacctggcggcggagttcgccggccacggcgtcagcttcgaggccgtcggcggcagctgcgccgtcaagatggagctgcgcaacggcagcgccgcgcacgtgctgctcccgggcggcctcgtcacgtcctacaagccggccatgtggcacggcgcccccaccgaggtgatccacaccaccgtcgccgagggcctcggcggccgcgccgtcatccgcggcggcgtgtcgctggacctccgctgcggcggcgccgccggcggaggcggtgacgggatgccgccgtggtcgccgagcggcgcatggtcgctccgcgacgtcagggggagccccacgggctccatcgaggtcgagctggcctccgccgcgccgccggaggcgagcggcgtcgaggcgaggtgcgtcgtgacgctgcacccggaggcgctggcgacggagttcacggcgaggaacgccgcctcgccgtcgccggtggctctgtccgccgcggtgtccacccacctccgcgtgagcacgccggacgccacctacgccgtggggctccagggctccgactaccgcgccatagatcccgtgctctcggagttcgccatcgtgcccccggacttcatgtcgcggtcgtcgtcggcgacgacgctcgcgcggcgctgggccaccaaggggttcgacgcggtcctctccggcggcggcggcggcggcgcgggggcgcaagaggccgacggcgaggaggacgacgactacaagcggatgaccgaggagatgtgccgcatctacagccacgccccccgccaattcaccatcatcgacagggggaggaggaactccatttgcgtgcagcggagagggttcgaggaggtgtacgtgttcagcccggggtcaaagtaccagtggtacgggaagtacgcctacgtgtgcgtggggcccgccatgctggagcccatcgtgctgtcacctggggccacatggtcaggggctcagtacctgcgcaacccaaacctctagatagacaagacaagacaggctagctggcgactcaatgctgctggggaacaaaacaatggtcattgtacatgttggctcacaataagcaagaaaaacatgtgaaacaatatatatatgtttgcaaatgtgtttcactg

SEQ ID NO: 18109 - DNA, 1626 bp, Oryza sativa
  ref <308>: DATABASE ACCESSION NUMBER: AK068520
  ref <309>: DATABASE ENTRY DATE: 2001-12-06
ggcgtggcgtcctcttccctccagtccccgcccccggttttgccttcctcccctcctgcctgggtttggtttggtttggctttgcttcttcctcgcgcggcgcctcccatccgcatggatgatgccttctccttctccttctccttctccttctccttcttgatatttccatttcctccccattgttccctccttctgcctcctccctcctcaaatctacacctatccccaccaccgccctagcttcttctcctctcccgcagccgcccgcaagatcgatctgtcactcatgcccgtgcagctgggaggagggggcaaggtggcggaacccaaggacctcgccgccaccgacaaggaccgcccctcctccaagaagaaccgccgccgccaaaagaagcccgcaacttccgccgccatctccccgccggtcgccgccatgcagaccctcttcgacaccagcagggaggtcttccaggattctttgccgggattcgtgccgccgccccaagccgtcgcccgactcgccgccctactcaatgatttgaaaccacatgatgttggaattgagccgagtatgtcgtgtttcaagaatgccgattctaaagggcctcctcgggtgacttatctacatttttacgattgccccaagttttcgtttggtatcttctgtttaccgaagtcagctgtcattcccctccacaatcatcctgggatgacagtattctgcaagatactgtttggctccatgcacctcaagtcctatgactgggctaaaagtgccccagataatgataataatgcacttgagacctcagatggagctcgtttagcaaaggtaaatacagatgcggtttttgatgcttcatcggagaccacagttctataccctgaaaatggagggaatttgcactgttttactgcaaggacagcttgtgctgtgcttgacgtgatgggacccccgtacaaccgcgcggatggaagggattgctcatattacgacgaatccccatacttgagttcatctggtggagatgcgcggtactcgtggctcaaagaaaatcatagtacgttcgagatgaaaggtgtacagatgccacaaaggtttatcgtttagaaatgacatacagcatcattttgtggcaacacctgcaaccatttccgccgaagaatggtcctcctctagcttgctgtagatacctgtaactgcaaagacaggcagatggtacaagggaagatgtggccactaagctcagactagcaaactcttgagtgacacagacgttacatttgtttggcttcttattttggtcagggttgaaacaatctcttgtgattttcagataactctgttcctcatatgttatcctcgtctggcagtgcaaaattgggattgggtgatacagtgaacaagtgttttgtttttgggccatgatcatctttttttgtttccctgtagaactgtatgcaggcgttttttgaaagtgatcatgtaccgaattcagagtgtggtttgcttggtttgttgaacagggaggctattcctttttgcctcttactgtagtagacaagaggcatatacatacataacatagcctttgtttcttgagcaaagaaatttgtgtcacc

SEQ ID NO: 18110 - DNA, 2009 bp, Oryza sativa
  ref <308>: DATABASE ACCESSION NUMBER: AK068521
  ref <309>: DATABASE ENTRY DATE: 2001-12-06
gagttttgcctcccttcctacccaacacgaggcagagaggagaagctccccccgctcaactcaccaaaaccctcctcccctcgaaatccttcccaagacgccgcacgcttctccatttcatataagattcccgagagacgccgccgcccgagaggcgtgggccgcgcgcgccgaaacatatcccgccggggcgccgccatggccggcgaggtggccatcgactccggcgagaagcgcctcaacgagctcgggtacaagcaggagctccgcagggagatgactctgttcaagacgctggccatctccttctcgacgatgacgctgttcaccgggatcacgccgctgtacgggagcagcctgcggtacacggggccggccagcctcgtctggggctgggtcgtcgtctccttcttcacctggttcgtcggcttcgccatggccgagatctgctcttccttccccaccactggttctctgtacttttgggctgctcatctggctggcccagtctggggcccgttggcatcttggtgctgtgcttggttagaggccataggtcttattgccggaattggtacacaggcattcgcgggatctcaagttctgcagagcataatcctgctatgcaccggcacgaacaaaggcggcggctacctgacccctcgctggctgttcctcctcatgtacatcggcctaaccttcatctgggccgtgctcaacaccttcgcgctggaagtcatcgccttcctcgacctgatctcgatgtggtggcaggtgatcggtggcacggtgatagtgatcgtgctgccgctggtggcgaagacgacgcagccggcgtcgtacgtgttcacgcacttcgagacggcgccggaggcgaccgggatacggagcagcgcctacgccaccatcctgtccctcctggtgagccagtactccctgtacggctacgacgcggcggcgcacctcaccgaggagaccaagggcgccgacaagaacgggcccatcgccatcctctccagcatcggcatcatcaccgtcttcggctgggcctacatcctcgccctcaccttcagcatccaggacttcagctacctgttcgacccgagcaacgagacggccggcacgttcgtgccggcgcagatcctgttcgacgcgttccacggccggtacggctcctccgcgggcgccatcgccctcctcttcgtcatctggggctccttcttcttcggcggcctctccatcaccaccagcgccgcgcgcgtcgtgtacgcgctgtcccgcgaccgcggcgtcccgctctcctccgtgtggcgccgcgtccacccgcgccaccgcgtccccgccaacgccgtctggctctgcgccgccgcgtgcgcgctgctgggcctccccatcctgtggatcaacgtcgtcttcacggccatcacgtcgatcgcaaccatcggctgggtcggcggctacgccgtgcccatcttcgcccgcatggtgatgcgggaggaggacttctcgccggggcccttctacctccggcgcgcgtcgcggccggtgtgcctcgtcgcgttcctgtggatctgctacacctgcaccgtgttcctcctcccgacggcgtacccgatcagcgccggcaacttcaactacgcccccgtcgcgctcggcgcctgcctcggcctcatcgggctctggtgggtgctcgacgccaggaggtggttcaagggacccgtcaggaacatcgacgatcctctgaaagatggtggtggtgatggcgtccataacaatggcaacaaggtctaagtatggtttaggttgttactggagtacttagtttgagcagatcattagctcaagccaaattgatcacattctcgatagagttttttttttccctctcttgtgttgtctcctactttgttgtgtacgtgtactattctgtgacactatcaatggggttagtttaggatgtggagaaaactttgtgccatatagaatgacttaaattagttacatgtatc

SEQ ID NO: 18111 - DNA, 2190 bp, Oryza sativa
  ref <308>: DATABASE ACCESSION NUMBER: AK099057
  ref <309>: DATABASE ENTRY DATE: 2002-08-28
tgactctctcttaatctctcgctactcaccaaggcggccggcagtggtgctcgcctggatcctgcggttctgccgtcgacggcgacgggccggccagatccaccactggcccaagtcgtggttgctgcttcctcgcgtcgatccagccgccaccatgttcatctccatcgttggctggcggcggtgaggctggtgagcggcggatccaacggtggggaggctcgagggcggcgacgaggctggtgggcggtggatccggcgttgggaggcgaggcagtgggctcccgtagccggcggctgcccagcggaggaggtggcggcggccgcgccctcccctccgctagatgtggcaggaggggaggcaacgggctctcgccgctggcgcctgcccggcggaggcggtagcggcggcggcggcggcggccgcgccctcgatgggcggcgggttcccgtaggcggcagtgtcactttctccatgtttctcctcgtcgtgctcagatgctctcgatggatccatcgccttcctccttctgctacttccttcctttcgttctttcctctcggttttctctcctctcctccgccactcagcgacgccctccttctccgccgatccccctcctcgaccacccaccgacggcgcctctccctctcctcagctccccttcctcgtccccccaccgagtccgccggcacggatccaattcccccgagctcactggcgatggatcggccttcgccgttgggtggcagtcgtcatcgtaggatcgagctgccacgatggtccagttcggtgccgagcggattggggcggtctcgttctttaggcggagggagcggtcggagacgaggaggccgattgagtagtggatgccggatccggatatggtgcagtggacgaatctggaggtcgagttgtacaagcagagctgttcggtcgtccggataggagggttcaagttgtcggacgaaggtggacctctatggattttccaacgaggatgctgctgtggccgccggatccagtgacaattgacccccccgcagtagaggtgcttgaactggtcacaaatctaggttcactaaacccaaaggcttttgtagcaatgggatgcctggtgctagtggttacttgggcagcaatgggggtgatggtgggtatggcagtacaccaggagcccaggaagaaaatatatggtcaataggtaagatatatggtaagttcaattcccacaccacctctaatcgctgcgcaatattgctggttatagattgattggtttatgactggtactatatcaaatatattactgtctttgatatgttatctctgtaggaatcagattactgtcatggttcttatattgtgcacttccacttactgcaagcttaagcttgtatcctgtatattttagttagtcaagtaatagtagtatgaaaacaccaaaacattatatgtctaatctgaacaatcattttgagtagcctaattgattgcaagctcttgtgatgattttgttgtgtgcatgatttatgttctgcattcatgtgaatgtctgaattgaaggacccgtctggaacttccgtgttgctatgtgccgctggacaactgaaaaaattggctgttgctaacttgaaaaaattgactgttgctaacttgctaactgttctgcatcgacgggaaaaaaaaccatacatagcattggttgtgcatatgaaaggctcagctaaacattctcttctgaaaacaaggctcatgtatgtctggttgacctctttaatttctgtataaaaacttcatgtatgtctggttgacctcttttattttatgatggtactgttagttcgaattcataagctgacttatcttatgaaattaaaattgcattcaggattgagttggttgataacctggaatcgacattgattggagattgcttgacgtcctagaggaagagccttgcgattaatattttcttgtgtgcttctattatttctattgcctgattgaaagctggcttgatgttttagaggaagagccttgtgatatatgttttcttgtctgcttctattatttatacttatatattgcctgtaatgtaatgtaatattaaattggagtaggaatcggtgtgggggatactgaacctgtgcacgcaaactggattagaatcggtgttgtttcttttt

SEQ ID NO: 18112 - DNA, 615 bp, Oryza sativa
  ref <308>: DATABASE ACCESSION NUMBER: AK068522
  ref <309>: DATABASE ENTRY DATE: 2001-12-06
gctctctctctcgttcttgcgggcctgcgacaacggcgtttgaggaaatggcggcggcgtctgcgggtccatcggcggcgctctgagggggcggcggcggcttgaagccgacccccgccggcgcctgctggtggaggtagagggcggcggcagtgggatccgcgccggcagccggctgtgaagggaaggggcggcagttgcgggatatgcgccggcggccgtccgtgaagggaaggagcggcggcggcgggatccgcgccggcggccggctgtgaagggaaggggcgatggttgcgggatatgcgccggcggtcgtccgtgaagggaaggagcggcggcggcggctcgcggaggaaggtagtggcggtggtggatcccccagaggctgcagtggacctcgacctcaacctcaacccgagctcgaccttggctatatgtttatgctttattgaatgcagtttgggatccacaaaattagatgttatgctgtcgaatttttgtcaaaattagatgttatgatgttgaatatgttataattgtcaaattttgtctaatttattttgtcaaaattctgacaattttaagtcaaatctgttaaaatgaatcaaatttgcc

SEQ ID NO: 18113 - DNA, 2136 bp, Oryza sativa
  ref <308>: DATABASE ACCESSION NUMBER: AK068523
  ref <309>: DATABASE ENTRY DATE: 2001-12-06
ggccctctcctaaaaccaaggaacccaaccccacaaaaaagcgtaggacgccggagtgcgaaatccttatccgctcgcggcgacgccatggccgccgccgcggtggtccacctctccgtgcacggccgcctccgccgctcgccggagctccacgcccggccataccaccgcccgtcgctgctccggtgccgcgcgttcaagcaggaggccgataacggcggggaggaggcttcgtcgtcgccgccgccgccgacgacggccgaggcgcggaggcgcaggaagggcccgctgtacaagctgaaggcggcgattcaggggctcgccgggtcgcggtcggcggccgcggaggcgtacgggggcgagtaccagcgcgccgtcgagaaggccgaggagatcttcttctcggttgctacgcaagtaggccgatatgttatcactatgatgagcagcggtgttgtacttggagttggatttcagttatcaggcggagacagccaaatgaatacactaatttggtatagttggctcgggggagtaattattggcacgatgataggtgcaaacagtgtcctagaggaacactgcaaagctggacctcgcaatgttgtcataactggaagcacaagaggattagggaaagcacttgctcgggagttccttctttctggagatcgtgttgtaattgcttcacgcagccctgaatcagtccttcagaccatcaacgagcttgaagagaacatacaggagggcttgtcagttgcgaaaaagaaacagagagaaattttgctacatgccaaggttgttggtacatcatgtgatgtttgtaaaccagaagatgtgaaaaagttggtgaactttgccaaggatgagcttggatcaattgatatttggataaataacgctggcacaaacaaaggttttaggccactggtaaacttttcagatgaagatatttctcagattgtctcaacaaacctagttggctctttactgtgcaccagagaagccatgaatgtcatgcaacaccaacaaaagggaggtcacgtatttaacatggatggagcaggttctggaggatcaagtacaccattaacagctgtttatggttcaactaagtgtggccttagacagtttcaagcatcacttctgaaggaaagcagaagatcaaaagttggtgtacacactgcttctcctggaatggtccttacggacctccttttgagcggttcttctctgagaaataaacagatgttcaatttaatatgtgagcttccagaaacagttgcaaggacattggttccgaggatgcgagttgtgaaaggaagtggaaaggcgataaactacttgacaccaccaaggatcttgcttgccttggttactgcatgggttcgccgaggccgatggtttgatgaagagggaagagcagtatatgcagcagaggctgatagaatccgtaattgggctgaaagtcgagcacgcttctctttcacagatgccatggagatgtacacagaaaacacatgggtttctgtgttctcgctctctgtcgtctgcgcattcataattctttccagctcaggtggacctcttccaggcacatgatcccaggagttgccaaactagatggctacacacaccatttttcttcagtacggggattctattatgtactgatatatgacacacgaaacttatgaaggggggaaattgaacccagaaagcttactgcgtacatacgcccaacggtgagaagcatcagctgccactcaccatttaaggtcaagctaaccatgtgctcagtaaaaatgggtaaatagcatttgttgtgtgggcattccactgtttgtaagctgacttgtaaaaacgtgtatctgagctaaactgagcacgaacagattcgatggacaatgttatctgctgtacatgcatgtagtaatgtagttttgatgactgtaattctctggtcgtcgcttccagttgcacggttgcaccgtatgttgcaaccaccaatagaactgaaagtaagtgagagtaatcaagccagcatctgctatgtatatatatgactcatcagtctgttatatatcacaaggaaagcttcttcaaagctaaaagcaaagctatcagtaagacagt

SEQ ID NO: 18114 - DNA, 1873 bp, Oryza sativa
  ref <308>: DATABASE ACCESSION NUMBER: AK068524
  ref <309>: DATABASE ENTRY DATE: 2001-12-06
gggcattttttgacggcatctcatccaggagcccaggtcggcgccgccgcacacgcgtggcggcctcgccggcgactcggctgctcagagcggcgcgaagaaaggccgcgctggagtctgcagccgctgcgtgtggcagagtagagaccagccagggagagcgcagctgtcagcaacctataccagccagtgagcttgctcgcgccgttcgccggggcgggggaagagaaccatctggcgacaaagcacaggaagcatgtcactggttaaccggccgctccctgcactgtatggaatttgcacggcctcggcgaagaccagagcttggtggctctgcagagatggcaatctcccatcaacaagtcgaatttcttgcacagagccatcgaatgggggttctgtcatggagttggaggtaatggaccgcaatgagcagacataccatgagaattcttctgcttctgaggatgaggacgatgatgaggaagaggctgtagagtggagcaaagatgagcttgatgccatctcggcactctttgaccggccgatgcgccagaagccaccaaagccgccaaacccggtgaggcagcgacctctcccgctgccactgcctcacaagacacgactgcccaatgctcctgcaccaaagcagcatatcaggctggcagcaagggctgcactttcttcacgctcttcattcagtgaccaggtgtgcaagaacccggaggtcctcattgggattgcccgggagattgcagcgctgccaccggagtctgacgtgtccattgtgctcgatcggtgggttcggttcctccggaaaggatccttgtcaatgaccattcgggagcttgggcacatggggctcccagagagggcattgcagacactttgctaggctcagaggcagactgtcgtgccactcttccccgacgaccggattctcgcttcgacaattgaggtcttggcacgcttcgaccagctgaagatggaggatgcgctagagcagtgcgtcccttcagcgagccgtgctgttcttgaagccatggtcagtgggttcatcagggcaggtaaagtaggccttgcccgaaaactcctcgagttcgccacgatcaacaagaggacactgagcccgagcgtccacgtgaagctgatgctggaggccgtccgtacgcctgagggctacgggctcgccgcggcgctgctggacgagctcggcgagaggccggagctgcacgttcggcagcaggactgcacggccgtgatgaaggtgtgcgtgaagctccggcggtacgccgccgtggagagcctgttcggctggttcagggacaccggcgggaggcccacggtggtgatgtacacggcggtgatccacagccggtgccgcgacgggcggcaccgggaggcgctgtccctggcgtgggagatggagcggcacgccggcggcctcctcgacctgccggcgtaccgggtgctggtgaagctgtgcgtggcgttgcgcgaccacgagaggggcgtccggtacttggcgaggatgaaggacgccgggttcgtcccgaccggcgacatgtacggcggcctgatcggaggctacgcggcggaggggaggatgggcaggtgccggaggctgatcagggaggcggagttggccggcgtgaagctggagaggaggctgctttcgcgcttgtctgagatgggggttgagcattctcagctctgaaagaaagaaactgatcttgctgttggcatctgactagcatggacattgcacagaaattgaactgtaaaattaggctctgcgtaattgcctttaacctgtagtaacagaacattacattatgaatatatttgttttgttgttggcttgttatcctcg

SEQ ID NO: 18115 - DNA, 1215 bp, Oryza sativa
  ref <308>: DATABASE ACCESSION NUMBER: AK068525
  ref <309>: DATABASE ENTRY DATE: 2001-12-06
gatgtactgacagtagctctagctcagtttgagatgtgcaaatagtataacaaaagcattacttatgcaacaaaaactacagctcatcaaccatggagtgccagatgaagtgattgcaaatctcaagaacgacttggttgagtttttcagtcagccactggatgccaagaaggaatactcacagctgcccaataaccttgaaggttatggacaggccttcgttgtgtccgacaaccagaaactagactgggcagacatgctataccttcaagtctgtcctaccgattcaagggacttgagattctggcccaattaccctgcctctttcaggcattccattgatgcatactcatcagagacagaaaatattggactctgcctgctgcaattcatggccaaggccgttggtgttgagccgaagtcgttgttaagtgtatttgaagggcaagctaggggtttgaggatgaactactatccaccgtgcttgaaagctgacaaggtgttgggtttgtcaccgcacactgatccaggtggcttgacactgcttctccaggtgaatgatgtacagggcctgcagatcaacaaggatggcaaatggttctccgtgaatgctctgaatggtgcactcatcgttaacattggcgacacacttgagatcctgagtaatggaaagttcagaagtgttgagcacagggccgtggtacatccaagcagagagaggatttcagcggcactgttctactatccgtgccaggatatggtgatcagccctctgccggactttgtgaaagatggtaaagtgaaatacaaaacaataagctaccaggatttgctgacagagtacttcacagcagagcttgatggaaggaaccggctaaagaaaatgaagctggaaccgtagccatcgaccatgatgcatgtaacaattttataagaagaacctgctttcaggttgtgtcctacttactgtatctgctatctactctcttcatcctaaaataaataaacatagtacatatatgatacatcatagtaccataaattagaaaatgttacatcgtgtactatgtttttttaaaaaatttgggatataggaaatatatgtcgtgaagaataatgtattcaggcatcaagctttatgcataattagcttatgcctgtaaactgcgttgaacatgttcagtttgatgaaacagacatggaagtttgcctctt

SEQ ID NO: 18116 - DNA, 2221 bp, Oryza sativa
  ref <308>: DATABASE ACCESSION NUMBER: AK068526
  ref <309>: DATABASE ENTRY DATE: 2001-12-06
gtgccggcgacgcatcattcaaatttctgccctatcaactttcgatggtaggataggggcctaccatggtggtgacgggtgacggagaattagggttcgattccggagagggagcctgagaaacggctaccacatccaaggaaggcagcaggcgcgcaaattacccaatccgccgactacttccccgaccgcgtcccaatcaccatcgtcgacacctcctccagcccggagcacagggcgaagctgatcgccgagtgccaggcggcggacgcggtggtgctcacgtacgcctgcgataggcccgccacgctggagcggctcagcacattctggctccccgagctccgccgcctccagttaaaggcacctgtgattgtcgtggggtgtaagctggaccttagggacgagcagcaggtcagccttgagcaggtgatggcgcccatcatgcagacattcagagagatcgagacctgcattgagtgctctgcgcttcgccagatccaggttcccgaggtcttctactatgcccagaaggcggtgcttcacccaacagcacctctatttgatcaagaggcgcaatctctaaagccacggtgtgtgagggctttgaagcggatttttattctatgtgaccatgacagggatggagcactcagtgatgtggagctcaatgactttcaggtcaaatgcttcaatgctcctctccagcctactgaaattgcaggcgtgaagagagtggttcaagagaagatgcctgaaggcgtgaatgacaatggccttaccttgactggattcctttttcttcatgctctttttattgagaaaggacgactagaaactacatggactgtcctaaggaagtttggttatgataatgaaatcaagcttagagatgaccttattccaacaattaaacgagcgcccgatcaaaccctggagttgacaggtcaagccattgatttcttgagaggaattttcaatatgtttgacacagataatgatgatgctttgctacctgctgagctggatgatcttttttccactgcacctgaaaacccatggtctaataatccatatgtggactgtgctgaaaggaatgtcttgggtgggttgtcccttgaaggatttctctccaagtgggctcttatgacacttctagatccagcaaatagttttgccaaccttatatatgttggctattcgggtgattttggctcagcatttaccactatgaggaaaagacgagttgatcgtaaaaagcagcaaacgcaacggaatgttttccagtgctatgtttttggtcccaggggtgctggaaagacagcattgctacaatcattccttggaaggcaaccttctgatgctctgcctatgaatggtgaacggtttgcagcaaatactgttgaactatctgggtccagaaagacacttgtatttcgagagattcctgaagatgatgtcagaccattactggctgatagggaatccttggcaccctgtgatgtagcagtattcgtttatgatagctgtgatgaattttcttggcaaagaacaagggatttgcttgtggaagtggctacacatggagaaaatactggctatgaagttccttgtctgattgttgctgctaaggatgatcttgaccaatctccattggctctgcaggaatcaacgagagtgagccaagacatgggaatcgaaatgccaattcctattagcgtgaggttgagagatttgaacaatattttctgtagaatagtccatgctgcgcagcagcctcatctgagcattccagagactgaagctgggaaaacacgcagacaataccgtcaacttctgaaccgttcccttatggttgtctcagttggagatgccgttgcagttgtgggaatagctgcttaccgagtctatgcagctaggaagaacacatcgtcttgaagctctcctggacagtgctgaaataaagtgctttcctcctttcactgcccatcaaccggatcttttcagataattttttacttctgagcttcataacgtgaaactttgtccagagaacccttttatgtacagatgtgttttcagcaatcaatcgttctgcgtattggatttcgcattttgcggctataattatgtagctgataaactgctatgactaaactagctctggcaaaacattagtactgccgtacaattttgttcttttagcaaatgtgctgttact

SEQ ID NO: 18117 - DNA, 2189 bp, Oryza sativa
  ref <308>: DATABASE ACCESSION NUMBER: AK068527
  ref <309>: DATABASE ENTRY DATE: 2001-12-06
gagcggcaacacaaaccaaaccctagcgtgggaagcggcggcgaccgggcgacggcaagcggcggcgacgtgagcagggttggccaccaacggcggagcgacgcgcgagtgctgcgggctgcggcgagcggaaggcggcgcaccacgcgcgggctgcggcggcaggccggcgagtgtgactgggattgggctgttgggcgagctcggctgaccagttgatgaagctcccctaattgaagaaccaccaacagttgccatagtcgatgtattctgagactgatttctctttcaaggatgccaacaaactgtgctctcttattcggaagcagcaagcccttgccaaaaagaaaaggaaatggctgcggtctctgattccaagggaagacggtctcatcaaacctatcaaacgacccaagtttctaaaagatgtgtacttggctgaatcatatgtaaggagtgatgaggtttcttgtgagaaagtcatagcccatgttgaaaaatgttatggtttccaaagcgatggctacagccaccacattgttcaggatggcctccagctttttaagttgcaaaaaggcaaggatggctcactcagtccacaaggtcttgcagacatgcaactcataataaataagttaagcaatgaagcacttcattcagtggctaacatcgccacccacaatagggttagttttgagaagaccaggccagcgatgaaaaagatcatagaagaccacctaccacaatacttggcaaacttgcatgatgaaaatgacatgtctcagctgtcgcacattttaacaaatccattcagttaccgatctaattccttaaacattacaacacctatttcaccgaaaatgctatcatccatcgaccaggcattaaatgtactcagtacactgactatacaagctcttgttgcaatgaaaaggaagcttgatgaagtatctttcaccccaaaatttagttttgtacctcgtataagcagaaaggcgcatatggttactgtgattaggaaagagtgcaataagatgatttcaagggttggggaaagtggtgacctgccaaagaatttggcaaaagcactgtcagtggtgaatctgtataggaagcaagagttgaaatgcatggacatctcacaggcagagttctttccattctcaaaaaaagcaattttcttgcaaaatgatgtcctgaatgctatttggtcaattcaaaagttgaagaaaggggatcttaaattgctgcgtgccatactatgtcaaggttcaaacgatgagatgctgctaaagactactgtgagaaggtatttgatagattgtttgtttgaatgtgatgagggtgatttaccagatgaggcactgagagccattgctttgtgcaatcagatgccgctgcgtcaaaaaattgatttcacagaacaaaggaagggtgcagagttagaagctgtactgaatgtaagcagtagtcttagagctctagtatatcattgtacaggaggccaaactgatgatcagttaatgaactgtgagagtgaatgccacagcgatgaacaagtgatgagcttaggttgtgatgactacagttgtgataatgatttcgtgctcacagagggttacaaaaattttggtcatcagcagcataaaatagatgaagcttgttcgagtagcatggtcaaccctgtcagtgtgagtggacatttctcgagtggagctggtagtaatatgaagaaacctactttgcatgaggttgttggtgccaatgaagtggaaataagaagaagctccatgggcctttccgagatttgtgatgatgctgcaattttggcccacaagcttctagggaaaattctggacaacacgttgcttgcagaaaacaaggtcaatggacttgccggatactctcttgatggttctacttcgcatggtcctcaagctgcatggacaaagtgaggaggatgttgcatgatgataaacaatgagtatggtctgcaaaaataatgcttgtttggtgccaatcagttcactcaaatgagactcaatggtgttgccttttgaagagcagatggtagtctgattgaaatggaactgcttgttcatatatatgtcaccattttcttttggttgaacctgttaatgttacacttatgatacatatactactatccaacatcattataacctcgc

SEQ ID NO: 18118 - DNA, 1050 bp, Oryza sativa
  ref <308>: DATABASE ACCESSION NUMBER: AK068528
  ref <309>: DATABASE ENTRY DATE: 2001-12-06
taccaatggccaccgccaccgccaccgccgccgctctcttctcctcccgcaccctttccccctcctcctccccccggcgacggcgacggcgaggcatccccgccgccgtcaccggcttcctctcccgccgccatgctcccgcgctccaacgccgcctcgcccccctgcacgttgtggatgattccaaggaggtagagacggctgccggagatggtgcggaggagaggtcgcagacggacaagctggtggacgggatggacttcggggagctctgcaacgacttcgagtgcataagcagcccctacgtggaggccaccgcgaggcagctcgcccgcgacatcctcgacctccgcgacgacaaccgcgccttcacctgctacgccgtctccgtcaaatacaaggacccggtcagaacatttgttggacgggagaagtacaagaggccattgtggatcaccaaggcactcgaaaaccctacagtgacagtccaggaaatgtcaatgcaatcgacaagcaacctgaccatcaaatggacattcagaggcaaacctaagaatccaatcttcgcaaccatcggaggagacctgatcgtctctgttacctcacagttcgtattgaaccagattagcggccaagtgctcgaacaggtcgactcatgggacctctctgcctcgtctcctcctgcccaggcctacttttggttgtccaggagggccttctccactgttgaagccggaaaggacacaatcgaagctgcaaagggtacagcatctcggctatcatcaaagaaagatgagaacttggaggtttatccagatccctcaggggatcctactaagttcttccaaaggccggatgatggattgaaccaagatgtgtaccagattgcgctcttcctggccgttctctacttcattgtacagtttttgagaacgactctgtgattgtactagctcccacagtcccaactcaacctgatactctggcctgattctccaggtcaagcttttgtgtatcagtgtatgcatatatgtgtgtgtatctatttcc

SEQ ID NO: 18119 - DNA, 2249 bp, Oryza sativa
  ref <308>: DATABASE ACCESSION NUMBER: AK068530
  ref <309>: DATABASE ENTRY DATE: 2001-12-06
ggatctgtggacgaagacgaacgtgcttcggttacttcgccggcggagtggtggttggcggcggtggggggcggtgagccggcgacggtcggcaccgcacgtcgaagcgcccggcgtccgcggtctgccgctcccggtggagctcggcgaggtggcggaggcgttgcagcctaggagaggaagcgctcggttgaggcggtggacggcggagtagcggcggccgtgggggcaggtgccggcgccaccgccaccgcagccggcttaggcggaagagacggcgggcctaacctgctactgtcccgtccccttacgcggtcacaagccattgacgccaagctggttccccttggcccttgccacttccacgccggcagcaacatccctgctacttgaggccagaaatgtacacctcagatgttagtgttatggcatggagcataacttggaaagttaagtgttcatataactacatttttttataggaactctcatataatatcatgagcattgccactatctgaaaacgaggcgacagtgtggaattttgcttaccaggaggctcagcaaggcggaggtacaggttctcaccaaggctggccttcttctctgagtcgacaagctcccctgtccaaaccaagcatcttgacgggtcagccatggtgccgccactgctcaagttggcgtaagcatatgccttgcaagagcagttgctgctgcactcggccgcgcactggtcgaagctcctgttccggatctgcaagaacttgtcggggaccttcatgtcaggcaatgacacgaagcggtgaccgccctctccgcatctcagctcttcctttctccggcatcctgattgcgagatgctgggatctacaggctcgaacccatcgaggcaccggcacgccgggacggcccccgtgaagtcgcagtagccaaacgggccgcacgagccatagacctcgcagctgccggcggcggggcgctggaagatcaacatccatgacgacgagctgttgtcccagctcaggaacatcatcgtgcccgtgctgtcaagtgtgaggcgtgtgtagatggagctgtcggagacagtgtatgagtagtagagcttgttccctgagtcgatgagtgtttgatacatgaataagctgctgttactcggatactgggcgccggacaccgtcacgctggttctgacgccgttacggcagtatggcttggtcccgttccaggtcatgccctggaggtccgagctggggtcgaggctgaaggagaaatctccagtggatgggtcatcatggctcctccacgcagtgaggcgtccgatgatctcggacttgtagctcatcaagaacatcatgcctgcgaggatggtatcagtcgggtgatcgaagctttgccatatgtcggtgccgtttggcaaccggagaacgaagttccccgtgtcgagcagcacggcggaggctccggtgacgctgatcttggttgtccaaagaatgtggccttgggagtccgacagcaccatgcctgagctgttggtgatggcaagggtcgctgacgaaggggtggtgattgggttgtcgcggttggcaacccacacaacggtgcgctgggggatgttgtggaaccagactccaacatagaggctattgctgaagttggccggggggaagaagccgagggcaaagatgccgcccttggagatgagcatctcgctgggaaagattggctttcccagtgtcagctggtcatcggttttgcatagaggaatcgagagcagcaggaggaacatgagaaaatagaccatattgcctgttagactttctgcttcgtttgcttgtcatgggtcaagttatatctttcattcataatgcagatatggactggtgtagttggagttcaattcccttgctgtcacctcatctgaagatcaggagaaatgtgagatggctaagtcctgattcagactcatggacagagacagtaaaggaccctgtctgaattctgatgaccaggtcacctggtcatgatactccaagtcgtgtgacaatgctgcacgaaaacgaaagaatgctgctgccatggactttggagtgataggctagtgcaggcaaaagcgaaacctcacgtgcgttccatggctccacgtggtgtcacaggcccttgatgctgccactctccatttgaagaagtacaataggtattaaaaccaattatgatttttatcccaagttatatatatatttttttgaagg

SEQ ID NO: 18120 - DNA, 2206 bp, Oryza sativa
  ref <308>: DATABASE ACCESSION NUMBER: AK068531
  ref <309>: DATABASE ENTRY DATE: 2001-12-06
gggctggcaggcacactcgcagtccccactccaaaagccggaggaggaggaggcgattcaccgacatcccggagcggatcgcggagcgcgacccctcctccctccgccaccgccgccgccgccgatctacctccgccgccgcgccctcccctcgccgtgcgtggctggtctcgtggattttgagctagattgggccgggaatggcgggggctcgcgcgatggctttcgtcgcgctctgcgccctcgccgccttccctgtcgccgtcaccggagcccaagtggacccactttattctagtaaacaggtactggactggagtagtcaagccaacattaaactacagaatttctccttaactgaagaagatggacttcagctgctggtaagaccagaagaagtaactcacaggaaattgcgggagagaaccagaataaagaagaagattgaaccagtacagcaggatgatgaagcactagttaagcttgagaatgctggaattgaacgttcaaaagccgttgattcggctgtccttggaaaatatagcatatggaggcgtgagaatgaaaatgaaaaagcagattcaaaggttcgtctgatgcgtgatcaaatgatcatggccagaatatattctgtgcttgccaaatccagggacaagctcgatcttcatcaggatctactttccaggcttaaggaaagccagcgctcccttggggaagctactgctgatgctgaacttcccaagagtgcttctgagagagtcaaagtaatgggccagttactagcaaaagcaagagatcaattatatgattgcaaggcaattactcagcggttaagagcgatgcttcagtcagctgatgagcaggtcaggagcttaaagaagcagagcaccttcctaagccagttagtggcgaagacaatcccaaatggcatccattgcctgtccatgcggctaacgatagactattaccttctctccccagagaaaagaaagtttccgaagagtgagaacttagaaaatcctgatctttatcactatgcccttttttcggacaatgttttggcagcttcagttgtggtgaactcaaccatcatgaatgcaaaggagcctgagaaacatgtattccatcttgttactgacaagctgaactttggagcaatgaacatgtggtttttgttgaatccacctggagatgcgacaatccatgttgaaaacgtggatgacttcaaatggctgaactcttcatattgccctgttctgaagcagcttgaatctgtggccatgaaagagtactattttaaggcagaccgtccaaaaactctctctgctggttcttctaatctgaaatataggaaccccaaatatctttccatgctcaaccatttaagattctaccttcctcaagtgtatcctaagttgaataagatccttttcctggatgatgacatagttgttcagaaggatttgacaagtacctcaatttttcaaatccaaatattgctcagaacttcgatcctaatgcttgtggctgggcgtatggaatgaatatgtttgatttggaagaatggaagaagaaggacattactggcatttatcacaaatggcagaacatgaatgaaaacaggctgctctggaagcttgggacactgccgccaggtctcctaacattctacaagttaacacatcccctggacaaatcatggcatgttcttggcttagggtacaacccatccatcgagcgctcagaaatagataacgccgccgtcatccactacaacgggaacatgaagccatggctggagattgcaatgtcgaagtaccgaccatactggacaaagtacatcaactacgagcacacctatgttcgtgggtgcaagatcagtcaataggcttttttttttcctggagtgatttcattctttcagtgatgaatagctagtgggacttggaaccaagcccccttgttagacttcgatatagtaggaacaacagtaattccattgcatgttcagatgttctttgttcgtgttgctacttgctataggtatcttatgtatgtagttgcctcccacattcgttttctagcccccctttccattagccctctgtggtatctgtaaccatcttttcttttcttcagaaaagaatgatgaaccctgtgattgttctcacctgataaatgaaatgtctcaaaagtttgtgtggcg

SEQ ID NO: 18121 - DNA, 1551 bp, Oryza sativa
  ref <308>: DATABASE ACCESSION NUMBER: AK068532
  ref <309>: DATABASE ENTRY DATE: 2001-12-06
gcgtggcaaatccatccatccatcgcctctgcctcgcctccaccaccgagatgccggggctcaccgcgccggcgagctactccgacgagccgcctcgccaccccgccctcaagatcaactccaaggaaccatttaatgctgagcctcatcgatcagcattagtttcatcttatattaccccggtggatttcttctacaagagaaaccatggaccgataccaattgtggatgacctctcaagatacagtgtttccattactggtattgtcaacaagaatgtgcagctgtccatggctgacattaggagtctcccaaagtatgatgtaactgcaacgttacagtgtgcaggcaacaggaggactgcaatgagtaaggtacggaaagtgagaggcgttgggtgggacatatctgctcttggaaatgcaacatggggaggagcaaagctatctgatgtccttgaactagttggaatacctaaactcagctcagtcacatctttaggaggcaagcatgttgagtttgtcagtgttgacaggtgcaaagaagaaaaaggtggtccctataaggcatcaattcaactaaagcaggcaacagatcctgaagctgatgtgttacttgcatacgaaatgaacggagagaccctaaaccgtgatcatggatacccacttcgtgttgttgtacctggagtaattggcgcacgctctgtaaaatggcttgacagtatcaacataattgaagaagaatgccagggtttttttgtgcaaaaagattacaagatgtttccaccctccgtagactgggacaatattaattggtcaactaggaggccacaaatggatttccctgtgcagtctgctatttgtaccctggaggatgtggatgttatcaaggaagggaaggctaggattgctggatatgcagtctcaggtggtggccgtggcattgagagagttgatatatctgtcgatggggggaaaacatgggtcgaggctcatagatatcagaaaagcaacgtgccatacatatctgatggacctcggagtgataagtgggcatgggttctattcgaggctacattagacgttccagcaaacgctgagatagtagctaaggcggtggactcagcagcaaatgttcaacctgaaaaggtggaagacgtatggaacctgagaggaatcctcaacacatcttggcatcggatcaaaatacagaattcttcgtgcgtgggaagatccaaaatgtgaaataagtaaactgcttggaatcagaagtcaagagtttatagtgcccggaataataagttattgcagcattcgatgattctcgcagactgtgctcctgtactatagtactatgttggaatcgtgttgctggcctgggcttatatgagacgaaacacaatttttgggagtgatgttaagaagatgattaatacgtactccagtatttatgttgtcttctaatggaaaatttgcagttcttgtgctccatatgataaaagaaaaaactcagtaaattcagttgcaaagatgtgacaagacattaacatcc

SEQ ID NO: 18122 - DNA, 1236 bp, Oryza sativa
  ref <308>: DATABASE ACCESSION NUMBER: AK068533
  ref <309>: DATABASE ENTRY DATE: 2001-12-06
gacgcgggcggcgaggaggcgcaaccgcgcgacggcgtagctcgcgcggccgcacggggcggcgtcctacctgcggccgcgcttatccccaaccctaacccgacatgtcggcgtcggatctccccgacgagctgtgggcgcgcgtgctggagctcggcgcgggcgcgggcgcggcctcctccgcgctggggttccgcgacctctgcgccctcgccatcgcctcccgccgcctccgccgcctctccctccacccctccctctggtccgcgctcctctcccgcgacttccccacccaatcgtcgcagccctcctccgcctcctcctcttcctctcagcagcagctccaccccaaatccgtctacaaaactaagttcgagaggcataaggtgcggatggcggaggcgaggcggcgggtggtgttcgaggcagagggccgcgtgttggcgtgccggaggcggctgacgcagctggaagagtcgttgcaggaggaaggggagaagatgaagaccgccgcgcaggagctggacaacctcgagagggtcaggagagcttcagtggcattaaatgtatggcaaccacaagttgttcgtggacgtcaaaaacaattggttcaacagtgcacagttccagttgattcccgtcttagtgatgtaaacatggagctgaaagtttaacaaggagaaggaaaaactgaatgagtatgaggaagcattgaagagagcaatatatcatccattgcagagtagccatacaagttcaattgccaatgagccacaagcaaagagaaagaaacgaaagtaagacatgcaagtttgcctgtgcaacctttcgtccgatcttcctttgtttgcaggtatgcatgccactgatataaccatggcaaatgcaaaaagactgaagagagaggaaaaaaggtcctctattggcctcttccttgccagccgccagcggccagctgtttataccatagctgaatagtcagtgctgctggtgcctatctgtcattcacgaagctgtgggcggtcagctgttctagggcagcaggacgacatacatctgatcaaattgcttccgctgacctttgggttgaagagatatgcacatgaagcaaaccatgttccctttttttttaccttcagtttcaaaatgttagtatgcaattaattaagtacgtggaagcttgttttctgtaagctacttcgtatacaagtcaatcaactcttccgaattgtaccc

SEQ ID NO: 18123 - DNA, 2213 bp, Oryza sativa
  ref <308>: DATABASE ACCESSION NUMBER: AK068534
  ref <309>: DATABASE ENTRY DATE: 2001-12-06
ggctgctttgctacggccggagcggcagagcacactccggcgaggggggccatggcgatgcggctcttcccgtcctcgtctccgctcccgccgccgccgcctctgctcccgagccccagcgcgaaggcaccgccgtccgcgcccttctcactctccctccgcctccgccgcgcgcgggtggcagcctccgcggccgctgcggcggggggccccgagaggggggcgggcgggtacgagggggatgcggaaggcgagggcagcagcggggcgttcgacaggggaatgtcggagatcgcgaggaaggtgcctctcttcgagccggcgaggggcgacgccgcggcggtcgccggcgagcggccgctgcccatcaacctcgagctctggctctaccgcgcaaaggtgcacacgcggaagtacgagttcgccgacgcggagaagctcctaaaccagtgcatcatgtattggccggaagacgggcgtccatatgtggcgcttgggaagctatacagtaagcagtcgaggtttgacaaggctagagcggcttatgaaaggggttgccaagcggcacaaggtgaaaacccgtatatttggcagtgttgggcagtcctagaacgcaaaggtgggaatattcgaagagcacgggagttatttgatgctgctactgtagctgatgcaaagcatattgcagcttggcatgggtgggctattttagaaatcaagcaaggaaacattaaaaaggctcgaaatctacttgcaaaaggtctaaaatattgtggaggaaatgagtacatttaccagactcttgctctgcttgaggctagagcagagcgctttgaacaagcacgaactttattccaacaagctacccaatgcaatcccaaaagctgtgcaagttggctagcatgggctcaggtagaaattcgtgcagaaaacaatgccatggcaagaaaactctttgagaaagcagtccaggcaagtcctaagaacagattttcatggcatgtctgggcactatttgaagcagaacaaggtagcatcgacaaagcaaggaagttacttaagattggtcatgctgtgaaccctagggaccctgtgattcttcagtctcttgcactactggaatacaactactcatctccaaataccgcccgtgttttatttagaaaggcatctcaaattgatcctaggcaccaaccagtttggatagcttgggggtggatggaatggaaagaaggaaacgccagaacagcaaggacactgtatcaaagagctttgtcagttaattcaactaatgaatgtgctgctcgatgtcttcaggcttggggagtcctagaacagcgggccggtaactacaccgctgccagaagattgctgagatcttcactgaacataaattctcagagtgaggtaacatggatgacatgggctgcactagaggacgaacagggtgatccagttcgagctgaaggaatacggaacatctattttcagcagcgtaccgaggttgtggatgatgcctcctgggtcatgggcttcctcgacatcattgatcctgccttagacagcgtgaagaagctcctaaacatagaccagccttcggggcctgcaacacgagacaatccgaaaagcactggagagccaagcaatacagctaccgtccggacttctgccgatgcagagttttctggcggttcaagagcagaaggatcggacgcttcggaccttgctaacgccgatgacaaggagagcgatgacgctgcagagacaccagagagcgatttcgacgtggatggattcatcaggaggcggctagccctggacccggccgagctggacgcggtgcttgagggttctgatcccaggggagttgtttccaggaggaggacgcagaggttgcccaggaagccccttcctcttctccctgttccgtaaatatttccacttcagttcaacaatgcacatttgccatctacgccgtgcgaagcatcgaccactaacagtaacaggtaccgtgactcgcgagatagttgaacatacatatctgtgtatatctctcagaagaagagcgcggcggctgccattagcagccacatgtttgttactagagttgttattggtccacccaggtgtatgtaattctatcattcttcaggagcagtgtatctgtgtacataagcgcaatctatcaatttgtatgtgctagtgaagaattc

SEQ ID NO: 18124 - DNA, 869 bp, Oryza sativa
  ref <308>: DATABASE ACCESSION NUMBER: AK099058
  ref <309>: DATABASE ENTRY DATE: 2002-08-28
ggtcaagaaagcaagctcacaacaaggacaagacaggaactgaaagccctagtactaagaacagcaaccacctctgaaagctttacaagttcgcaggggcttaactgcgaatgaacatccagaggaagccaggagactggaactgcaaatcgtgccagcatctcaacttcagccgccgggactactgccagcgctgccataccccacgccaggacctgccgcttggcgatggttatgtcccaggtggtgtgctgacctccctggacattcgcccgggcgactggtactgcaactgcggctatcacaactttgctagccgagcaagctgcttcaaatgtggcgccattgtgaaggaccttccagcaggccaaggtggtggtgttgccaacggtgactttgcccgtgccctcgacagcagcgcagttcgtgctgggtggaaggcaggcgactggatttgcacaaggcctggttgcaacgtccacaactttgcaagtaggattgagtgctataggtgcaatgcacctagggaagcaggtaatgtgaagtaagaaaggactgacgcgaccaaagatcgtgagacgtgacgagctggccgaggatgaataaagtgactgctgtcagttgtcacattcacaggctgcgatccagaaactatggatgggactatgtagtaacgtgctgatatattattgctaagtgttactactgcatggttgcaagggtggtagaagtaccttagcttccaagatcgttgtaatgtgtgagtttaattttggcgttttaagtaataagtctagtgattgcaggattgtacggggtaatgtacttgcattatccattataatcttaagcatccaatataattatgc

SEQ ID NO: 18125 - DNA, 1489 bp, Oryza sativa
  ref <308>: DATABASE ACCESSION NUMBER: AK068535
  ref <309>: DATABASE ENTRY DATE: 2001-12-06
ggctgcatgccacactgcttcttcttcttctctctctctagctagctagctagcttctctgtaggctgtagctgcggtggcaatggcggcggcgaggttgtgggtggttgcggtggcggtggcggtggcggtggcagtgatggcggcggcggtggaggggaagagctacaacatcacgaagatcctggcggcgcacccggagttctccaagttcaacgagatgctgagcaagacgaggctggcgtacgacataaaccggcggcagacgatcacggtgctggcggtggacaactcggcgatggcgtcgctggaccacttcaccctccccaccatccgccacatcctctccctccacatcctcgtcgactactacggctccaagaagctccacgccctctcccatggcgccaccgcctcctcctccatgttccaggcgacggggtcggcgccggggacgacggggtacgtgaacatcacgtcgcacaagggcgggaagatcgacttcatctcggaggacgcggacgagagcgcgaagccgtcgaggtacgtgaagtcggtgaaggagatcccctacgacatctccgtgctccaggtgagctccgtgctgtcctcctccgaggccgaggcgcccgtcccgccgccggcgccggtgaacctcaccgagctcctctccaagaagtactgcaagtccttcgccggcctcctcgccgccaacgccgacgtcttccgcgccgtcaacgagaccaaggacaacggcctcaccctcttctgccccgtcgacgccgccgtcgccgccttcatgccctcctacaagaacctcaccgccaaggccaagaccgccatcctcctctaccacgccgtcccggactacttctcgctgcagctcctcaagtccaacaatggcatggtcaccacgctcgccaccgccagcgagtccaagaaggactacagctacgacgtccagaataagggcgagaccgtcacgctcgacaccagggtcgtcaactccgccgtcaccgccaccgtcggcgacgccgagccgctcgccgtctacgccgtcaccaagttcctcaagcccaaggagctctacaaggtcgtcgaggcccccgcgcccgcgcccgagccgtccaagaagcacaagtcggcggccgacgacagcagcgacgactcgtcggacgattccggcgacgtcaaagcccacaagggcgccgccgctccggcgccgctcgcccggtgggtgaccgccgccgcggccgccgccgtagcagcattgatgctaatggcttgatgcatgagtcagtcaatctacactctacagagcagagtgtgtcgaatttgttttttttttttcctttttggtatggctggtcaattacaaataagaaacatagatgtgtgaatgatttgtagttctttgagttttttctttctttctgtggtggtttgatgtaattactttgtaattaatatagttgtccataatccacgg

SEQ ID NO: 18126 - DNA, 1542 bp, Oryza sativa
  ref <308>: DATABASE ACCESSION NUMBER: AK068536
  ref <309>: DATABASE ENTRY DATE: 2001-12-06
gatccagctgatcgcctgcgcgaggtcaaattcctttcctccccaactcaaccaacaaaccatcactctcccactgtcacttcgcagcgccagtgtaaatatgtagccgtgctgctgcgcaacagtgtgtcgtggtgacagattgggtttgtgcggatgggctgaaaacctgaccgataatttggtggtgttttcttcagtaacatctactacatcaacgaccggctggacaagcggacgtggacgtacatcttcggcgcgtgctgcgccaccacggtgttcatcccgtcgttccacaactaccggatctggtccttcctgggcctcggcatgaccacctataccgcttggtacctcgccatcgccgccctcctcaacggccaggccgaaggcatcacccacaccggtccaaccaagctggtgctgtacttcaccggcgccaccaacatcctctacaccttcggcggccacgccgtcacagtggagatcatgcacgcgatgtggaaaccggccaagttcaagtacatctacctgctggcgacgctgtacgtgttcacgctgacgctgccgtcggcgtcggccatgtactgggcgttcggggacgagctgctgacccactccaacgccttctcgctgctgcccaagaccgggtggcgcgacgcggcggtgatactgatgctgatccaccagttcatcacgttcgggttcgcgtgcacgccgctctacttcgtgtgggagaaggtgatcggcatgcacgacaccaagagcatctgcctcagggcgctcgcgcggctccccatcgtcgtccccatctggttcctcgccatcatcttccccttcttcggccccatcaactccgccgtcggcgcgctcctcgtcagcttcaccgtctacatcatcccggcactcgcccacatcctcacctaccgtacggcctccgcgcgcatgaacgcggcggagaagccaccgttcttcctgccgagctggacggggatgttcgtgctcaacatgttcatcgtggtgtgggtgctcgtggtgggcttcgggctcggcggctgggccagcatggtcaacttcatcaggcagatcgacacgttcgggctcttcgccaagtgctaccagtgtcccaagcccgccccggcgttggcgcagtcgccggtgccattgccgcaccactagcgcgcgcccgttccgcaccaccgccgccgccgcggcggaccgtgacaacgtgcaccgccgagcccggagcaaggaacctcgctctcctggccggcacggctgcaaaaattcagtgttgcttaggttttggtcgccttgtaatatacaaagcctctcctcctgtgctagggtgtcacaccaaaatggtagaagaagaagagggcatgggtccctacgatcttgccccgggccgtccgctgccgcgttgctttcccccgatcctcgatggtgtccttgtgtttgtttggcttgcccctccctctggcgatatatatgtgatggtcgtcatggcttataaagattttcagctcatgtcacattttc

SEQ ID NO: 18127 - DNA, 751 bp, Oryza sativa
  ref <308>: DATABASE ACCESSION NUMBER: AK068537
  ref <309>: DATABASE ENTRY DATE: 2001-12-06
gagagttcaggtccattccaaagttgcaatcaatctgtctcgattattgcctctctgctctgagtgtgactgtcaatctgtgagcttagctagtgactggccattgcacgagaaaagaacaggttgatcgatcattagtaggtgaagtgttcttgccctgttcttttcttggtttcttgggtaaaccaactggttgggttcggtgagtttgagaacttcagaaactgtaacaacaatgggaggcaccatggattacctgtctgatcttctcggcggcggcgggagcagcagccgtcggaggtacaagaagaggaagcagtacaaggtgacggtgcaggggttcgtggagccgcacaaggtggtgaagcgggtgcaggcgacggggaagaaggcggagatctggccctacgtgccctacaccctcgtcgcccacccctacgccgccccggcctacgacaagagggctccccccggccacgtccgccgcgtcgacgccgtcatgcccgtcgccagctacggctccgccgccgctgccgccgcgccggaggagcgcctcaccaccatgttcagcgacgagaaccccaacgcctgctccatcatgtgaattactgtaactgaatattagtgtaatctcttcagagttcagatgaatgtacgaaatgtatgtgcagatatgagagattgtactccctccatcccaaaatataaaagaatctagaatctggatagttgtctagattcatagtattag

SEQ ID NO: 18128 - DNA, 1152 bp, Oryza sativa
  ref <308>: DATABASE ACCESSION NUMBER: AK068538
  ref <309>: DATABASE ENTRY DATE: 2001-12-06
gatggggagagagagagagagagagaatggcattgcagcaacgaccggggatgctcggcattggctgcagcaacgtcttggcacgagcaagggtgcagcaatgtctagcagcggcgtcccactccaatatgccatgtctacccgtcctcctgcatgtcaatggcagcaagaagcagggtagcagcttcctttcttctcagaggatcggcttaagtaggaggaggaggaggagggacctgagcggcgtcgttgtcgcggaagtgagcgccgccgccggtgtcacgccggcgtcgtcgtcgtcgtcgcctggcggcatcagcgtcagcgatgttctttggccctccgccggtgcattcctagcaatggccgtgctgggaaggatggatcagatgatggcgtacaagggagtatcattgacaattgcccctctcggagcagtctgcgatgtgcttttcaccgctccaggctcacctgctgccaagaaatacaacatgtttgttgcccagattggttgtgcggcatttggtgtgttagccctttccttatttgggcctggatggttggcaagaggtgctgctctttctgcatccatagcattcatgacaattacaggcgcctcacaccctccagctgcaagcttgcctctcttgtttattgatggtccaaagtttcaccacttgcaactctggtatgccctttttcctggagctgcaggctgcataattctttgcttgattcaagaggtggtgatttacctgaagaagaatttcaagttttgattcaagcggtgcattacttctcgtagcaatgacatgactaaaattcaagattgtaccacaatttgctagaactgcattggggagaaatggaggaaatgcagatttagtttccttggtcttatttactaaacaggaagaggagaaaaagcagattgatcgatacctgattgtgaatttgtgatcacagtgcagaacatgcaaatatgaagtacataccaatatctcatttaatgaaatctgataagtgtacaaataaaattccttcttttgtgattcataattgctttcttcatgtaatatacaattttgcacaaaaagaaaaaagggaggaaggaagttcacctctgttaatctgagggagattgaactattt

SEQ ID NO: 18129 - DNA, 1222 bp, Oryza sativa
  ref <308>: DATABASE ACCESSION NUMBER: AK068539
  ref <309>: DATABASE ENTRY DATE: 2001-12-06
gggtgatggcggcggccgggtgcggcggcgaccggacgaggcagcgagacctcctcctggtcgtcgtcctcgtcgtgcacgtcgtcgctcggctccgtcaatgacagtgccgtcgtcgcgtgcgtcgtcaaggcagcgagcgggcgtcgtcaaggcagcggacgtcgtcgtcgtctctgcggggaacgtccccgccgccagccacttcctcaccgccatccacaaccaccctctccacgccctcgccgctgcccctcgccacgctgctcctgggccacctcctctcgcgccgtcgcgtccgcgaggccgcctccgtcgtccgctggatctgccgcccgaactccccgcagcggcccaacaacgccaccttcaccttcgtcgtcgcggcaggcgggctcgacggcgacgacggcgaccgggcgagcgtggcgtggtgacgactagcgaggcggcggcgagcgggccccgcccagatccgacgagttgcggcggccggttgcgtgcgggccggcgatttccgcttttttttttttttgtttcgtgcgggcggaataatttgaccgcacaggataatcgattatcccgtgtatcccatacggttggcccatccgcacacgaaaatattgatttttccagacacttgggtgtagacggacaaatcatccgcacggaaaaatcattttgactgcacggaaaaatcattttgactgcacggaaaaatgttttacatagtagtgtcgacgaaaccaactttctagaaatgccactgtacaagcgtctttgccctagaaatactatcgtcgttatgtttccgttagcaccccttcgttaagtgctacaaaaaggccattttacccctacgaattgctaaaaagtaaattaaaacttttgctcttttcataagcttacactaatatataggttgttctttacactaaattattataaattattataggttgactggaagagcaaaagtttaatgggctttcagcattttgtaggggtaaaattgtcttttttatagtacttaacagagggctactaacgaaaatctaacggtgatgatatttttggaacaaagacgcttctatgatggcatttccggaaagttgggttcgtcagtgtaaaaaattagaagataaagagagttggtagtgaaatatgaatagtgtgagaagattcatgaaaaaaagaattacataaaaaaagagagaataag

SEQ ID NO: 18130 - DNA, 730 bp, Oryza sativa
  ref <308>: DATABASE ACCESSION NUMBER: AK099059
  ref <309>: DATABASE ENTRY DATE: 2002-08-28
gctttccccttcctccactgatggcgccagcgggtgcagaggctggacggacggcaacggcgcggtgggtgcagaggccggtgaggcgctgcggccggccgttggcgtcgtggccgggtgacggagaggaggaggccgtgtggcggctccgtgcgatttggaggccgggacggcgtggtggggctggctgcggcctcggatggaggaggcggtggcgacagctgcggccgctcgcgcgcgcggatcatgcagcggcggcttaggcgcgtggatccggtggcggcggctgctcgggcgcgcggatccgggtattcccccacacggatcctgagtcggcggcggcagcgtagtctcacctccccacggtgggcgtgccctctcactccctctccttcccgtccctttcccctctcttctctatcgccggcaactcccacaggccggatccggcgtaggcgtcggtggcccggttgcggtgccttcccctccaccagatccggcggcgagaggggaggcggtggctgcccggtggcgggatgattatttagatgttcttgtgtgatgttttagtgaaaaatttctgtgatgtttttcaatgtttcctatgatgttttttggtttgggattgggattgattgatgcggggtggataaggtcgatgcatcagctcgattaggagaggggaatctgttgttcttgaggatttttattcaatgtgatttctttatct

SEQ ID NO: 18131 - DNA, 3003 bp, Oryza sativa
  ref <308>: DATABASE ACCESSION NUMBER: AK068540
  ref <309>: DATABASE ENTRY DATE: 2001-12-06
gagcacgttccccgtcctcctcctccgccccacctcgcgtggcacgcccatggccttctccccgcgctcgccgtggtcgcgctccaggaagcccgacgtgtactccaccgtcgtcgtccacggggacgacgacgacgacgacgcccgcggcggcggcggcggcggccgccatgccctcgcggaggatgacgaggaggaggacccgtcgtcgctgcccccgctcctccagcgcctccccaaggacttcggcggcggagcctccttcgacgagtacgacgacccctactcgtcggacctcgacgacgcctcgctctccgccaccgtcgtcgtcaagcgcggcgcccccgcctccacctcggcctcctcccgatccccgttcctggatctgcgccgctccagcccccgtgccgccgaggtcgacccgtactcaaccttcgtggtacacggcaccgcccgctccggcggcgcctccagcccgcgggaatccgcctccggcacattcgtccgccgctccggtggttcctccagcccccgcgagtccgtgtccggcacattcatccgccgcacgggcagcccctccagcccccacgagtcgatctccggcaccttcatccaccacaccagcggcgcctctagcccccgcgacactgcccagggtggcggagggtttggttcctcgttctggagccctgcggtggggcagtccgaggagctccggcaaccggcgcttcttgtgcagcagcagcaccagcaacagcagaattcgaggcggaaaccatcggtgagctctgtgccggagagtgttaccagggaggatccttccactaagtatgagctgctccatgagcttggtaaaggttcctatggtgcagtgtacaaagcaagggatctcagaacacaggagcttgtggctatcaagatcatctccttgacagaaggggaagaaggatatgaagacatacggggagaaattgagatgctgcagcaatgcagccatccgaatgtcgtccgctacttcgggagctaccaaggagaagaatacctttggatagttatggaatactgtggtggtggaagcgttgctgatttgataggcataacagaggagcctcttgatgaatcccaaatagcttatatatgtagagaagcactaaagggtcttgcttacttgcattcaatttttaaagttcatagagatattaagggtggcaatattctgctaactgagcaaggagaggtgaagttgggcgattttggggtagctgcccagctgacgagaaccatgtcaaagcgcaacacgttcattggcactccacattggatggcacctgaggttattcaagaaagtcgctatgatggaaaggtggatgtgtgggcattaggtgtatctgcaattgaaatggcagagggtatgccaccgagatccaccgtgcatccaatgagagtgatctttatgatatctagtgaacccgcaccaatgctcgaggataaggagaagtggtcccttcttttccatgattttattgccaagtgcttaacaaaagatccaagacttcgcccagctgcaagtgagatgctgaagcacaagtttattgaaaaatgcaaccctggagcttcgaaaatgttggcaaaaatcaaggaagcaaagaagatcagagcaaaagtagctgcggagaccgagctatctggccctgacagtgatgcaactgttcgaattaatgatgactttggagaaactgttcctacaaaccctcagcaacaaacaaatcacgaaacatatgatggtggggcaggtgattttggtacaatgatagttcatcctgaagacggcgacgaagttgatgaatcacccatcttcccaagttcagaattcataccaggccttgggagcataaactctttcacacatgatccaaagagggccgagcttatttcaaatttttgggcggagaacacagctgatattgaagccaataaagagcaatatctagatgaacatcctgatatgcaggaagcaaaaacaatgccaccttcaactggaacggttaaaaagcttaaagttgcagaagggactatgccacgccatggtaatcaagttagctctgcctcaccaggtgttgctagcacaatgaccaaattaaacagcagccccagccgtaaagcattctcagttcaggataagctctggtcaatttatgctgcgggcaacaccgttcctataccattcctcaaggcaattgacatttcaccactagctctagtatcagatagtgtagtaggaaatggcctagctgggtcaaatagaactgatgcattggaggcagttagggagcttttcagtggtgatgggcagacaaagaaagggcgcaaagggcaaaatgaggttcctcttcctcctggggtgcaccacagattgaccacaagtcccacattgatgaacctggcccaagcccttgcttaccacaaaacgtgttacgaggacatgcctctgcaagattcgcaagcaacgcaagagcagcagacaatacagaacctttgtgatacacttcgaaccatcctgagactctagtctgtggacatgcatgagtaaaagatacgaccttggagcatttcgaacatcgaaatgctgcgccgagtaaagggctgattttggcttctcaatttgatgccgagatcgatccggccagtgtgtagggtaagtctgtaaccaaaagcaggcacggcatagtgcgtactgcagaacaatgctgacggagcttgccattagcttatagatgctgggtgaccttgaagctggataggcggaaggaattcctgttttggagatggaaattttgtctgatgttaatagcaggtatttatgtgggcagtgtatgtagagattgcattcgaccttttgctaatcaaattttgcggctcaaatggtgacgtgtactcaggctttgtatttttaacatatttcatttgtttttcccaagaataaagagaaatagtattagtacc

SEQ ID NO: 18132 - DNA, 2944 bp, Oryza sativa
  ref <308>: DATABASE ACCESSION NUMBER: AK068541
  ref <309>: DATABASE ENTRY DATE: 2001-12-06
gtggggaaagaaagagcggaagaaaaaaaaaacatcaacagcaaaaccgactcccgagaagcggagagggaaaaaaaaattcgcccaaatggcgggggtcgtcgtcgtcgtcttcgtctccgatccccctctcctcatccgcctccacccctcacatcgccattgccactgtgatcactagggtttcgcgctgctcctcgaggtaaggattcgctcgccttcgccgatgcggtggtggaagcgctcggtctccccttccccgtccccgtcctcttcgtccgcgtccgcgtccacgcccgcgtccccggcgcgggcctcgacctcccgcgttggcggcggtgtccccagccgccgccgggatgtggtggggtttggttggggtggggggagtgatccgcagccgcggttgaccaggcagaggcggctgcggcacgtcgacgacatcgaggtcggggtctcggcgctcgggctggattcctccccctcgcccgccgcgccctcgtcgtgcccctccagtagggattcggtggggttcggcctcctgaccgcgagctccacgccgatctcgaggaccgcgagtaacatggaggtggcgccgccgaggtcgtcgtcgtctcccgtgctgctgccgcacccgctgcccctgcccgatgagggggactcgccctgccgcggctccgggagatccctcccgtcgcccaagctattcgaaggagactgcaacgggtcggccgtggagtcgaacttgctcggggtttccgagatcgggagcgacagagcatcgttgtttccgagagtgatggctaaaacggtgcaaaaaaaccctgagcatggtgacttgcgatcaaatggcacaaatgggattaactgtggacaacggaggaaggcatttaaagagaaattacaggataagagctcagctgaaacattgacattcagattgaacatacccgctaaaagtgctccaagcagtggattttcaagccctgtacagagtcctcgaagactgagtagtgtagactttttgtccactgcaacatccacccaaggtgccaatttatcgtcagcacagtcagtctggtctcctgatctatatggatcttcacctcgttgtgcgtcacctgaaaaaattatgggtagtcaggagcgatctcctcgctccagtccattgagaagccctgttctaagatcaaaaaacccaagtgcacctccttcaccaatgcatccaaagttgttcccggagaaccatgtttctcgtcctgagggcaatgggagtgtaaatttccatccattacccctcccacccgcctctgtaagcccaaagcagacgaattttagtcaccagccagttccaaaagttgatgcaccctcaatggctggtcagtggcaaaaaggaaagctcattggcagtggaacatttggatgtgtatatgaggccgccaatagacacactggagctctgtgtgccatgaaagaggtcaacataattcccgatgatgctaaatcagctgagtctctcaagcaattggagcaggaaataaaatttcttagtcaattcaagcatgaaaacatagtgcagtactacggcagtgaatatattgaagatcgattctacatatacctggaatatgttcaccctggttcaattaataaatatgttaatcaacattgtggagcaatgacagaatcagtaatccgcagcttcacccgccatatacttaaaggccttgcctttttacatagtcagaagattatgcatagagatatcaaaggagcaaatttgcttgttgatgtgaatggtgtagtcaaattggctgactttggaatggctaagcatttgagtactgcagctcctaatctttcactgaagggaactccatactggatggctcctgaggttgttcaggctacacttgtcaaagatgtagggtatgatcttgctgtggatatctggagcctaggttgcacaattattgagatgttcacaggaaagcctccttggagtggtcttgaagggcctgctgcaatgtttaaggtgttgcataaagatccgtcaattccagacagtttatccccggaggggaaggaatttctgagatgctgcttcagaagaaatccagctgagagaccaacagcaagcaagttgctggagcatccatttgtccacaattcgaataacttcaaccagcacagtgctttacattctcccactggacttaaatccaccgataccggtcacaatgcaagagacaaaaagtcctgtaagattgtttcatgcatgagggggaaaaatatgattacaactggtgaaacaagcagtgctagatctcccggttcattatctaatcgggtggcagtaggcttgacagccctgccaaatttggaaactcgtagcttatcccctacgccgatgagtttgaggtccagtcctggctctgcggcccatacacctagtatgcacttttctatcgcataccatcagcctagtccattgccaaggccaaatggaaaggaagcaataaatttgttcaccttgaagcatgacgagctgcctacctaaggtgcggaaacacatcatctgtccatccacccaatctgttggatgcgagcccatctctaacttctgatccctgtactgccagtcatcataattgaacattcgctgggtcttgtaaagtacttggcatgcgaaggacatcagcacggtacgatcgcaatagcttctgaaacctgtaatgtttgttttcaaggaaatgatggcgtttcctttgtaagatattatttagggttagctgtaggttaaactaatggccctgattgttgccaacaggtaggacactagggttgtagttgtagcttgtgttgtttttgctattgtgtaaccacaccacgatgtaatcattgttgattttttgaggcccagtaataatgataaagagttggc

SEQ ID NO: 18133 - DNA, 1534 bp, Oryza sativa
  ref <308>: DATABASE ACCESSION NUMBER: AK068542
  ref <309>: DATABASE ENTRY DATE: 2001-12-06
gggttactagcagcatcaagctcaccatggccatcatcagcttcaccaaagtgtggaggcgaatcagctgccgatgacctcggccagcttgctgcttgctcctcggtcgccagacatggccgccgccgggatccttccggtgagtggtggcggcggcgcctcctcggcgcggccggtgtcgatggcggagcgcgccaggatggcgaagatcccgcagccggagccggggctcaagtgtccgcgctgcgactccaccaacaccaagttctgctacttcaacaactactccctcacccagccccgccacttctgcaaggcttgccgccgctactggacccgcggcggcgccctccgcaacgtccccgtcggcggcggcttccgccgcaacaagcgcggaaccaagccctctaactccaagaagcccgccgccgccgtcgccggcggcgtcatggcgccgccgcatgcgcagctgcagctccctttcgggtttgatggcggcggcggcggtggccatggtagtatcatcggtggtggtggtggtggtggcgcgtcgaggttagggtttccggagctcagctcgctgcacgcggctgccgccgtcgactaccagctcggcggcggcggcggcggcgacggcctcgggctcgaacggcagcgcctcccgcacttcccgttcttagcccgatccaacgccgcagtccatccaccgccgctgatgtccaccgccgccggggtatcgtatccatttggcgacgtcgcggcgggcggccttggcggcgacatgccggccaacgccgccagcgtcgccggctccgccgggctcatcacgcagatggcctcggtgaagatggacgacatcgacaaccacccaccaccgtctgcggcaacgacgacggcgagctcgccgattgagttcctcggtctccgtggaagcttgcagttctggggaggcggcggcggccaccgtggcggtggtgatggtgccggcggcagtgctgctcccggcggcggcggcggcgggtggtccgacctgccggcgtttgacttgtcaacgtctggaaatatactgtgatgactcaagtcatgaggcatatgcagaatgggtcaatgcatggatggtgcatggcttcatggggaaaagaagaagaaaaatcaatctagaatcctagaactagaagagtgttatatatgttgtgtgtatcatgcatgcatggaaccaaactaggtaagtaatttaattttgcatgatctgatcagggcctagaagaactatattactagctgatatgaatctataattagttagtcattatggtgtgactaatctgtttcttgttcttgcatatgcatgcctagcttggtagatcaagtcatgaagctatagctaggttatagctgtgtgttagtattaagtaaggtcgagaaatattgaagtcatcatgaagctagctaggttatatagctgtgtgttagtgttaagcaaagctctagaaatattgtatctagggatgaatggtaccgcttgattattatt

SEQ ID NO: 18134 - DNA, 1775 bp, Oryza sativa
  ref <308>: DATABASE ACCESSION NUMBER: AK068543
  ref <309>: DATABASE ENTRY DATE: 2001-12-06
ggtaaaagaaagaggagaaattctcccgtcgtctccttccttgcgccaagaaagacgagccgcggctcaacagcggagtggaggggcgccgatctccatcgccgaggagagcagagcaggggaggggaggggatcctggttagcgcttttggcgtgtgattgatttctaaacgaattttgggccgtgaagggaagttcaatcatggcagggtctcttgccgcctcagcattcttcccaggtccaggctcatctcctgcagcatcagctagaagctccaagaatgctgctgttaccggcgaattgccggagaatttgagtgtccgtggcattgtcgcaaagcctaacccacctcctgcagccatgcaagtaaaggcacaggctcaaacccttcccaaggttaatggtacgaaggttaacctcaagacggtgaagcctgacatggaggaaacggtgccttacagtgctccaaagacgttctataaccaactgccggattggagcatgcttcttgcggctattacaaccatcttccttgccgcagagaagcagtggacactgcttgattggaagccaaagaaacctgacatgcttgttgacacatttggctttggtaggattatccaggacggtatggtgtttaggcagaacttcatgattcggtcctacgagattggtgctgatcgtacagcttctatagagacattgatgaatcatttacaggaaacagctcttaaccatgtgaggactgctggtcttcttggagatggttttggggctacaccggagatgagcaaacggaacttgatatgggttgtcagcaaaatccagcttcttgttgagcaataccccgcatggggagatacggttcaagttgacacatgggttgctgctgctggcaaaaatggcatgcgtcgagactggcatgttcgtgactacaactctggccgaacaatcttgagagctacaagtgtttgggtgatgatgcacaagaaaactagaagactttcaaaaatgccagatgaagttagagctgaaataggcccatatttcaatgaccgttcagctataacagaggagcagagtgaaaagttagccaagacaggaaataaagttggtgatgatgctacagagcaattcataagaaaggggctcactcctagatggggtgacctcgatgtcaatcagcatgtgaacaatgttaaatatattgggtggatccttgagagtgctccaatttcagtactggagaagcatgagcttgcaagcatgaccctggattacaggaaggagtgtggtcgagacagcgtgctgcaatcacttaccaccgtgtcaggggaatgcaccagcattggcgccgacaagcaggcttctgccatccagtgcgaccatcttcttcagcttgagtcaggagctgatattgtgaaggcacacacagagtggcgaccaaagcgatcgcacgcagcagctgagaacgcgtaaacaaacaaaccgacgaaaatctgtgggagggagaatatcaaacttcccttgcctctgttgccctgaagcttatcttgaagtgtgagttgtattctgtaaaaaattagtagtttccatagtgtgaggttggaggggaggtgttggtgcttgcctactgtacctgctacatctattatttcttgattctttgttcgcttttttttttcttttttgtttttaacccctgtggagataagacaggttttgaagtgtggaagaggttgtttcaatcgtctaattgattcaactattcagc

SEQ ID NO: 18135 - DNA, 2504 bp, Oryza sativa
  ref <308>: DATABASE ACCESSION NUMBER: AK099060
  ref <309>: DATABASE ENTRY DATE: 2002-08-28
tttccgatcttcttcttcttcccccaaaaatctaattaaaatcccctcccccaaaaacccctctcacccgaatttcctcatggactcggtgccggccgccggagtcggcgtcggcggcggcggcgcgggcgcgggctacccgtagtccacggagtcatccccacgcagccggggcggcgactcgtgggacgagcccttcccttcctccgccgcggcggcggccgcggctgccgggggagggaggctccgcctcatgtgcagcttcggcgggcggatcgtgccgcgccccacggacaagtcgctgtgctacctcggcggggagacccggatcgtggccgtcgagcggaacgcctcgctggccgacgtccacgcgcggctctcccgctcgctcctcggcggccagccgtttactctcaagtaccagctccccaacgaggacctcgactcgctcatctcggtctccaccgacgaggacctcgataacctcgtcgacgagtacgaccgcatcgccgccacctcctccggcggcggctcctcccgcacgtcgcggatccgcctcttcctcttcccggccaagcccgagtcatcctcctccctcggctccctcctcgacgactcctccaagtccgagtcatggttcgtcgacgccctcaacagcgccatctccggctccctcgacggcatcccgcgcgggatctccaccgactccgcctcagtcaactgcctcctcggcctcgaggacgactcctccacgcactcccgcggcggcccgcctaactcttctcccgccgaggaacagcgcgccaaccagcagaagctcgccgcggccgcggccgttgctgcggcgaggcacccgcacgacgtgcagtccgtgccggactcgccgatgattgacaagaactcctcgttcggatcaacgtcctctgcgccatcgctgtcgaatctaccgccgatacgggtgcggcccgaggatcgcccgccggatagccgactcgccccgcaggttcccgttgaggatcacttcgcccagatggggatctccgatcagccggtgcagcctgtaattgggggatacatgcagccgccgccacaggtgccgatccccaacatggctgtccccagcatctccccctcggatgcgtccagccgagtgttctccgacgatgacaagtcagatcacggcggcggcggaggtcggaagccgcagccacccaagccggaggttccacctgtcgctgaccccaccaacagagccatgtactacaacgatagatcgcctcctgctgaattgaagcgtgacatgccggttggaactgatgctgccagctatcgtgtgcctgtgccagcccaagatgctgctgccgccgccgccgctgcggctgctgctgcccagcaacccccagctgggtatgtgtatgcacagatgcatgcgccgccaccgcagcagcaacccccaccaccacagcagcaacagccagtcccacagcaatatgtcactgcacaaaatcagcatttcattcacaatccagctactggcacattcatcccaatccaatcctattaccaccatccggtccctcagcaagcaccacagccgcccatgccgcagcctgtgccacagccacaacaatcacacgctttcgacccaaatactggcatgtattacattcccatgcgcacgaatgcgcctcaggcatatagcatgcctcctggtgccgctgctgtgccgcctcccacccttgttgacactacaccaaaaccaaccgtgccaattcctcagatggccgtgaagcagcctgaactgcagcaacctggtttgtaccgaactaccgcagcacctacccctgtaccagcgtctaatgctcctgcgtatgctgggatgggctaccaccatgttattcaaacacaccatcatccagcgccacagcctgcagcgactgtggcaggcaattttggatatgactatggtgatcccacgcgagcacaggtcttctactcgcaggcagcggcaccaccaacattgccacctcagtatcagcccatgggctcgcccgatgctggccaggctgacctgaaacaggcccgggcttcatagctcaaggatttgtgaactctggtatgttgagaatcctagaagtgtagttatcctgccgttaattatcactattgttattacatgttacatgagtcagttggcaaccagtggatggatgatggcattaggcagctgtgcatttgggatcaaaataagatgaaaatgggatggtagttcttgtgttgggtgaaactcaagagggtgtttgtgattggttctggagatgccaatcgccaatgctggagcaagtggcggggagtggcttccaattccaattgccgtcttcttattttttaaaaaaataaatatatagtgtctaaagaactcggtacaaattctgaatcaagaactcatcatttgtgtagccctttgtatatttgaacctggaagttattgaggttgaaatgtc

SEQ ID NO: 18136 - DNA, 2544 bp, Oryza sativa
  ref <308>: DATABASE ACCESSION NUMBER: AK068544
  ref <309>: DATABASE ENTRY DATE: 2001-12-06
gcccggccgcgcgaaatatcacgccaccgccgccgccgccgccgcgaacgccatggccacgggcatgctgctccgcggcctccgctcggcggcgagccggacgagccctgtcttcccgacctccgcctcgtccccggcgccctacgtctcgccgctcctccgccgcctctactcggccgccgccgcgtcggcagccgcctccccggccctggggcccggaggcgccctcgacccgtcccgcatccgcaacgtggcggtgatagcccacgtcgaccacgggaagacgacgctgatggaccggctcctgcggcagtgcggcgccgacatcccacacgagcgcgccatggactccatcagcctcgagcgcgagcgcggcatcaccattgcctccaaggtcacttctgtctcttggaaggagaacgaactcaacatggttgatacacctggtcacgctgattttggtggcgaagtcgagagagttgttggaatggttgaaggggcggtcttggttgttgatgctggggagggacctttagcgcagaccaagtttgtactttcaaaggctttgaagtatggcttgcgcccaattctccttctcaacaaggttgacaggccatcagtttcggaagagacctgcaatgaagtagagagcttggtgtttgatctatttgcaaatcttggtgctacagaagaacagttagacttcccagttctttatgcatcggctaaagaaggctgggcttctctagaattcaccaagagccctcctgataatgcgaaaaatatgtctgcattgcttgattccattttacagcatgtgccttctccaaaagctgaccttgaggctccattccaaatgttggtttccatgatggaacgcgatttttatctaggacgaatactgactggacgagtaagatctggggttgtccgtgttggtgacaaagtgcatggtcttcgtagcacagatgatggtgttcagaagatcgaagatggaaaggttgtcaagctcatgaaaaagaaaggaacaagtatggtaatagtagaggctgcaggagctggcgacataatttcaatggctggattggctgctccagcaattgggcatactgtgtcaaattcagatattttgactgcccttcctacaattgagttggaccctcccacaatatctatgacttttggtgtgaatgattcaccactgtctggccgcgatggcactcatctaactggagcgaaaataggcaaccgcctaatggcagaagcagaaacgaacctggcaattaatgttcttcctggaccattatcagaatcttatgaagttcaaggaaggggagaacttcagttaggaatctttattgagaatatgcgccgcgaaggatttgagctttcagtttcacccccaaaagtgatgtatagaacagaccgtggagaaaggttagagcctattgaagaagtaactgttgaggtagacgaggagcatgttggatttgtcatggaaaccctgacacacaggaagggtgaagtaatggacatgggccctgttccagggacaactgggagaactcggatctttttgacctgcccatctaggggtttggtgggattcaaaggaatattcagcagctttacacgtggaactgggtttatgcatcgcgctttccaggcatatgctaaatacagaggtcagctgggcaatgttagaaaaggagttctggtatctgtcggcaagggacttatcacttcacatgcacttatgagtttagaagctcgtggtattctgtttgtttctcctgggatggaggcgtacgaaggcatgattgttggagagcactcacgtgacagtgatcttgatatcaatcctgtgagaactaaagaacttacaaacattcgagctccaggaaaggatgaaaatgtcaggctttctccaccacgattgatgagtttggaagaggcaattggatatgttgctgcagatgagcttattgaggttactcccaaggtcattcggcttcggaagaaatatctggatgccacgaaacgtaagatgatgaaaaacaaaccaatggattggagcttcagtgacactaaacgaagttttgtgagtgctgctacattagtctataataatccaaaaggcgcagatgcatcctatttatgtataggttggcggatagctttttcaagtgctgccagcgttcctcaccatgacccagcatgaaaattttattcagccgtgggatgataatgattcacggcatgctaagaacgaataagcccgtgattggagctactgctataacagaaatacagaacagggtgggtgggctggtaacatggattacctctggaaggcgattataccttttgatagcctttttacagtaattgttggaacgaccatagatattgcccttgaaggtcatagtattcttttctagttgagtgctgaaaaaatgacagctatagtctcttttgatgctggttgtttttgttcacatttgtatgggcatgtgttactgagagatgaaaggaaatcatttg

SEQ ID NO: 18137 - DNA, 1275 bp, Oryza sativa
  ref <308>: DATABASE ACCESSION NUMBER: AK068545
  ref <309>: DATABASE ENTRY DATE: 2001-12-06
gagagagagagagagagggccgcggccacacgacacaggtattataattaggtaagtgaggaccgaggagacaagatggtgcagaaggagctttcccaggcatggtggttcgacagccacaaccttgcaaggacatctccatggctaaccaacacgctttcagaactagatgacaagaccaagcaaatgctcaagatgatcgaccaggacgccgactcgtttgcgcagcgagccgagatgtattacaagaagcgccccgtcctggtggacatgctcggcgacctgtaccgaacacaccgctcgctggcagagcagcttgatctcctcaagaacggcaatggcacacgccacaccgtgttcgggccatcctcctgcacccagagctggtctcatcaggcagcagcagcagcaatgggtggcaagggaacaacagggagcaggtcttcgatctcactctgctcagacaactacgactctgaatctgaagtcgatgaccctgaacaagaaaacatggaggaggaactgtctgaatccgaggacatgatgaaacatccttcacaaagccaagcggatcaagcagcgcagctagagctgatgcacgcggagatcgagatgctcaaggagaagaacgcggagctgcagaaagcaagtgcagagaatgagatgctcaagcagaagaacgaggagctgcagagagtgagcgaggagaacatggccctgaaggcggagctcgcggcgaaagacgaggagaagagggaggtgatcaggcagctcgcgtcgtcgttcgacatcgtcaagaaggagaatttcaccttgcgggagtacatcatcaagaactcaaagaactcctcctcctcctctcgtggcttcgatttcaagaagctgaccaaggacctgttcactgcgaagctcttcacagctcactgcaaggctactacaggtccaatggttgctctatgagctcggtgcagctgatgaactatttcagagagaaaacggcgtgcacaccatcctcctgacaaaccattagatccatgagaattgttgtagctcatgtgcatatagatagatactataagcatgtgccccctccctccctgtctgtctgtttgttctattcttattcaggtttagacagtagaggattcgttttgactgtccctgtgaaatacccatgtgcatcagtacttactgcagtagaagaattagccgtatgaatgtttgtatgatatgattgtgttaattatagtagagattttgggtcatgtttacatc

SEQ ID NO: 18138 - DNA, 796 bp, Oryza sativa
  ref <308>: DATABASE ACCESSION NUMBER: AK068546
  ref <309>: DATABASE ENTRY DATE: 2001-12-06
gggattggcccagctgttttgtccgctcggtttccgaccattcgttccgcttcgggcggcgcgaggcgaggataatggcggcagcgcacgcgcacccgctctccctcgccgtcctcccgtcgtccccggctcaggcgacgccgctgccgctcttcctgaggtacgctgctctccgtcgcggtgggagatgcggcggagcgacgaggccgctgcggctcacgaggctgcgccgcggccgagcggcggtggcggcggcgggggaagttgacgcgcccatggagcagaccgaggccatgatgagggtggcggcggatgacgacagcgtcaccgccaccgtggtgtccgtgctcctgaccgtcgcgttcgtcgggctctccatcctcaccatcggggtgatctacctgtcggttaccgacttcctgcagaagagggagagggagaagtttgagagggaggaggccgagaggcagaaagaggaagcgaggaagaagagggccaaggcgaggggaaggaaaagaaagttctgaacttctgattgctgatcgatattcgacatgtgactttgcattggcttgatgccattataaagagtgatagtccttttctccataagttgttcgaattaatatcatttcttatcaatttttcttattatgaattgtgagaagctgtactagaagtgcctcgtaaattctgtatcatgaattcacgattgaattgtcttgtcaacatggtgcatttcaatggtcaacatggtgcatttcaatgcaaataaaacaatagcatgttcttggtc

SEQ ID NO: 18139 - DNA, 2372 bp, Oryza sativa
  ref <308>: DATABASE ACCESSION NUMBER: AK068547
  ref <309>: DATABASE ENTRY DATE: 2001-12-06
ggctcccagacccgcgtcctctctccgtccgcggtccgcccgaaattttctccgacggcggcgcctccgcccacgatctcgcgcatccctccccctctcgccctcccaggaccgcacctcaccgccgccgccgctcgcgataagccgtcgctgccgattcctcccgatccctcagcccaccgccgccacccgatccctcaacccaccgccgccagtgagccgtgcgcaccttcttctccggccgaggcgtgcagtcgcgccgccgtccctccgccttgctgatctcctccggcaacgcgcggccgcctcaagcaccacccgccgtctctccgaatcgcactcacgcggtccctttgtcgttggaagaatgcttagttgtctgggacaacaagctaaattggataaggcagggacatcaatttccacctcgccgatcttgcggcgccgttgataccgtagaacgtctatttcacctgcgctgcccatgttgtcatccacgaccacactgcatctccgtcctcgacctccgcctgtcactgacgaccatccaggaaagtctccctcgcagcgaatttatgtttaccagttacatgtttcagtttataactacaagtactaaatgatgctgttctagacaatttatgtttcagtatgttgtacttcaatacgtttttctgaaaatgtcaagtaggaaacattccttccctcagaaatcacagagaatttgttcgaaagtgactgaaagagagagttgaaaataagaatgaatctattcttgctgattattattttacattggccacatgtatgtcaaaaggggaagtatgggatcagataattcaacatgtatatatttacagtattttcactgttacactgtactccattatttttgtttatctggtgattgattatcaacattgttgttgagaactacagaaggggaacaaaggtttgtcttttcttttctttcttgagagcagtttaattccagcaggggctctagaagtttgcagctcgatctcgtctgcagcccatcaggttctaattcatgagttttagatttgtttagtggagtataaaacttcatttcttcaggcaaaatgatcaaaatagccgcattgtcttgctggtgtacttagatagttcgatgcacttcctggaactctgtaaaagggaaacatgtcgtaccagtacatgattgtttttgtttatttcacaactatttaaagaaagttggtggattttcttctgtattttttggtggaatgagaactttgacctagctgtctgaaaatatcttctcattgcttgtgagtcaaaataatggcattacagttcaaccattttggatgcaaaatttaattagatgataacagaaatattcctgctcaggataactaaaatttcatattatagtgataacgatgctgaaatttcttatatcaacggagtaagtagtgtgcctgttgtttgtctgtttttgccttactttcctgaaatatactcatgcgaaacaacagataattctgatatattgctctataatcataatatgtctgcactaccatggatgaataaattgagtttaggttttttattgcaaccttgtatcttgcatgagtggtgttttttattaacaagatattttggatcctttttgtgcgtgagaagagatacagcggccatatgattttcaactactcttatacgggactgctactcttatgcacaccatgtttattatatatttacctccagcatagtgatagatccaatttttatcttgaatggtgcttcaagcaccgtatatgtggggttactttttggcccttatttttttaaatcttccttcctcttttctttgtataaaaatataagatgcggctcgaaatgtattgttttttatatggtcatcggcctgtccttgtttggtttcatatatgagcttttctcctccaacatcttattatgtatggcatttccaataactttttgcaatgtcatctcgatggcttgcatatatatgatattgacgggaagggcctgtaactatagggggtaccatgattgtgttggattgctttgacctttacagaacattatttttcaagaaaaagaaatatagctgtattttgatatcatcttttcttgtattgcaggttctatattccgtaactcgccgcgtttggtgtctacgtttggactatatcttactgatttacattaggggctaactggtgttcaatttttcatttcattcctacctctaaagataggtactgtggcatggaagatacatgtttctgtgcaagctaaatcacacttatgcataaatgcatggttaattactttatctcctcggttaatct

SEQ ID NO: 18140 - DNA, 1784 bp, Oryza sativa
  ref <308>: DATABASE ACCESSION NUMBER: AK068548
  ref <309>: DATABASE ENTRY DATE: 2001-12-06
gatcgaactcaacaagccaaccaagaagaggagaggagaagagaggagtcaagaaacgcaaaaggttatcaacagtaagtactcattgaagtatcacttcttcaggagtagtatgggtattgaaattgtacctcaatccttcaatgaggagctggattctactgttactatcactcctgctagtgacaacatagatgtgtctgatgatacaagtgttcctcatccatcagaagtgcctgccacagtaaatgttgttctagttgagcaatctgataattcaatctctgaacctttggaatctgatggagccaatggagctacagaaaatgttgttcccttggcaagtgagaagtctactgacaacaatgatgctatgaattcagagccagtgaattcagaaccatatgaagcatctcctgctaataatgctgaaaagggagatgtgatgcagcagagtgatgagaacaatggtgataaacaggaaaatcaggatctgttgtctccaatggcagaaacagcaggaagtgacagtacctcagtcacatcgatggaagatgttcaagaagcaaaggatgctgctccatcagagacagatgatgctactggccaccctcctgatctgtcaaatgacaaagcttgtgctggaaatggaaatggaaatgtcttccaaaatgcaaagtgtgtcttgacaacttcgacaaagaagatgaagagaagtgcatctgcaactacaaggaagtcactgcaagctactaatactgacgaagggaatgcttctactctcaccaactcgaaatcatcaaatggaaggaccacaacagttccagcaggcccagttttcagatgtactgaacgtgccgagaagcgcagagaattttacatgaagttggaggagaagcaccaagctttggaggaagagaagattcagttggaggcaaaattgaagaaagaacaagaggaagcactgaagctgctgaggaagagcctgacgttcaaggccacaccaatgccaagcttctaccacgaggctccttctcccaaggctgaatacaagaagctgccgacgacgcggcccaagtcgccaaagctggggaggaggaaggcctcgacggcggcggacgcctccaactcgtcggaggagagcgacagcacgccgcggccgtgctgccgcgccagccgcgacagcctcgacagcatctgcaaatgcagcagcagcagcagaaacggcaagccgcagcaacctgcaaccgcgaagccggcagcctccaagaagcagcccaagccacacgcccacaagctctccgaccagagcgccatgaacatcgccgtccactagctgcttctctctctgtctctctctttcttgcttggctgcatggatcaatcatggaggaaggaaccaaccacccaattcaggaggaaaaagaatcgagttcttgttttttttcttcttcttcttctctaagtaattattgggagtgatatgatgggcttctgcaatcttcaatcatgtggtattggtgtagataataagttatgatgatgatgatgcacaagagggtttgtgtgagactgcctgccatgggtgaagttcagaagtgatgttttatttttaatttatgctgattttcactttgtttattttggggatgtgagaatggcatgtgtcagtcataacttctttttcttaatttatgtgatgtgggtgttcttgatgtaatttatgtatttatatataatgtatatactcacaatgcaaacagaaggctttgttgttggtggtg

SEQ ID NO: 18141 - DNA, 1352 bp, Oryza sativa
  ref <308>: DATABASE ACCESSION NUMBER: AK068549
  ref <309>: DATABASE ENTRY DATE: 2001-12-06
ggttggaagaagaagaggaagtggttgcgccgacgacgaggtgagcgggttgacggaggaggaggcagcgcgcgccggcttcgggtgtcgttgtccctgctcgccaggtgctcgttgctcctccagactgcagctagcgtgacgagaaacatcttcttgagacgatatcagaaggttgtcgctgacatactgctgagcagaaaaccagcacccatcggcttagtacctgtctgctctgctgtctcagcctctcaggttgcaaaccccatatcccagagctcgacgccacccatgtggtttttcaacttcaaccgaaatggcccctctggcttctccggcgcctccaccgccgaggaggtcaccgccggcgtcgacgcccggggcttggccgccgtcgtcacaggcgcgtcgagcggcatcgggctggagacgacgcgcgtgttggcgctgcgcggcgtgcgcgtcgtcatggccgtgcgcaacgtcgccgccgggcacaaggcccgcgaggcgatccgggcggagatccacggcgccatagtccatgtgctggagatggacctcagctccatggattcggtgaggaggtttgcctccgagtttgactctctgaacctacctctcaacatactcatcaataacgctggaatcctgtccaaggactgcatacgctccattgacggcctagaattgcattttgcaactaatcacattggccattttcttctaacgaatcttttactggagaacatgaagagcacaagtaggacaactggtgtcgaaggaaggatcataaatgtgtcgtcttcggggcacattttgacctatcctgaagggatatgtttcgatagtgtaaaagatctttcgagattctccacttatattgcttacggccagtccaagcttgccaacattttgcactctaccgagcttgcacgaattctgaagggagatggtgtgaacatttcagcaaatgcgatccatcccggttttgttggaaccaacctattcaagaactggactatggctaatgctgtggtgaacaccattggaagaatcgtatgtaaaactgtagaacagggtgctgcaacgacatgttatgtggcattacatcctcaagttactggaataagtgggaagtacttcagcaactgcaatttagagaccccaagctcacaggcttcaaatgcagagttggccaagaaactatgggaatttagctccaacattgtgtcggctgccaaactgtagtttgagttattcatatatgcatgcgctacattttatttcgtgtaagccgaacataaaattttcatagaaagtctacaaataaagagagtgtagttcctccc

SEQ ID NO: 18142 - DNA, 2027 bp, Oryza sativa
  ref <308>: DATABASE ACCESSION NUMBER: AK068550
  ref <309>: DATABASE ENTRY DATE: 2001-12-06
ggcgcggcgcgggaggggatttgttcgtggatcgtgcctccgatcggcgggagttggatcgggggcgtggtggcattgggggtgagacgggatggtgagcggcaacctcttccactgccggaggaactcgtggccggccgaggagtacgtcggccgaaccgccctgcagttgttggacttcgacggcgggtcgcctccggagcaggcatggcggcggcgtctgaacagccacgccaacttactcaaggaattcagcgtcaccttcatggaagcaatgaggatgatgagccttggcctgaggctatggtcgtatgtccgagaggaggcttctcatggaaggaaagctccaattgatccgtttaccaaagagaaatgtaagccgtctgcttcgcagggcgtaccgcttggagtggtagcatttcaagaggtttcaggggagagttcaagaattggcatatcattcctggtttatgtgagacttccccggtcatggagaaccagttttcaatatttgtatctcgcgatggggggaacaaaaagtactcatcggtattgtctcccggacaccatgaaggtttaaagaaatgtaatgactctggaacttgagcggtcaacattctacctatcatgctttatttcctagggcatggactgtttatgatggtgaaccggatccagaccttaaaatctcatgtcgtcagatatcaccattcattcctcatgattacaaagatagcagcctcccaacttctgtctttgtgtacactctagtgaacactgggaaagaccgtgcgaaagtgagcctgttaatgacatgggcgaattctatcggaggtttttctcatcactctggaggccattttaatgagcccttcattgcggaggatggagtttcaggagttcttctgcatcacaagcaaaacagcaaaggataatcctccggttacttttgctattgctgcctgtgaaactcagaatgtgaatgtgacagtcttgcctgtatttggcctctctggagaaggccatgattcagccaagcaaatgtgggatagaatgaaacagaacggccactttgaccgtgaaaatttcgaagctggtaccagtatgccttcatcttcaggggagacactttgtgcagctgtctcagcatcaacctgggtagagccacatggtagatgtactgttgtatttggtttggcttggtcctctcctaaaataaagtttcagaagggctgcacatacaacaggaggtacactgaattttatggaacttctgaaagatcagctgttaatttggtacacgatgccttgacaaaatataggatttgggaagaggagattgagaagtggcaaaaccccatactcaagaatgaaaaacttccagaatggtacaagttcacactttttaatgagctttactttctggtagctgggggtactgtttggacagatggccaaccaccagttatcgatgaaaaaccaagtcctggttctaatcaacagaaatcttcaaaaaggggcactagagacactaaacaggaatcagttaaagataaccatgtcaaactgacagcagagcaagtcactaatggtggtgacctggctaatggcgaagagcaaagtgtgtcaaagtatgcagcagtacatggaccacaaatggctaaggcaaccaacggacttgggtcacaagagccaattccatacttgctttccaagaatggccctgaaaatgttggcaaatttttgtacctggaaggagtggaatacatcatgtggtgcacctatgatgtgcatttctatgcttcttttgctctgcttgatctgtttcccaaaatagagttgagtatccaacgtgattttgccaatgctgttctctatgaagacagacgaagaatgaaatttttggctgatggtacttctggaattcgcaaggtcaaaggtgccgttccgcatgacctaggaacacatgatccatggcatgaaatgaatgcgtacaacatacatgatacaagcaaatggaaagatct

SEQ ID NO: 18143 - DNA, 860 bp, Oryza sativa
  ref <308>: DATABASE ACCESSION NUMBER: AK068551
  ref <309>: DATABASE ENTRY DATE: 2001-12-06
gagttccataccctccccgttgcctcgcctaaacccatcaccccacgccaccacctcgccaccgccgccgccgccgccgccgacgaagacgacgatgaaggtggtgcggaacctcgacctggagcggtacatggggcggtggtacgagatcgcgtgcttcccgtcgcggttccagcccagggacggcaccaacacgcgcgccacctacacgctcgccggcgacggcgccgtgaaggtgctcaacgagacgtggaccgacggccgccgcggccacatcgagggcaccgcctaccgcgccgacccggtcagcgacgaggccaagctcaaggtcaagttctacgtgcccccgttcctccccatcttccccgtcgtcggcgactactgggtgctccacgtcgacgacgcctactcctacgcgctcgtcggccagccctccctcaactacctctggatcttgtgcaggcagccgcacatggacgaggaggtgtacggccagctggtggagagggccaaggaggaggggtacgacgtgagcaagctgaagaagacggcgcacccggacccgccgccggagaccgagcagagcgccggcgaccgcggggtgtggtggatcaagtccctcttcggcaggtaggtaggtggtcgtgccagctgccatgccgtccagactccagagcttgatgccaccatgatcgtgtacattattattgcttcagttcaaaggctagttggtgaattctgttcaactcgtcggcctcggggaatcccccaagctgtgaacctgttcgttttctggattagtgtttaatgtgtccgttttgtgatgaattgtggatatctgcaaagactattgtgagttc

SEQ ID NO: 18144 - DNA, 3289 bp, Oryza sativa
  ref <308>: DATABASE ACCESSION NUMBER: AK068552
  ref <309>: DATABASE ENTRY DATE: 2001-12-06
gagagcacctgaacggaaatctcccccatatggtccggtcccgatcatctttctgaagactgtaggcgctgccgctgacccggacggcgcggtctccggcggtcgattcgccgccacgcaacgcaaccctccctccctccctccgccgccggtcaaacctccgccccgccgccccccacccgagcagcggctcacgcacacacatcctcctcaccaacccacccgcaccgccgctgacgcgtgggcccccgagcccacctgccagcagaggccggtggcgccaacgatatactagtataaaatatattcagctcgtcggcgtcgtcgtttaccagtcgcctcgcctctcggcgtcccggtcgtcggtctccgctgcctctctctcttctctcttgccctactctactactactaccagcagcacacggtttccgtgaccggagcgcgcagcagccgcccacctaaaggctaaagatccgatcaaatcgaagagacttaataccttctttttttttcttgagaggaatatttttttttcgctttaccatttcttcgtccctgggggattttcggggggattctgaggagcaagaagcattcggccgcggcgggggtccggcgctaagctcgagagattcttctccgtttggattgcacttgtcagagtaaaagggctaaggacactatgctaatttaagacatctcatccaaatgaggcgcaccacacttctttgttggcaaactgaaatcagatagcattctggtagccactaaacctacagggatgtttcttgtgtgttttgaagccatgtgcccctgttttggttcaagaaggaaggatgggagcgaagaccctgttcttggaagggatggaaattccttgaattcttctgagctgaggtcaatgtctgatagagttcctccaagccctcttcgagtacctgcaagtccatctagattttcattgtcttcatcaccaagtagaaatgagccattgaacctgagtcttgaacaagttattaaactgacacataactttgcaccagacctgatgattggtgaaggttattttggaaaggtctacagagcacagctgcgagatggccacattgtggcaattaaaagggcaaaaatggtaggttttattttttatttttatttttttaataaaaagcagtgttggcgcaatgatagtggctgtcaacaagcagctatactagagatttctctatttagaatgactgaggtgttttttttcaagtagtctcgctggttgatccatttttgtgtagatcagtacggtaatgaaacagtaatgcactggtaaagcatgtactcacattgcattctttgcaccagtagttgtggatagttattataatttggtgtttttcaccgcttgatcttgttggtcactagtcaaatttcttttgcaatttatatttattcaaaaggtcctgataaagtattaaagttgctgatagaaactctgcttcctacatgtgatttttcttacaagtgaatcgcagttttcatccggtttctttatgcaggaacattttgcctctttacgggccgaattcagtaatgaaattgcattactaaaaaaaattgaacacaggaatttggtccaattacttggttatatcgacaaaagaaatgaacgaatcgtcataactgagtatgttccaaacggcactcttagggagcatctagatggtcaacgtgggcttgttttaagctttaatcagcggcttgaaatagctatagatgttgctcatgggttaacttatttgcatctatatgcaggtatgctttgtcacatgtttctgttgctgagcataaaaacagtttaaaaaaacaactgactgttatttttatttttatttttataccaagtcatgcatcggggtattgtcactaagtaatgcaagaactgtaaaccagtattttaactatattttccccctctaaaggttggtccattggctcataatctgctaataaatgctagtatcagatatcctgactgtaatgttctgtagttcggaaattgtttgtggctgtgcatcaataaaggttgtgaaatgagcctaacaaccaagttgaataaaccatgaaaattagccatgtaatcagatgtgtatctgattttaattctttgatcttcaagctttaaagtagcttacagagattctagtttgactattcctattggcaatttgcatatgtattttatttatttgttctgtacttttatgcttttagagaagcccataatacacagggatgtgaagtcatcaaacattctactaaatgaaggcttcagggccaaagtggccgactttggatttgcaaggactggtcctacagagccagaccagtcacagattcagactgatgtgagaggaacagctggctatgtagatccagagtatctcaggacaaaccatctgacagtcaagagtgatgtattctcttatggagttttgctcctggaaattctttctggtcgtcgtcctattgaggtcaggagagctgcaagagaaaggatcaccgtgagatgggccttcgagaaatacaacagaggtgatgttaaggaaatattggatccaatgttgaccgagtcagtaaatgaggatatactgaataagattttcgatgtagcattccaatgtgttgctcctactcgtgctgacaggccaacaatgaaagaagttgcagagaggctgtggaagataagaagggattatgcaaaaacccaacgcagagcagaaatggctctgtaaaccatctgatcctagcttctgcttttactcgagagagcatttggtgaactcaccagtgtccagcaaagatccacaaaaacaagttcagttttgcgaatcgggacaactaaaatctatacatggttgcaggattattatatgcgctgtacatggacttgcatgtttaaaagatcaatatgatgtacaccgacatgtgaatcgaagttttccccatatagcctttttgctctatccaagctttcagtaatttgtgtctcaaggaagtgtgaatggtcttgttttgaagcctttcaacactcaacagttcttgatacagctttccgttcttgtgtatattttgctggtcctcctagtggtacagctgatctttttgtcatgttcagtgttgctcatgatgtgaggtgtttttaagtgtaattatggcttttgggatgctatgttgtattcgtgtgctgtaaccagatcttaaggcaatggatgtgcattaattgtgatttttt

SEQ ID NO: 18145 - DNA, 1998 bp, Oryza sativa
  ref <308>: DATABASE ACCESSION NUMBER: AK068553
  ref <309>: DATABASE ENTRY DATE: 2001-12-06
gaggggttcgcggcgctgttgctggctgaccccaccaaacttagcgagggggaagggagaacgggggtgaacagcgcgacggacgacggttagcgagcgagcgacgacgcaacggaagaagaaaaagaggaggacacggcggcgcacgggagggaggaaagaagaggaggacgacgacgcgcgcgcgcgcgcgccaatccggaggcgccaccaccggttcgtcgtccctcccccctccttcctcctgttcctcttcttgtgaggccgccaggaagagggataggagaggaggcggaggcggcgcgacctgacccgtcgcgcgccagcagcggttgcgacggcgtcggcggcgtggttgtgtagatagattggtttggtttggttgccggggaagagagagagagaagagagaggggatggcgaggttcatcctgagcctgctggagctcggcgtcagcgcgacggtgcacctgctcttcgggctctacgtcttcagcacggccgtcgcggcggacatctcgcaggcggcggcggcctcggggtgcctgctgctgcgccgcccggcggcgccggggctcgtcaacgtcgccgcggccggggaggaggaggagcggaggggcgccgcgcccgtcgtgctcgacggctcgcctccgcccatcgtcctcgtccacggcatcttcggcttcgggaaagggaggctcggcgggctctcctacttcgccggcgccgagaagaaggacgaccgcgtgctcgtgccggatttggggtccctcaccagcatccatgacagggcgcgcgagctgttctactacctcaaaggagggcaggtggattatggcgaggagcacagcaaggttttcgggcacacgcggttcgggaggacgtatgacacaggacattacccggtctgggacgagcaaaacccggtgcactttgtcgggcactcggccggcgtgcaggttgtgagggtgctgcatcagatgcttgccgataaggctttccctggacatgatacttctgaagactgggttcttagccttacttccttgtcgggtgcgcttaatggaaccactagaacttactatgatggcatgctggctgaagacggaagatccatgaaatcaatctgtcttcttcagctctgccggattggagttatcgtctatgattggctagacattccttggctgaagaattactacaattttggttttgaccactttgagatgtcatggaggaaagtgggcctctcaggtctaattgatctgttgctggggcacactggcccatttgcctcaggagattggattctgcctgatcttacgattcaaggatctctaacacttaactctacattgaggaccttcccaaatacattctacttcagttatgctacgaagagaacaagaaagctttttggaattacagtgccttcaagcgtccttggaattcaccccatgctcttcctccgagtcctccaaatgtgtatgtggaggcaccctcaaaatgcacctctaccttacaaaggatacagggatgaagattgggaagataatgatggggctttgaacacaatctccatgacgcaccctcgcattcctacagagcatccaaaccgtttggtagtggatgattctgattgccatcctttgcagcctgggatatggtattacaagataattgaggctgatcacattcttttcattgtaaatcgtgaaagagccggagtgcagtttgatttgctgtatgatggcattttccaacggtgcagaaagcacgcatttaggaggagcccccctactgtaccaaatgaatcgagtcaaagtcaatagcagactacaccaaaaatgaaatctatctagaaagtagaatggaaggaaaaaaaggaatcacgacggtttttctgcttctctttcgcccccggcaaccatgtagatgtaaacaacattgtaaactgtaaattacattattcatttgactatgtgaggagcattgcat

SEQ ID NO: 18146 - DNA, 1782 bp, Oryza sativa
  ref <308>: DATABASE ACCESSION NUMBER: AK068554
  ref <309>: DATABASE ENTRY DATE: 2001-12-06
gtggtgcagctgagacccaaccaaaagctgcttccttttcttcttcttgggattgggatcccccccccctcccttcctcggctccgtttcttgccatggccgaaatggcagtcaccgccgccctccggccctgctccggcgtctcgccggcggtgtccgggaccagccaccgccgccgccgccccgccgcgtggcgggctctcgcgccgccgccgccgcacgctgggctgaggctgtcctctcctgctgtcagggttcctagagctgcttcctctgcggctgtcgaggtagatagcatagcttacagaaaaacattggatgaacttccatgttcaactgcatatactttggttagcaggatgggagctctagcaacactgacacagttcctaccccgaaagttataatagatcaagactcagatccggatgcgaccattgtagagataactttgggtgaccgtctcggtgatcttcttgataccatgaatgccctgaagaatttagggctaaatgttgtgaaagctagcgtctgcctcgattctactggcaagcatattaagttagctataacaaaattgtcgactggtcgcaaaattggtgaaccagagttgttagaagcagtacggctgacaattataaacaacatgattcagtaccacccagaagctagcagccaattggctctgggtgcaacttttggtccagagccccctacagaactggttgatgtggacatagcaacccacatagacatatatgatgatggccctgacagaaggtatgacttgtgtcttgccttatgctttattcctcaaattgttaggaaaattcacatttttttttaccatcagaacaacatgctattagattggaagatagactgctcctctctggttaaggcttatgtcataaaaagggtagctgacccagggggcaggatttagctgtcgattaatgtgtttattactggggaactatgccaattttttctttgaagatttttgagtaacaaaatacagtgcctaaatgccaatgatgttttttttttcttagatctacttaattaagatggtcaatgggatgcaggattactgtatttgtgatgccagtaaaatttcattcatttgtttcatatatttgttccatttcagcttacttgtagtggaaacagctgaccgaccaggtttgttggttgaccttgttaagatcattgatgacatcaacatcaccgtccaatctggagaatttgacactgagggcctactggctaaagcaaaattccatgtcagttataggggtaaaccattgatcaaagccttgcagcaggttcttgctaatagcttgcgctatttcttgaggaggccgacgacagaggagggcagttactaggcagataaatacaggaagccccccaccttcagatactttgtgatacatggatttgataccatcatcaaaattattcttgaaatatgcaaacaatttatcaaaagcttggaggtatacttgatcttatggcttatacaaatttaagctgttcccatttgaaggtaggacatctgctgtattaactgcagaagccttccaagattacatgctagtgcgattctcaagcatgtgacacttgataattttggtatttaggatgcatgtttgatggtaaataagaaagcaagttggggggccatgcatcaactgttctggtgaaatgtagctgtattgttctctccattatctgattaataaagattaccaataaataaatgtggtgaaagatttg

SEQ ID NO: 18147 - DNA, 899 bp, Oryza sativa
  ref <308>: DATABASE ACCESSION NUMBER: AK068555
  ref <309>: DATABASE ENTRY DATE: 2001-12-06
gaacagcactgctactggacatactctactactactagccagtaagctagctaactaactacgtggctatggcccccaccgtgatggcctcctcggccacctccgtggctccattccaagggctcaagtccaccgccgggctccccgtcagccgccgctccaccaactcgggcttcggcaacgtcagcaatggcggaaggatcaagtgcatgcaggtgtggccaattgagggcatcaagaagttcgagaccctatcgtacctgccaccactcaccgtggaggatcttttgaagcagatcgagtacctgcttcgatccaagtgggtgccttgcctcgagttcagcaaggttggattcgtctaccgtgagaaccacaggtctcccgggtactacgatggcaggtattggaccatgtggaagctgcccatgttcggctgcaccgatgccacccaggtgctcaaggagctcgaggaggccaagaaggcctaccccgatgcctttgtccgtatcatcggcttcgacaacgtcaggcaggtgcagttgattagcttcatcgcctacaagcccccaggttgcgaggagtctggtggcaactaagctaagatcaagcatcgcgctggtggattgctgcctataataatagtatgcagctttgttttgggctatgttgatgatatatcaatatataatatgctatatatttttattttacagtttggttatgtaccatctcaatggcctctgctcttaacacatatgtaataatctcttccctccctctccggccggttttattgtaagagtactacaattatcgttgggtgaggatatgtgaaaacaaagctccggctatatgcacacaagatatgtatctagagcatatctgataaattcgtcggc

SEQ ID NO: 18148 - DNA, 3118 bp, Oryza sativa
  ref <308>: DATABASE ACCESSION NUMBER: AK068556
  ref <309>: DATABASE ENTRY DATE: 2001-12-06
ggttctccctcctcctcactcggaaaggaaaagagcgccgccgccgccggcgtgatgcttcccttcgaggagcaggtggtggcggacctcctggaggaccccaacggcggcctggtggtggtttcgtgtggcctcccggtggcctccctggcgtccgccgtcctcctccagctcttccaccaatcccccgacgatggctgcttcctgatcctctccgcccccgagccggtcaaagctcaaatccggcggcgcctcctcctcaactcccagagccagcctcctctcttgcagctgcaggtccacgacgtggcccccgacctccccgcccaccaccgcgtcgccctctacgcctcccgcgccgcgctcttcctctccccccgcgccctcgtcgccgacttcctcacctcccgcctcctcccctcccgcgtccgcgccctcctcctcctctccgcccaccgctcctccgacacctcctccgacgccttcgtggctcgcctcctccgccaccaccacctcctccctgtttatgccttctccgatcgcccccatgccatggtctccggcttcgccaaggcggagcgcgctatgaagagcctctacattcgacgcctccacctttggccccgcttccaccttcttgctgccgctgacctcgagcgctccccgcccgaggtcatcgacgtccgcgtccccatgactcagcctatgaggggcatccaggccgctatcctcgatgccatggacgcctgcctcaaggagctcaggcggaccaacaaggtcgacgtcgaagacctcaccgtcgacaagggcctcttcaagtcttttgatgagatcgtcaggaggcagctcgaccccatctggcacacgctcggcaagaagaccaagcagctcgtcgccgacctcaggacgctacgcaagctgcttgattatcttgtcaggtacgatgctgtgacataccttaagtacctggacacactcagagtatctgaaggcgtccgatctgtttggatatttgctgactcaagccacaagatattcgacctttcaaaaaggcgtgtctaccaggttgtgagagcagacggtacaaaggttgcagcagacaacaagggcacaccaacaaagaagaggaaggtggcacgcgctagcagcaggaaaggaaaagaaactgaaaatgagggttccagtgataacaaggacaatactcagaaggttaatgcagagatgggcattgtagtggaggagattttagaggaagcacctaaatggaaggttttacgggaactattgcaggagatagcagaagaacaggcaaagggagatggtgacaatgtaaaccctgttcatgaagacggaattaacgagagtggcatagttttggtagcatgcaaagatgagcgctcatgcgtgcagctgcaagaatgcatatcaaaaggctcgcatcaggtcatgcgggccgagtgggagaagtacttgcttggcaaagctgaactgcatggattgcataggaagaacaagaaaacatctcagcaactaaaagggtttggtgttctggatggggaagttcctatgaggtctggtgagagtgcaggtcctgttagcattagcaaggttgaggctaatgccttacttgcggctgcctctgaaataagcactgtaactaaggaagcaaatcttgctgatgattcaaatgtcagctgcaagaagagatcattcggaaaagggaaagggaaagggaaatttaagaaaaccatggcaaagagagaagccagtaagttgagaaacagaaatactacagaacatactgatttggaagttgaaggtcaatcaggaaaaacagatgaacaggctgagactgatgcttgtaagttgtctgcagaagatgattctgcatcagctccagctgttgacaaagctgctaacaatttatctgcttttggagactctgtggataccgaaccactacctcctgtgcaattttacgccctagacagtgatcagcatgtacttgatgtatggaaaccttctgtaattatcgtttatcatccagatataacatttgttagagaaattgaagtatacaaggcagaaaatccatcgatgaagttaaaagtttactttcttttttatgaagattctgccgaggtacaaaaatttgagtccagcattcgccgggaaaatgaagcatttgaatctttgatcagacagaagtcgctgatgatgatacctgttgatcagaatggccgttgcattggaccaactcttgcaaatgaaccagaagctcttttatctcaaaattcactaacaagaaaggcaggtggtagaaagccactagagaaggagatgcaggttattgtggacatgagagaattcatgagcagtcttcctaatgtattgcaccagaaaggtattcgaataatacctgttaccttggaagtcggtgactatgttctttctcctttgatctgtgtcgaacgaaaaagtattgcggacttgttccaaagctttgcttctggtcgtctctacaatcagattgaaaccatggttcggtattacaagatcccagtgcttctgatagaattctcacaagacaagagcttttcctttcagtctgcaagtgaaattggggatgatgtatctccgacaaatataatctcaaaactttcattactagtcctgcattttcctcggcttcgcatagtctggtctcgcagcttgcatgccacggcagatatattcctatcactcaaaacaaaccaggatgaacctgatgagagcaaggcaatgagagttggtgtgccctctgaggacggagttgtggagaatgacgtgagggctgaaaattacaatacgtccgcgattgaattcttgaggaggcttcctggtgtgacagattcaaactatagaagaataatggaggaatgcaatagcttagcagagctggccctgcttccggtagagcggctgtctgagttgatgggtactcagaaaggggcacgcatgctcaaggaatttctcgatgccaagtgtccaactatgctctagggctgtgtaatcttgtttgtaattgttgaaaatgatcaataatgaacttattattctacttagtaaaaccgatttt

SEQ ID NO: 18149 - DNA, 4053 bp, Oryza sativa
  ref <308>: DATABASE ACCESSION NUMBER: AK068557
  ref <309>: DATABASE ENTRY DATE: 2001-12-06
agttgtgcagcttgctgcacacatgtaaataaatttgttgcacatgtaacacttatgctatgtgtatatgtgtccttaataaccaacctattcaaagtagacggtctacattttccccacaaatacttatccctactatatgccgaccgatgcaaagtaaaaggtctacattttccccacaaatacttaccctactattttttttctacaaggacttattcttactcagttggttactccctctatcctagtttgatcatcgcaaggtttttaaggccttcccaaaatgatcatcctctaacaagtgcatatttgtttatttgtgcgaagagtaaatgaatatcattgaatgcactgcatgcaaccaaccaagattaatttctattgatccaattacatgcaatatttaaaacttgatgcaatccacggaatacgaagcgacgtagcaccttaaccgatgagaatcaattatagaatgatgaatgttttattatccttggtctctctgtttaggtgatgatcactatgggtggagggagtagtattaaggctgcgtttggaatcatgtgttcccaacacaagttgtgtgcacggaaaacggagcgatccattagcgtatgattaattaagttttttgctattttttttttcaaaaatggataaatatgattttttaaagcaacttccagatagaaactttttacgaaaaatacaccgtttagcagcttgaaaagggtgcgtgcggaaaacgaaaaggagagttgggaacaatgagttccgaacacagcctaaatttataatgcaatttcatcttaattggatgggtagacttaaaatgaatagtctagtatttaccaaatgaaataaaaaaatgatgtctttaaaaatgaaatttacatttgaacgttgtattttcaatttcaaatatgacaatattcccaaaaaatttcaaatatgacaaaagaaattgattcattcattgcttgccttacatacaaccatatgcaagtgaaaaaaatatcttctgttccttcttttagatcattacaagtaagagggatattaggcattagatcaatttggaatcaatcgcctagacaatcttggagaaccataaaaaaatccaatcgatatatatagttctttttctaaagaaataatgattaataatattatattgtcttgcaattaaatggtgggcgaaaaatttggtgttagctattcattggagggcagaaacatttccacacaaggctaaacatagatggtcctgaatcatctttgattcatgaactttctgattttatgtgttggtattatttggtggttatcatgatgtggtcatgtcatgtaaaactgctatagttgacggtttttgtgatagtgtattatatgggtctcatcttttcacttatgcttatgcttatcaaccaaaatttgaattttcgaccttaaatttggagttaattttggggttttttcatcgaagtttatttttcagcttttgtttttagatcgcttagaacacgtatataaaagttttattcacaaattatttttcgtttgcaaatatgccgtttcgcttattccccgaataagcgaaacgatgggtcgcatagtagatgtttttgtagctcgaaaccagatgtgccaaagattagaaaaaaggggtattgtttccattgcattttacttaatgttttggacatcgtcacaatctccaaagataaaaaggtattgtttcatcattacttgttctaactatatatataattatagaaattgctaaaaatataactatatgaatgtgtttttcatggtctactaataccgtttccattttcatatatcaaatcctaatacttttgcatcaattaatgttgtatgatattgaggtttgattgcaccattctaggatgtcattttttatatgagaaaggagggagtaatttggagcagatcagcagaggacaaaggactagtttggaacatggatacagcaagaaaatgaaaaagaaaattgacaccaaacaaccaagactacccaggaaattaactttgatgtgctattttgaggtcctataaatctttttattgcttttgaaaccttgcaagaagaatttaagttggcatctatcatttcattagttttctacaagccaaataatgtaaaaactcaaaattgtaatttagtctgtagttctcatatgttcaaactggatcggaaaagtgatcatgcctttgggaaggagaagcagatacgggttatagtatactttatgatggcatatttatagaataattccaaaaaccacatgtacctaaaatatatatggtgatgttcacgtaaatgtggcgggggtgaatcatgggcgttggaatataggtgaggagaggaggataggaaggagctgaagaggaaaattttgatagatggggatcaaaagatagttctaaaactgttaagcgtggtccaattaattctgtatgaacaaatgtaccataaaattctcttgaacacagccatgtaattaataattaacccctgagacaaataattactggaggtttttgacaaggcatggcgtctataaggatactgtttatcctctgtaaatcaaatttaaccctaccaggaaatatgtgtgatatattcttgctatcttccaagtaagaaaaaagactgctcatttcttgggttacactattttcattatttctccctttctatttttttagttatagctgaatggggcgtcatttgcaaaacgtctccatctcaactgaaacaacagtcgcgcgtttgggtcaaggtgacaggtgttctatatcgtcagtagcgattgtatagtggctggaagacaaagaaagctctctgcgcattgcttgttgtatatgttaggattacggaaaggtgcgactgtaagagtgctatgatcctgtgtggtgcctgcaactcatgttgtgtgtcattcagcattcctacttctgcatcaattgttttcaagttcaattttaggatggtagaccattagtggccgccaaaagatattagctacctatctgtataatttaatctgagatgtaaaatggaaaaaaaataattaaccacatagaaaacgcgcgccagcaaagctaagtttattagtaggaacttgtttccatgcctaggaaaaaatgtgcactgaacattaagcatcatatacaaagaaaagggacatgttacgtgcctagcttaaacttagaacgactgctcattttctcaaaaattgttgtattatagacttctggtagctagtgccctaaattaaacagaactagtgaaacatgcttgttaatcacacatattagtttgaagccaattactaatgtatgtcgtgtggaggaagcaccattggtgtggtgatggcgtcatgaaatgcatgactgaatgttttaattacttcattcgtcccaaaaagaaagatacatatatcttgtttattactgttgtacgtatctgttattgaatggaattctgaataacatgatccactttgttgtacatgtcttactacatcatctcttgatgtgtcgatggtgaatctggcaagtaaaataacctggtatttatgactttatgtttggtaagcatcatccattgtttcttctgtcatgtctgaatatgtagcttcatattttgtgctcacttatataccctggtgatgtctatctgatgtagggttgtttgcttatgtttatgcttttcgttcttttattttcgaggattatacttttagttcttgcctcggtgcctcattccctgcttgaactctcatgcagtttctcttgaagaattttgacacgttggtatacgtaccataaatgccaacaaattaagaattcttctctgggctgcccagaaatcattgccagttttattacgacaattcattctccagtctgtactctgttaattttacactgtggaatcatcaccatgtaaattttggacatggctgtatttatctttcaccttgtgaatcacttaatacaacctgatgatttgtgatc

SEQ ID NO: 18150 - DNA, 1906 bp, Oryza sativa
  ref <308>: DATABASE ACCESSION NUMBER: AK068558
  ref <309>: DATABASE ENTRY DATE: 2001-12-06
gaggtcatcgtcgtcgcctcgcctcgcctcgccttcccccgcgtggcctcgccgtcggatcgagccacgccgccgccgccgccgcgtcgcggatccccacgctcgccgagaggaggaggaggtgatgccgcttcccgcttgcccccaccctctcctctcgtctcgcggttgcttgggtgcttgtatgctgggtttgtgcgattcggatttgggttcggggccggtggtcgattcggagggggcactggccgattcaggcgtagatttggtttgtttgtttatggcgatctgttgtttgctagttgttcatacgcgggttggttttcctagagaattgggattttttttaattgttctgcgattacggtagaaatagatcgggcttatggataatcccgtcttcttctagcgtgtgattttatcctccaacgtgggagatattcctagatgttttatttccttgtgttgtttatttatgcttagattgttgattccatccttgtggatcgtcagcatcttattctagatgatcctatataattgtgtgaaacaaaattgaggttgttgggagggtttctgatcatcagctgtcctctttaccggcacgaatttggggaatctttcttggttgtgttcttgttggcttataccttttttatgttttgctcaaactcatgagatttttatcgtttaatgctggatccttatgtatgaccacatgctagtagctggcggagcaacttcgtaattgttgctagtagccattatattacatagtactcctaatatattctatcagttttgcatagctatttctagcattgttggtgattgtagtttcattggcaattgcagcttcttgcactttgaagtaacagcaagatggcagccaatgttggggaatctacaagcagcggcaccaatggcgatgcagctggggggagctttgaatgcaatatctgctttgaattgccacaagaaccaatagttactctctgtggccacctcttctgctggccatgtatttacaggtggttgcacatccacgcacactctccagagtgcccggtgtgcaaagctgtcgttgaagaggataagctcgttcccctttatgggcgtggcaaggaccgcgtcgatccaaggtcaaagaacatacccgaggctgacattcctaaccgcccaactggccagaggcctgccacagctccacaggccgatcctaacaacaattttgcccatgccaatcctaatgctaatgccaatccatggttcatgggcactggagtaccattggctaatgcacggtgggggaattatgcattctcagctgcgtttggaggcctattccctatgcttagcttccaagtgcatggatttccagatgcaaatccttatgcacagcctgctgggtttcactatgggtatggccatggtcatggattccatggcggacatatgggtcatgccgcccacggtgtccctcgacaaggaccactggagcaaccgcagcaggcagacatctacctgaaggccctgctaatcatggttggatttcttgtggttgcaagccttcttgcattttaagattgttaacagattcacctggtgatagaagatggtaaaagaattgccagcatatccctgtggcgttgtggtgcgtgcagtttcttcctgccaaatgtggcataagttattttgcgtatttacatgaagtgttcatagaatatttgcatgtagatgtaggataagcatctggctttttatagcctcatatgtagtactataattaggaggagccattttattttcttttctttttttagttttgactgttttgatggatatgatgtacaattattgggatgttgtctccatgtgttgtatacatgtaagaatagttcttccc

SEQ ID NO: 18151 - DNA, 2497 bp, Oryza sativa
  ref <308>: DATABASE ACCESSION NUMBER: AK068559
  ref <309>: DATABASE ENTRY DATE: 2001-12-06
gagacgaggagaggcaccagacttgctctctacatggaaaaaaatccccaatccccaacttgctgtctacagaaaaaagatccccaatccattcgtcggtgatttagagcagcgatggagggagcaaacggcgaagatgtgccgaggaggacatgtcggagggcatcggggatcggcgtcgtcgagcatcgcccatgattgggcgtcggatggagcggccggcgtcgaggtcagcccacagtggagcagcggaaggtgaggacgccctgctctgccactgcagctcgggactcaggcaggcggggaaaggagaggaggacctgtcgcggcgatgcaaatagctgcgcatgcaggcggccaaaggcgacgattgagcaagcgagcgatggcgtcctcggccttggggagcagcaacagcagcgacggcgtcggcgagcagcaggtgcagtgtcctcgtcctccacgagcaacaggcagccggagcggcggcggcgtcatgtcctttgcaatcagcggacagtggcgtcggcaagcagcgtagcaggtgcggcggcctcgaccttgacgagcagttggagcagctctgtgcgggaggtggagatggagatggtgggtggatcggaggggggagccgctcctgtcggccaccagctccaccccgtcctcctctcctcattgcggcggcgacggcctcctcctccatcccctcttccggtgttgggcgcaggagtaggcggcagttggagcgggcgctgcggcgatggacgcgacggcgacgagcacggtcgcgggtggcggcttcacaggtacaaccatttcagccagaagagcacacatggatgggatctgtctagtaaacaaaaaaaggagactgacgctcaggccatgtgttgaagtagatcacagcagcaagcgggtaagatcgcgatgtgctaagtttgagtctctcccagaggacatagtgtcaaggattatttcacaactaacattgaaggaagctgttgtaatgagctcgacatcgaccaagttgagaagagcttggatttaccatcctaatctttacttggacacttcaatagtgtttggcagttctgatcgccagaagcgagtgccgagcactgagacgtttattgacacagtcaattttatcttgaggacgcacagtggtttaggagtgaacaaacttgctgttatgtttgagttgaggaaggagcatgcacatgacattgatggatgggtttcctttgctgttacatccaaggcaagggttgtcaccctcaacttttctccatatcatggatcgcatgatcgcagttacaacttcccatgtcatcttttcaacggcaaaagtggatctcaccttcaagttcttcaacttgataccgttactttgggtccaagtcctcctggcttttgtggctttgctaaccttacaatgcttactttggagaatgtgcttgtattgggcgatttgcagttcttactgaaatgccctgcccttgaatggttgactatccgaatgtgctcccagttacataatttgtatgctcctgaaccattgccgcggttgacatttttgtgtgtacaagattgtgcaattgacaagattgatgttcatgcccctaatctcaccacatttaagtatagaggtcgttttaaagttattcttgcccttcgggaatgcttgaagcttaagactgcaagcattgtatcccccattgaggacaacctttactatattttcactgagcttccaaatgggttacctcatgttgagagactacacgtgaatgtttttgtcaagactcagatacctggatttactcaggccccttacaaatttatcaatttaaggcatctgaccatgaggataacctatgaaattgctaaacgctttggtagaaatgcagttctgcaactagcatatttttcggaagctgctccgtttttggtggaccttcatttggatatgctgtgtttagatttttacgagtcccgtcctgcaagagacgtgattatgaatcgccctcactacagtctcaagagagcttgcataaccggattcaatggcaatggagggcaagttgcactagtaaaatttatcctcaagaatgcagtaaaattggaggaaatggttatagatccaaaaggtagaataacgaaccaaatgatgggagagcacaaaggccgtagaatgattaaggaaaaacttgttccaaaatacaagaatggcctacttgtaattctataacttctcaagttatgcattctgtttttctcaatgaatttaagttatgtctgggcagtgatatatttacttgccctttaaccctttttttttttctgaagcaacgataataaatattttatgcgatggagcatttgctaagttagagtactagtagagtagtgcaaatgtactagtattgtgattgtgtttttctttttgcaatactgaagggaagggtcatcttggtctgaaatgaatttgcatttt

SEQ ID NO: 18152 - DNA, 3376 bp, Oryza sativa
  ref <308>: DATABASE ACCESSION NUMBER: AK068560
  ref <309>: DATABASE ENTRY DATE: 2001-12-06
ggcctgcctgcctgcctgcctgaacgaggaatcgctcatcgctgcatcactgccgcagacgccggcgtggtcgggatggggcggccgccgagcacggggggcccggcgttccggttcacccaggcggaggtggccgagatggaggcccgcctgcagcagctcaacaacgccatcccgcaccgctccgtcatccaggccctcgccgacaagttcacctcctcccccgcccgctccggcaaggtcgccgtccagcccaagcaggtgtggaactggttccagaaccggaggtactcgcaccgctccaggagctccaggggccccccgacgctgatgcagaccaagatgctgcccacggggtccgacgagcacaagtcgcctcccttcagggctatgccctctgcctctgcgcactccggctcgccctcagggaagggttctttggagagcggccaggttgaatttgaagcaaagtcggctagagatggcgcatggtatccatgttacttctatgtcttttgtcttttgatttccatgtacgagtaggttcatggcgttttgcttgctgtttgacacatagttatcagacttggaccaaactagtggtctgactggaataaactgaacctaaagttctggcttgatcagcccgtctaattggattgtttcccatattggcctgcaaatcatagctgaactgaccagttttcctacagcctggtggggttaactatgacacagcccatttattcagtaaaattcaaaaatagcatggacaacagtaaacctccagatgcacctgtgttattggttaacattgtaagtgagaaatataagttctattaaccttgcctgcacagatcacaaattgatagctttcttattataaaatagagcatgtggtttgactgatggccgaatgatccatctgtgactgagtgattcacaggtcatatcttgcaatttagtatttcactgttttggatggttttctttgttctgtattctttataatatgctctatactgagtttaagtttaacgattgcttcttaatcaccattctaacttctaagcagcatacttgtttgttatataggtttgtatctcagttttgctgactttattatgaagagaattgcttgctatagaattgtcagatactgttaaattaggtttcagttttctttattgatctgtgttttttttttatgtttgtgttcatatctacaaagttgaatacaagaccccatttggatgccagaactgaggctagaaaaggggaattagaattggatctctcaattccgtcgttggttgctcttctgatttggagttgtaggccatttccgactgaatcggtggacaactaaattggtcctccaccaattcagagcactatgattggagctttcactggatctttcactggtgaccattcaccaatttcttgtgccactatcactgtttcacggtctattttctagacctacagctgccatcccttctttcaccactccagtggccatttccttcttccttaactctagcagtcatccttcatctttctcaactctggttgtcagcgtccctgacaaaatctgctgttaagctgtctacttccctagtagccgctgtggccattgattgctctggtcagcacaccagtgatgctccagccaccacttcggcaactacccaagaaggaacatcaggcctcctggtttgtttgtttgcttccaatgtgccaattcatttgcgtattgcatccaaccttaaactggatatttattgagaggtcatttctatttgagatgcctttggcaaccaatcacaatgaaaataattgagatgacaattcgaattcaatttggatttgaattgaagatccaactaaattcattcaacccaatgtagaggggaactggttacgcaagatctcttttaacatctgattaagtatatcagcattcttatggtctgtcattcatataagttcacttctatggtagtggtagccatcctaaacaaatgtatatttgtgctcaacgaatattgtgcctgatcattaactacaaatgcaaatgaatcaacgagttcagatactttctacactatgttcttgaaaaattgtaatctctgtgtttttacatttttttttgtgtataactaagcttttatgtgcaggtatgatgttgctgccttcctgtctcatcggttgttcgaatctggtgatccagaagtacgagttcgcttttctggatttggagccgaggaagatgaatggataaatgtccgtaaatgtgtgcggcaacgttctcttccgtgtgaatcaactgaatgtgttgctgttcttcctggagacctcatactttgctttcaggaaggcaaagagcaggctctgtatttcgatgcttgtgtccttgatgctcaaaggcgtagacatgatgtacgagggtgtcgctgtagatttcttgttcgctacgatcatgatcactctgaggaaattgttccactgaggaaggtatgtcgccgaccagaaactgactacaggcttcagattctgcatgctgctagagcagcaggtatggctaaagaggctgtggttgatttggtgtcgcacaatgataagagctcagcggagcagaaacccccaaagcagcacaaaatgatggatgtgaacactgatgaggtaaccatggtttctaaccaagaccaagaagagccaacaggcaagcctgctgctaccttgccagcagcaccggtcaaaaccctgaatgattcagcttcagcttcagcttcagatgtccaaatgggcgaggcacaggctgctccaaaagttgaatcttctgatgaagtagaagacaagatgaaagagggatagttggttgcctttgctgagcattatgtttggctggcggctgcagtaaacagcatctggttaaatgcattggcatctgatcacctgttctcctgctaggctgctccacacatgttgtgacttccaacgcaggaatgtatgtcttcagtcttcacaacacatgttgtgacttgtgaagatttagtaattgcttaggaaccctctcaaaagggtaaatatgattgttaggaactttagctccaaacataaattgattgcataggaactttagctccgaagaaaatgtaatgtggttgcggtgggattgacttgattgctgtcacacaaattcggccgaggatccgtgttgaccacaaataggactggcctgccatgccacaactaggatctgtgtttaatatagcgtgccaaataggtgtgaatcggtgcctttgaaggttatcatcaattgttctgaaggtaaaatttctcaggagaaagtctaatatacattcttgtg

SEQ ID NO: 18153 - DNA, 3820 bp, Oryza sativa
  ref <308>: DATABASE ACCESSION NUMBER: AK068561
  ref <309>: DATABASE ENTRY DATE: 2001-12-06
cgaccttgccggattgggcgacgtgctctcgctcgacgcgtggaacaccctgctgtccgaggaggagcggcaacgcctcgccgctctgctgcctgacatggatcaggagaccttcgcgcgcacgcttgccgagctacttaggggagacaacttccacttcgggagtccacttgctgccctcttcgacaggctcaaaggaggcctatgtgacccaaggattgctctttatcgccgcggtacccgctttgcagagcggcggaagcattactacaggctgcaaagctaccacaattccatggtccggggtctctgggacgtaaaggactgttggaagggttgccaggggtacaacattaacgagaagctaagggcactggatgccatgaaagcacagcaacagcagcagcagcagcagcagcagcagcaaaaagctcatcttggtttgggtggccgagctggatcagagactgactcggagagcagggagtatggggacccatccttgatgcggctgaagcctgataagacagtattgaagaaatcagggaagcctgagaaggagcggtctaagggtctgttgcgcttgggagcgccaaaaggtttgggcgaggagtacattggaggggctggccgtgatgctgctatggcactctccgagctttctcgccaagataacgcctatggctatgattcaggagtcatgcgcagagggaagcctcgcaggagtcagcaaggccttcattccgaggagttgggagatgacagggatttgcgaatgattcgttctcataggccaatgccgaagccaggaaagaaggaattggctgcaagctatgatggaaatttgtatggaaacaactaccacgagaaccaaaatggttcttcttactactatggcaggaatgccaatgctaatcagggagttaccgtagcagcagcatatgatcgtccatattttgatacagcaaagaatgcaaagtactctgacagagattggatgtatggtggacaaggtatgtcgagtaaagctctgaaaggggatgagatggattggccagctggtagctatgccggtagcatgaatgactggcagagagggcagtctgcaggcgattacaggagcagaaaaactcaagctggtcatggtctgaaggttaagtcttataaaagtattgagaaacaaattagtgatgcaaattttgggtctgatcatagaggcaagataccggggaagatcaaaggtaaatccactagtcagtatgacagaattggccagaagtactcgaggagcaatgctgtctacactcagagtgaggagacagaatccgattcatcggaaaagtttgaaggtggaggggacatggatcttaaaaggcagccagaacaccattctgggtctcatagaccagcatatagtgccaaaaaattgaacaagcttcctaaagcttccaaagtaaattatccaactgctactgaagattttgaaccctaccagagtaaagggactcacagagtaaatgttacagagtctgattatttacgtgatgtgcatgtcacagagacagaacagattagtgaaatgatgaggcctccagcagcaaggggtgaaagaaagcggaaagtaatggccagtgtcgatacacatgatcatggaaacactgagttgcctgacagcaatgagaatgctgatgaatcactcaggtcaccagagaatggtgagaggctagccagtggatcaggctgtgttgattctaatggtgatgttgaaaaaaagaagatgccattggcaagttgcagctctggatccaaaaagcagaaaagaagggttgaagctacaagcccggccgaacatggtgaggacgcgccatctgctccaaagttggtggagaacagcagtagctcaaagaagaaaggtaaaaagaagccagctgctccagaggctgtcacggatgcagttgttgtagatgaaccagctcctgtcttgccagaagtaaatgtggtagtggtagaacctgagaaaccaaagaaaaaatatgtaccaatcacaccaactatccacactgggttttcattctctattgtgcatcttctaactgctgtaaggaaggctatggccacccctactgaggatactctgtcggccaagcaacctgacggggaggagagcagaaaatgcttcaacaatgaagaacattgcaaaacgcctcaagatccaagtgcaacagagcaagcccaacagggtcatgaggctgtagatgccagtggtccagagaaagcccaacaaggtcacgagactgcagatgccagtgccgcagagcagaccacgccgggcaatttgccagcgttcaccgttcaagagattgttactcggattagatcaaatcccagtgaccctaatatacttgaaacacaagagccacttcaggatttagttcgaggagtattaaagatactctcatctagaacagctccactaggtgcaaagggatggaaagcactggtttcctatgacaagtcaaacaaaagctggctttgggttggcccactgccttctggttcttcagatggtgatcctaatgaagaaacttctcctgatgcatggggtataccacacaaaatgcttgtgaagttggttgacgcatttgctaactggctgaaaagtggtcaggaaacccttaagcagataggatcccttccaccacctccggcaccagatcctgcaaacttggatttgaaggaaaggttcaaggaccttagagcccagaaaagtctaaacacaattagtccaagctcggaggaagcaagagcgtatttccagcgtgaagaatttttgaggtactcaattcctgatagagccttttgctatactgctgctgatggggagaaatctatagttgctcccttgagaaggggaggtggcaagcctacagcaaaagctaggggacaccccatgctcttacctgatcgcccgcctcatgtcactattctctgtcttgtaagagatgctgctgccaggttgcctgcaagaactggaacaagagctgatgtgtgcacacttctcaaagattcacagtatctaaaccacgaagaatctaataaagaggctgctgttaaccaagttgtcagcggtgctcttgatcgtctgcattatgagcgcgatccttgtgtactgtatgacaatgacaaaaaattgtggacctacctgcacaggggtagagaggaggaagattttgaggatgatggcacatcgtctaccaaaaaatggaagagaccaaggaaagagtcggatcctgcagaccctggaaacgatgatttagaggatgatggtacccctactgcaagcgatgcgaaaaaacaaaagacagattctacagcatcaggagaagataaggatagtgaggatcctgcaattcaggacccttctgctggtgatttggaaggcgatcctgaccctgatcattagctaagggtataaagcagcatccagcgaccagctttcatgttgctgtattaatctatgtgttgacaccaccttatcagtgtatcaggcctcaattccgacacaatgttttgtagttgaaataggtttttcgacccgtgtttgtacattcacctcatgaaacaagctttcatagtttttctttctctagtggcatgcagatgtgctatgattttaattcaaatgcttgatcatatctgtgtccactccattcttgaataccatagtggcagacccatgcatcatgcatgtgcttcattttcaactgaagttcacttatgtacataattggtccacttcaattgacacgaaagaagattg

SEQ ID NO: 18154 - DNA, 2343 bp, Oryza sativa
  ref <308>: DATABASE ACCESSION NUMBER: AK068562
  ref <309>: DATABASE ENTRY DATE: 2001-12-06
ggcttcgcttccagcagcaatagcagtagccagccttatcctcttctcgcctctgctgctcgcggggaggggtcggggtaaccatgtcgaggatggcggcgccgccgccgccgctctccggcaccggcaagccgcccacactccccttctccctcaagaagccgccgcccatgccggtgtacaaggacctgcacttcaaccgcgacctctccgccaccaagaagctgcaggccggcgtggacctggtggcacggctggtcggggtgacgctggggcccaaggggaggaacgtggtgctgagcaacaagtacggccctcccaagatcgtcaacgatggggagacggtcctcaaggagattgaattggaggacccgttggaaaatcttggagtgaagctggtcagacaggctggtgccaggacgaacgatgttgctggtgatggttgtaccacttccataatccttgctcaaggcctcatcgctgaaggaatgaaggtgcttgcagctggaattaatcctgtccagattgcgcggggcattgagaagactgcttctgctttggtgtctgaactcagattgatgtcccgggagatagaagaccatgaaattgcacatgtggctgcagttagtgcaggagatgattatgctgttggaaatatgatttctgatgcttttaaaagagtaggcaggaaaggcatggtgaggattgaaaatggaaggggcacggaaaatggtctagagattgtggaaggaatgcaatttgaacgtggttacctctcaccgtactttgtgactgattgtacaaatatgtccgcggagtttactgactgtaagatattgttggttgacaagaaaattactgatgcaagtgagattataaggatattggatagtgctgtcaaagaagattatccattgttgatagttgccgaggatgtggaagaaaaagcaatggctgatttgataaaaaacaagctaaaagggacaattaaagtggctgcaatcaaggccccttcctttggggaacaaatgactcaatgtttggatgacattgccatcatgacaggaggtacactagtgcgtgaagacatgggatatacactagaaaaggcagggaaagaggttctaggttctgcttctaaggttgtagtcgggaaagactcaacactaattgttaccgatggaagcacccaacatgtgatcgagaaaagggttgctcagataaagggccaaattgagaactcaagtgagaggtaccagaagaagatattgggtgagagaatagcaaggttatgtggtggaattgcaatcattcaggtcggtgctcaaacaatcattgagatgtaagacaagaagctcagaattgaagatgcccttaatgcaacaaaggcagctattgaggaaggagttgtgataggtggtggatgtagcctattaagattatccatgaagattgatagaattaaggaatcattggataatatggagcagaagattggcgctgacatcttcaaacaggctttgagttaccctactgcattgattgcaaacaatgctggggtgaacggcagcttcgtcatagaaaaggtgttattaaatgaggacagtagatatggctacaatgctgccaagaaccgctatgaggacttaatggccgctggaatattagatccatcaaaggttgtgagatgttgcatagaacatgctgctgtggtcgccaagtcttttctcacatctgacgtggtgattgttgaggcgaaagaaggcaaaccagttcgcataaggcccccgatgcctcctaaaagtttgatacccccaatgcctgcttctgcttcaggaattcgagtgtaggatacatcccttccccagcactgatactcaacacaaaagaaagaaaatttgggacatgattcttttgcaaatatacccagatattaacaaagtgcagaaattcctgacgaataaatttacctcaaacattgctctataagttttctcgaggaagctgtcacaaaaacatggctttcttggtatgggcagcgtgttcatcgacgaaagcagcaataagaggggtgctgtagaatagaaaatactggaaatttcaactgatattcttgtttcccacactgttcttttttttgttttgtttttttttgcctctattaatagcctaagccagttttaaatggcttatcaatatgtatatgtaagttgtatgtccagattgttaccttgtaaatatgacaagttgtatcaaaatgtaatttttttactcgtcaggcttgtgttgatatttattctacatttgtaaccatgcctattattgaaccaaagaggacgaaac

SEQ ID NO: 18155 - DNA, 1288 bp, Oryza sativa
  ref <308>: DATABASE ACCESSION NUMBER: AK068563
  ref <309>: DATABASE ENTRY DATE: 2001-12-06
gaatttgatttgtgatcttccgatctgcttcgcgaatggcaaactactagtactccacttcagtacaaccaatcgacggttcggccataaatgccactgacttcagctgtccaccatccagcctcccaaggttctggatcacatcgtgccaccgtgccggctcggctcacgcgtggatggggaagacggcgaccgaaggggacaaggaggcggggcggggcggcggcggcggcggcggcgcccgccgccccgtggtgctggtgacgggctgctcggagggcgggatcgggcacgcgatggcgcgggcgttcgcggcggccgggtgcgccgtcgtggccacggcgcggtcgcgcgcctccatgcgcgggctggagggggacccgcggtacctgctgctggagctcgacgtgcgctccgacgagagcgcgcgcgctgccgtggccgacgccgtccgggagctcggccgcgtcgacgtgctcgtcaacaacgccggggtccacctcgtcgcgccgctcgccgaggtgcccatggaagagttccagcaggtgttcgacaccaatgtctatggagcaatgaggctgattcatgctgttattccccaaatgatagaaagggaacaaggtacaatagtgaatgttggaagtataacagctttggctcctggaccatgggctggtgtatattcagcatcaaaagccgctcttcatgcattgagcgatacgctaagactggagctaaaaagtttcggaattaatgttatgattgttgcacctggagggacaaagtcgaatctgggaagtaactctacatccaagtatgttcaaatacgtgactggaagtactacaaaaaattcgaggaatccctcagagccaggactgatgcttcccagggtcctggttctactccagcagaagacctcgcaaaaagggttgttgctttggttcttaagaagaatcctccagcctggtttgcttacggccagttcagtgctattctaagcttgttgtactatgcaccactatggtttagagattacttctataagattgtcatgaaatgctagaacttctgatgtcagtaagttcaaaggacaaagaggttgccactcagataacccgcaatacatacttgcatacagttttacagggaccattcattcaagcgaaaaggcccctcccagtgtatgccatcttttttcacctgtaataatagcggtgctagtttgttcatgtagtgccaaaggatggcaatctgaaatatgtggcctgaagaaactggtttccttgc

SEQ ID NO: 18156 - DNA, 1253 bp, Oryza sativa
  ref <308>: DATABASE ACCESSION NUMBER: AK068564
  ref <309>: DATABASE ENTRY DATE: 2001-12-06
gagtagcgactgcagctgatccggattcaacacggacatagtacaccctcttgttgcttcgatgagactggtccttagcacaatcatcaaaccactaccattatatcagtgcttggtgttctattgggttaaggaattctcgatcgttctctgctagtaggaaatcgagccgactgaccagcgatgtcggcggttgagaggaagacggcgtgcgtcaccggcggcaacgggtacatcgcttcggcgctcatcaagatgctgctgcagaagggatgtgctgtcaacacgacagtcagaaaccccgaaaacatggagaagaactcccacttcaaggacttgcacgcacttggtcccctggcggtcttccgcgccgacttggaggaggaaggcagcttcgacgaggcggtcgccggctgtgattacgccttcctcgtcgctgctccggtgaacctcaagtcagagaaccctcagaaagaactggtggaagccggtgtacgaggcactctgaacgtgatgaggtcgtgcgtgagagccggcacggtgaggcgcgtggtcctcacatcgtcggcggccgccgtctccggcaggccgctgcaaggcgacggccatgtcctcgacgagtcgtcatggtccgacgtcgactacctcagctcaccagccaacaagacatctcccggaaaggcgtactcgctttcgaaggttctttcagagaaggaagcgagcagggtcgcggaggagaacggcatcagcctggtgaccgtttgcccggtggtcaccgttggcccggcgccggcagcggaggccaaaccgcgaccaggagatgatcagcaccgtgaagctcatggagaaggccaccggcgggctaatgctggtccacgtcgacgacctctgccgcgccgagatattcctcgccgagaagccgccgccggcggcggcggcggcggcggcggagaggtacatctgctgcggcctcagcgccaccatgctgcagctcgcccgcttcctggcggccaaatacccggagtacaatgtcgacgtcgccgccctcggcgacctcccggagaagccgaggatccgcctctcgtcggagaagctcgccggagaagggttcgagttcaagaacaggacgctggacgagatgtacgatgatgccttcttggagtacggtagagccctcgggattctgccatactgataacgatgttgttcccctcgtatatcatctgtttctctggtggtgattgttagacttt

SEQ ID NO: 18157 - DNA, 1329 bp, Oryza sativa
  ref <308>: DATABASE ACCESSION NUMBER: AK068565
  ref <309>: DATABASE ENTRY DATE: 2001-12-06
gatacttatcgtacgccgccgccgtcgccggccgccgcacgtctcaccgccgcgcgccggcccagggaggaggaggcgagagtgcgagatccaccacccgatgacctcccaggcggcgacgacgacgaccacggcggcggcggcggcggcgtggaccagggaggacgacaaggcgttcgagaacgcgctcgccgcgagcgtgcccggggcgaggtcggcggaggaggtgcggaggcactacgaggcgctggtggaggacgtcgcggccatcgacgcgggccgcgtcccgctcccgcgctacgccggggaggagtccgcggcgccgcccgacggagccggagccgccgccgccgcgtccaaggacggcggacaccggcgcgacgagcgcaagggcggcggcggcgggtacgacggcggcaagagctgctccaaggcggagcaggagaggcgcaagggcatcccatggacggaggaagagcacaggctgttcttgctggggctggacaagttcggcaagggggactggcggagcatctcgcgcaacttcgtcatctcgcggacgccaacgcaggtggcgagccacgcgcagaagtacttcatccgcctcaactccatgaaccgcgaccgccgccgctccagcatccacgacatcaccagcgtcaccgccggcgatcaggtcgccgcgcagcagggcgccccgatcaccggccaccaggccacgggcaaccccgcggcggcggcgctgggcccgccgggcatgaagcaccaccaccaccaccacccgggcggcgcgccgccgcccatgcccatgtacagcgccgcgcccatgggccaccccgtcgccggccacatggtgcccgccgccgtcggcacgccggtggtgttcccgccgggccacgcgccgtacgtcgtgcccgtcggctacccggcgccaccggccaagatgcaccaatgacgcgccatggacggacatgagcagcatttcttcctcctcctttcttgatgtgaatcttgatttgttctttgtgtagtcgccggctcatcgtccctgatcatcttgttcttctcacaatctcactaatgtaaacatacatagatcagatgccaagagtgcagggattggggattaaaggcgaataagtaaagtattttgctgactgtttgcaagtgatcatcacgtacacccggtgaaagcttagctccaaatgtggatgtaattagcagcggccttccgtacgtggtggcgccgatcgatgatcttgcaggggttgcaattagggattgatttccattttgctgatgtaaatttgcctactgtctcattggacc

SEQ ID NO: 18158 - DNA, 1321 bp, Oryza sativa
  ref <308>: DATABASE ACCESSION NUMBER: AK068566
  ref <309>: DATABASE ENTRY DATE: 2001-12-06
gagctctcgctctcgcagctcaaccactagcagcagcggcaggaaggcgagaggaggaatcggaggtagctggacggcggcgaggcgacgacgagccggggtggtgcagcaagaacggcgcggcgagcggcggggaggagagattggatcgacgccgggtagttaggaagggagcttggagagatggcggcttccgcgaggcccgtcggcgtcggcggggagagggcgacgagcttcgccatggcgtgcagcctgctcagccgctacgtccgccagaacggcgccgccgccgccgagctcggcctcggcatcagaggtgagggtgaggctccgagggcggcgccggcgacgatgagcttgctgcccggggaggcggagaggaagaaggagaccatggagctcttcccgcagagcgccggctttggccagcaggatgccatcaccgccgattctgctgctgatgctagggaacaagagcctgagaagcgtcagctgaccatcttctatggtgggaaggtgctcgtgttcaacgacttcccagccgacaaggcaaagggcttgatgcagctggctagcaagggcagcccggtggctcctcagaatgccgcggcacctgcaccagcagctgttacagacaacaccaaggcccctatggccgtgccggccccggtcagtagcttgcctacagctcaggccgatgctcagaagcctgctcgcgcgaatgcttctgatatgcctattgctaggaaggcatcactccacaggttccttgagaagagaaaggatcgtcttaatgcaaagacgccataccaggcttctccttcagatgcaaccccagtcaagaaggagcctgagagccagccatggctcggactagggccgaacgccgtcgtgaagcccatagaacgcggccaatgaggttgcatggaaacttcaccaaagctcttcaaaaatatatgaaatgcgcttgccgttagagtaccaaatcatatatgttctctcataccccatgttttagtgttttttctttagttcgtgcttctatgttgttcacttgtcacatagttctgaatgtaaaggaaaaaggtagtagcattgacgaccagtgccgagagcctgagagaagttttggcatgttaacacatggtgactctgaaaatggccatgctaaggtaaaaagttattgcaaaggaaacatatatgtatcttctgaaattctgatcatctggctttgtccttggctctagccttgctctatgcaaagcaaagtgattgtaatggattcagaatataattcatattcctattgttgatttctgtt

SEQ ID NO: 18159 - DNA, 2972 bp, Oryza sativa
  ref <308>: DATABASE ACCESSION NUMBER: AK068567
  ref <309>: DATABASE ENTRY DATE: 2001-12-06
tcttctctctctctctccgccggcggaggcagaggcaccgccggcattctcccccgcaagccccgcctcgcctcctccccctccccgccgcgcgccgccggcgagctgcccctgaggcacacggcgtgtgcggcctcctcctcctccccttctcccccacccctgcgcggcctcctcgcgcgcacggccggcgcagcaaggtccggagacgcgacgcggccggcctcattccactcgcctccatccctggctcgaatcgaacccccaagttgaacaatgactgctcagaccaagaagaggggtggcggggagagcgggaacggtggcgctggcttgggccttgctgccttcatcgccaacggcgaggatctgggccctatcgtccgccacgcgttcgagtccgggaagcccgagtccctcctgcaaggcctcaggagcatcgtgaaaatgaaggaggttgagattgaggagctctgtagggtccactacgaggagttcatccttgcagtcgatgagctccgcggcgtgttggttgacgccgatgagcttaagggtatgctgtccggcgaaaacctgcgcctgcaagaggttgctagctccctgctgttgaagcttgatgagcttcttgagttgtattcagtgaataagaatgttgaggaagccctagggatgttgaagatctgtttgcaagtcaccagtctgtgccagatgtgcaacaaggacattgcagaagccaggcttcattctgctttgaaaagtttggagttgattgagaaggattttctgcaaaatattcctctaaagcttctaaaaaaggctgttcagaagcaaataccaattgtcaagctgtacattgagaagaaagtttgcaatgagtttaatgagtggctggtgtatatcagaaggacagcaaaggaaattggtaaggtttcgataagccaggcatccttggctcgtcagaaaaatgagggaatacattcccaacagagggaagcagaggactgcagccgtattgggtttgacgagcgtgcttatgccttggatttggatctcataggtgaggaggaagtactggaattcgatcttacaccagtataccgagcaaactacattcacacatgccttggtcttggggaaaaattccgagaatactactacaataacaggcttatgcaacttaatttggacctgcaaattcccacgacacaaccgttcatggagtctcatcagcacttccttgctcagatagctgggttctttattgttgaggaccgtgtccttcgaactgcagatgggcttctttctgatagtcaggttgagacaatgtgggggacagctatttctaaggtcacatctatcttagaggaacagttctctcgcatggatgctgccaaccacctcctactcgtaaaagactatgtcactcttctgggtgcaaccatgaagaagtatggataccaaaccacatcattgcttgaaattcttgagaagaatagggacaaattctatcaacttcttctttctgattgccggaaaaagatagatggcatcttcactaaggactcatatgagcagatgatcattaagaaggaaaatgagtaccacatgaatgtttcagcatttcaacttgaacccattggtgtagttccggattttccatatgttgcaccattttcctcttcagttccagatgcttgccttatcgtgcgctcttttattgatgattctgtgaactacttgtcatatgatcctatgatggacgcctatgatgtggtgaaaagatacctagacaagctcttgattgaggtactaaatgatggccttctgaatttgatacatggtggttgtttggagattacacaaatggtgcagattgcaggaaatattgccattcttgagaagtcctgtgacatgttcctctttcatgctgcccaactttgtggtgttcctaggcgtcttcttgacaagcctcattccggtttgactgctagagctgtgctcaaagcctctcaaaatgcagcgtacaatgggttaatagccttggccaattccaagattgacgaatttatgttgcttttgactagcatcaattgggcaccagaggaaactccagaacatgtgaatgactacatgaatgaggtcgtcatctatcttcacacgttagtgtcaactgcacagaatgtttttccaagggaagccctgtacaaggtggtttgtggggcattcagccacatctcggactcgataatgacagtttttcttagtgatcgggtgaaaaggttcaatgctaatgctgccgcaggtattgacattgacctgaaaaagttagaggaatttgcagatgataaattccacagcactgggttgtcagagctgagaaaagaaacaactttcagagattgcctggtcgaaattaggcagctcaccgatcttctgctcagcaaccagccagagaacttcatgaaccctgtaatcagggagaagaattttggatccttggatcataagaaggtgtctatcatctgtgacaagtttagagatgctccggaaagcttatttgggagcctttcaggccgaagtacagtgcaaagtgctcgaaagaagtccttggatgtgttgaagagaaggctgaaggattttagctgagcttagccatgttgcatcagaaaataagttagtgctcccttgaaaagactgctgccaagtggtggttagcctttttaagtttcttttaccccttgtaacctccgtagttcggcaactctatatggaatttatgtagctgtcatggtttgtataggtcaattttgactgttattatgggcagcacttgcattctctcttcaaattatgtacttcgatggcactagtatactaaatcactgagagaatcaggcctaagaatttgatctcctgaatagttaagttctcttgtttaagatgtaatccgtctatagcatctattttgtttt

SEQ ID NO: 18160 - DNA, 1381 bp, Oryza sativa
  ref <308>: DATABASE ACCESSION NUMBER: AK068568
  ref <309>: DATABASE ENTRY DATE: 2001-12-06
gtctctctctcacttatctgcaaagctagccggggcgagcaggagaggaggagggcggcaccacgacggcgacagcggcggcggcggccgtagtggggaagcacggcggaggcgcggggagcccggaaccctgccgacgacggcgagcctgtagcccttgagcccgacgaactttgctacctgggcgccgatgccgtactcgcgggagtcgacagcgaggccgagctcgacgttggcctggacggtgtcatggccgtcgtccaggaggttgtaggtgcggtggccatgcgaccaggggagcaaggtgtcggcggcgacaacgcgggagcaggggagcaaggcggcggcgacgggcgcggccttgacctcgccacggtgcgcagcctcaacggcgtccgcgtggccgacaagatcctgcggtttgtccctgacgccgccgcgttccacaccacgctgcggtgcgtgaaggaatcgacaagctgctcagaggattcgacggcgccgcgccgtcgcatcatccgtcgtcgtcttgcagccagcaaggagccgcggcggcagcgggagcgggaggccgtctccgccgcggccgcctcgacgccgaggatctccgggcggcgcggccgacggggaaggagcggcggagaggagatcgaccggccggctccccacccggcgaacgcgagcgcgagtgtgaggttcatgctgggcggtgtcgcgacggcggagacacgggacaacaagctcggcggcggcaggtgagcgcggctgcggatggggagcggcggcgccgacgactccacgccgctcggcctcatcgtcgtcggcggctccgggcgcgagcggaggtctcctctgataggcgatggcggccacggtcaccgcgccactgtacgcggcgggggcgtcgcaccgcctgcttctcgtcgctcgtccgccatcaccgaccgcacgagggggacgaggaggccggcgagctcgcggcgccctgagcccgcgcgccgccaccggggagttgccgtcgccggccgcaccaccctccggccgcgcgcgccgccgcctgtgcgagagcagagagcgagaggaaggaaggagagagagagaggagaaaaagagagagggtgctgacatggtctccatgacctgtggggcccacgtgggtcccacgctgagtcagccgccacgtgggacaaaaccggggtcaaaaccgccgagggaccttctgtgaccggttttgtaagttgggggacgctggatgtccggttttgcggttcggggacgattttgtatctcgctgacaagttgagggaccttgcgtgtacttttcccatagcacaatggtagcaagctgcagctatagccccatgggccagggttcgaatcc

SEQ ID NO: 18161 - DNA, 2080 bp, Oryza sativa
  ref <308>: DATABASE ACCESSION NUMBER: AK068569
  ref <309>: DATABASE ENTRY DATE: 2001-12-06
ggtcgtctctcgcccacttcgtcgctcgctcgctcattaatggcggccactgcatcgttggcgccgtccatctccattaatgcctccatccacctcgcccatccctacactctactactcctccacttaacaagatgagctgagcgccagcttctcggcacgggccgttgcatcctctccattccatccaccacccacccacccatccaacctccgcccccggtatccttgagctggaggaggtggtggtggtggatcacctgttcttgggattctgctgctgcgagtgcgtgcattgtggtggggggtgtttggttcttggttggtgagcggtgtttgaagcggtttcgcgcgtggtcgttgggtgatgcgagagctgggaagctgtgaaagcctcgcgcttaaggtgctcgatcaattgccgctgagagcgcacgcctctgatttcgctgctgaattacggctgttggcgagaggagacagatggtcgggagcgtgcacgtgaatggatcggtgaacggcggcaatggcaccgaggagaggctcgacgagctgcgccgcctgctcggcaagtccgacggcgacttgctgaagatcgtcggcattggcgccggcgcgtggggcagcgtcttcgccgccctgctgcaggacgcctacggccgtttccgggagaaggttcagatacggatatggcgccgggcggggcggtcggtggaccggaccaccgcggagcatctgttcgaggtgatcaactcgagggaggacgtgctgaggcggctcatccgccgctgcgcctacctcaagtacgtcgaggcgcgcctcggcgacaggacattgtacgccgatgagatactgagggacggcttctgcctgaacatgatcgacacgccactctgccctctcaaggtggtcaccaacctgcaggaagctgtctgggatgctgacattgtggtgaacggccttccatccaccgagacgagggaggtgttcgaggagatcagcaagtactggaaggagcggatcagcgttccggtgataatctcgctcgcaaaggggatagaagcatccttggacccaattcctcgtatcattacgcccacgcagatgattagttctgcaactggagttccaactgagaatatactatatcttggaggcccaaacattgcctcagagatttataacaaagaatatgcaaatgctcgaatctgtgggtccaacaagtggaggaaacctctcgctaagtttctgagacaaccacatttcattgtctgggataacagtgatcttgttacacatgaggtgatgggtggtttgaagaatgtctacgccatcggtgctggaatggttgcagctttaactaatgagagtgcaacaagcaagtcggtgtattttgctcattgcacgtcagagatgatattcattactcatttgctcacagaacaacctgagaaacttgctggccctctgctggctgatacttatgttactctcctgaaaggtcgcaatgcgtggtatgggcaaatgctagcgaagggagaactgagccctgacatgggcgacagcatcaaggggaaggggatgattcagggtatctctgctgttggtgcattttttgagcttctcagtcaacccagcttaagtgtgcaacacccagaggaaaataagcaagttgcacctgctgaactgtgcccgatcttgaagaggctctatagaatactaataaaaagggagctctcgacaagagatattctgcaagccctgagagatgaaaccatgaatgatcctcgtgaaaggattgagatggcgcaaagccatgcattctaccgcccatctctcctaggaaaaccatgacctgttcgtcctgtatatgattagaacataaacaaggttggatgagacctctagtttgacatgcttagcatcattcgttattaagcctgaagaaggtgattgtcgctggcctatgtgtgaactgtgaatcccaatggggcttatttttctggaattgttagtactttgattatcatgccgtacaacagtacaagagagagtgcacagagtcaataaagaatttcct

SEQ ID NO: 18162 - DNA, 2906 bp, Oryza sativa
  ref <308>: DATABASE ACCESSION NUMBER: AK068570
  ref <309>: DATABASE ENTRY DATE: 2001-12-06
tgtgatatggccaacccttcttcttttttttgctttgtactgtgtgcatcctggtaatttgttgtgtaatttcagatttagctgagcaaaacttggagcatatttacaatgttttgggtgaaatggttgataaggaagggccagttgtacttagtccagagtatgtgatgtgcggcacaacttcgcatgtggaacctcgcttaactttctcagcagacggattcaagatcgaatactgggattcttgtgaaaatgatgagatggcagctcaatattggaaaatttctgatattacctgcattgattgtaaatgggcacagagtgttggatctgtcttaataactctccatgttggatccggcacagaaactggaaattctagtcatgatagaatacagttttgtcttattgattcacagtggccacggaaacagcaaaacatttggcatcttgcatcaagataccaagaaatatggaacaatattccatcgggtgattttgcatcagagaattggaacattgaacccagtttgtttttccctaagcaatacttttctgacactgaagaatttgaagatgttatctatcccaaaggagatcatgatgctgtttccattagcaaaagagatgttgagctgctgctacctgaaacatttgtcaacgatacaataattgacttttatgtcaagcacttgagcacaagaattgaacccgctgagaagcacaggtatcacttctttaatagcttcttttttcgcaagctggctgatcttgacaaagatcaagggagagctccagaaggtagagcagctttcctacgtgtacgcaagtggactcgtaaaataaacatattcacgaaggagtttctgtttattccagtaaacttcaacttgcattggagcttaattgtcatttgttatcctggagaagtggagacatttaaagatggtgacacaaatatctctgcaaagattccatgtatactacacatggattctctcaagggaagtcatagtggactgaaggatatcatccaaagttatttatgggaagaatggaaggaaaggcatcctgaatcagcatcagattgttcggacaagttcttaaacttgaggtttatctccctcgagctccctcagcaggataattcatttgattgtggcttgttcttactccattacgtggaactctttttgatggatactccgagaagcttcaatcctttgaagattgactcgttcgctaactatcttagtgatgattggtttccacctgctgaagcttctctcaagcgttcattgattcgaaaattaatccataagctgttgaaagagccttctcaagattttcccaaactagtctgctgtagtgagcagctggataaaacacatgggagtgagaacgctgagctagaacaaatgagtgagaatgctgagcgagaacaagctaaagagctcccagctcagatgtgcactgatggtgaacctgattcagttggcaccattcttgaaacacagcaaccatccatatcaacatgtttcaattattctgatgaaaacggcccacctgtttctgtacacaacctacataagttggaggtatcgtctgcaaacaaggatgccattgtctgcttgtcaaatcatgatgagaaaaatgagtcacctcctgcagattcttacaatcatcttgatttgagatcatgcgactcagaagaggctgagacagccaagggatcagctggtgttgtgaaagatccgaatagtcataaggagcctttgctggattctctggataataaccaggatatttccatccaagctggagctgagatgcatgacagtatggactccaagttatgttcgatctccaataatgctgacttaatggctagcgaggaacgttcgttagacaagaacaccaatgaaaatgaggagcacaatcgaacctcagaagatatcgtagaatctgtcatgatgcttggcggcagcaaaagtgacactgaacttgatgcagaaccagaaaggactgcaggtgaagctgaggttcggaattgtgatcattctaaggacatagattatattgcattaggtgatatcaacaaagatgctgctaagcaatctttaaataggaatattgttgaagctgaggacattaaatgtgaaggtactcttgtggatcatacagtggtagaagatgcaactccatataatgtgaatgaaactagtgcaagtgccgacaagatcaatgataatgagcataatgtttcatctgagttgaaagaaggaaataacggcaatggtataaccacttcaatttcctgtgaaatggaagatagaagcattgacaatttaatggtaggtgatagcagaaacggaacagatgaaactcgtgcagatggccaagaagctcacgataactctgcaacagctgagacagttccttgcgaagacaatgcaacaaccagcataactgatgctgagatgccacacgaagatagcacatgtagcgtgaagggtgaagcaatttcggataacacagcatctgatgccaaaagacctctgcctgatagcacctacatagaagatatacctgacgacaagtgcttgcagaaagatgatggcgggggtgatgaagcaaaaacagagcggcactacaagcgacggaagtttctggtctctgaagcaacatcttgagattagattggacctgtgtaggtgctagttttcgctttgtgttatatgtattcatttttattgcctttacgcaatatccttgtcttctataggtgagtccatgaaatttgtaagttatgaatagacatagacctcagagctatatgaaactctgatgcctagctgcctgcatgaccaacttttgttaaaggtcttaacttagatttggaactg

SEQ ID NO: 18163 - DNA, 677 bp, Oryza sativa
  ref <308>: DATABASE ACCESSION NUMBER: AK068571
  ref <309>: DATABASE ENTRY DATE: 2001-12-06
ggcctttccagtatccgcccgaccgcccctaccgcaacctgtagccgctgatggcttcgacgccggcggccggccccaacggcgtggcgtcgccggcggggcaggctccttcgagctcgctccccggatttcacgaggcccctcctagcgtgctcatatcgagaccttcatggatcgtccgcagcgagtcaaatattaggagggagagaccaaaaaggcctgatcctccatgcaccatctgcagaggcacaggcaaaatagattgccgcaactgttttggtcgagggagaaccaatcatgccgatcttgtcatgctcccgaagggcgaatggccacaatggtgccgtatatgtggtggtagcgggttagattactgccaccgttgccatggaaccggtgaatttcgagaacccatgggctttcacttcgctaccatccacaggaaatgaacttcacctagacagtgttgtatggttgacagtccgacagatctgtgtagagaaatcataattacttcatgatatacagttcaaagagttgaacactactagtttagttcgtgaaaaactccattttagtttatcgcaatgctcgtgttatggaatccggactgctcgcaatgacggtcatcaactctttgatataaactgtcgggcattgtcccgagctatttctgc

SEQ ID NO: 18164 - DNA, 2460 bp, Oryza sativa
  ref <308>: DATABASE ACCESSION NUMBER: AK068572
  ref <309>: DATABASE ENTRY DATE: 2001-12-06
gacggcatctcacgctgtcttcatcatcatcagcctgagagctgaaagaatttgggcgtagctcgcaaggcacgcttcgcggggagaagaatccagcagctgcaggtgaagtcagtggagcgaggtgggcgtgaacgcgtgagccaccggagtcgaggaatggggccgtccagaagcttccagaaccttcttctcctcctcctccccctcgcgctggccctgtgctccgccgcggccagcggggaggcttcgagaaggttctgggtcgagaacgacaccttctggaaggatggcgccccgttccagatcgtcggcggcgacgttcactacttccgcattgtccctgagtactggaaagatcgccttttaagggcaaaggcgctgggcttgaacacaattcagacatatgttccttggaatctgcatgagccaaaaccgctgagctgggaattcaagggtttcacagatattgaatcatatttaagacttgctcatgaattagatatgctggtcatgcttcgtgtaggtccatatatttgtggagaatgggacttggggggatttccaccttggttactgaccatagaaccaaccatcgaactgcgttcttcagattcaacctatctttccttggtggacagatggtggggagtactactcccaaaaatcgcaccactattatacagcaatggaggtcctatcatcatggtgcagattgaaaatgaatttggttcatttggagatgacaagaattatcttcattaccttgttgaagttgccagaagatatcttgggaatgacattatgctgtatacaactgatggtggtgccattggaaatctaaagaatggaacaattcttcaggatgatgttttcgctgctgttgattttgatactggttccaatccatggccaatatttcaactacagaaggaatacaacttgccaggaaaatcagctcctttaagctcagaattttacactggatggctaacacactggggggaaagaattgcaacaactgatgctagcagtacagctaaagctcttaaaagaattttgtgccgcaacggttctgctgtactttatatggctcatggtgggactaattttgggttttacaatggtgcaaatactggtcaaaatgaatctgactacaaggcagacctcacttcatatgactatgatgcaccaattagggagtatggggacgtgcataatgcaaaatacaaagcactaagaagagttatacatgaatgcactggcattcctcttctccaacttccttccaaaattgaaagagctagttatgggcttgtagaagtacagaaggtcgcttctttgtttgatgtcattcataacatcagtgatgctctgaaagtggctttttcagagcagcctctatccatggaactgatgggccagatgtttggttttctactgtacacatcagaatatcaagaaaaacattcatccagcatcctatcaattccaaaggtacatgacagagctcaagtgtttgtgtcctgctcacacggtgatgtcagaaaaccgagatatgttggcatagttgaaagatggtcgagtaaaacactacaaataccaagcttaagctgctcatctaatgtcagcttatatatcctggtagaaaacatgggtcgagtaaattatggaccatatatttttgaccagaagggcatactatcttctgttgaaatagatggcattattctccgtcactggaaaatgcatccggtttcacttaatgcggtgggcaacctttcaaaacttcaactaatcatgcagatgactgatgctgaagctagcaaagtatccatttatggtgattcagaaaataagttgcaggatgtatcgctctatctaaatgaagggatttcagaggaaccggcattctatgaaggccattttcatattgactctgaatctgagaaaaaggacacattcatatcatttcgaggttggaataaaggagtcgcttttgtgaacaacttcaacattggaaggttctggccggccattggaccacaatgcgctctgtatgttcctgcgccgatcctcaaacctggagataatgtcattgtgatctttgaactgcatagtccaaaccctgagctcaccatcaagttagtgaaggatccagatttcacatgcggccagtgaagttggagcatagattattcccattcggtatgatttgtataggtttctgtggcattgtcgcccaattccggtgaaggaacatttccttctcttccgctgtgattccacaaaaatgacggaattctacagtgcatactattcacttaggtatatgcagtgcaggattagaaatgtggtaccaacaaaataaaagggatggcacatgatgacatgaacagcagatactgtaccaagtatcaaatcatgtataaatcaacattcagatcttgttagttctgc

SEQ ID NO: 18165 - DNA, 1643 bp, Oryza sativa
  ref <308>: DATABASE ACCESSION NUMBER: AK068573
  ref <309>: DATABASE ENTRY DATE: 2001-12-06
gattcccctacagaaacccaataatgctaaggtcaaccttcccgctcgtctcccacctcccatcccgcaaaccacccccaatccgcccacgcccaccacctgttcggccctatgcctcttccgccgcctcgcctcctcctcctcctccgccgccggcgtccgcttacgtccacctccccttctgccgcaagcgctgccactactgcgacttccccatcgtcgccctcggcacctcctcgcccccgacatccccacacggcggggacggcgacgacccgaggatcgccgactacgtccgcctcctcctccgcgaggtcgccgccacgcgccccgtgtccgacgacggggtgcccctcgagaccgtcttcttcggtggcggcacgccgtcgctggtcccgccgaggctcgtcgccgcggtgctcgacgcgctgcggaccaggttcgggctgtcggcgtccccggaggtgtccatcgagatggaccccgggacgttcgacgccgccaagctgagggagctggtggggctgggcgtcaaccgggtgtccctcggcgtgcaggcgttccaggaggacctgctccgtgcgtgcggccgcgcgcacggcctgcgggaggtgcacgacgcggtcggcatcgtgacggcgtgcgaggggctgcagaactggagcatggacctcatctcgtcgctgcccaaccagacagaggagatgtgggaggagagcttgaggtgcacggtggatgcccgtcccacgcatgtgtctgtctatgacttgcagatcgagcagggaactaagtttgggcaactatatacacctggtgtttatccgcttccaaatgagaaagattctgcaaacttctataagatagcttcgaaacgtctttctgaagcaggatataaccattatgaaatcagtagctattgcaagactgggtatgagtgcaagcacaatgtaacatattggcaaaaccggtcattctatgcatttggtcttggatccgctagctacatcaatggtatcaggttctccaggcccagaagaatgaaggaatatgcagagtgggttcagaaattggaaaatggagtgtggagccatgagtctggcaattctgggataaaggacatggcaatggacgtggtgatgctatcactgagaacagcatggggcctagatgtgcaaagtttcagtaaaaccttcggaaggagtctgacagagtcattgtgcaacacatttaggccttttgtggagagtgggcttgtaattgccatggatatggaacggcgagctttgcaaccaagtgaatttgagttggacttgcaacatgatggtgagaatggaagcagagttgccttcatccgtctgagtgacccagatggttttttgttgtccaatgagttgatttcacttgcatttggaattatttcaccataacaaggctacactttctttacatcggtatcgatctttttcattttattactttcatctgaccatactggtaactatctagtctgatcttagttttccaggtagatattagctaatcgctaaaatgcttagcatttctgttcaagtcagtgcaaactgaaactcatattggttgagagagaactgttacaccatttgcataaatgcaaatagatggtt

SEQ ID NO: 18166 - DNA, 2639 bp, Oryza sativa
  misc_feature (375)..(375): "n"=any one base of a, t, c, or g
  ref <308>: DATABASE ACCESSION NUMBER: AK068574
  ref <309>: DATABASE ENTRY DATE: 2001-12-06
gaggcgcaccgccctgacactcgagcaccgcgacgcgagcgcctggtgtaccggcggcggcggcggcggcgagtcggcgacgacgtcttctaccgcggggggtcacacgaaggccggccaggccaacctccgcccgcaacgcaacgccctagctgcctgccacacggtctcggcctctctcgggcggccgcacgcacgccacgccacgcccactcgcctcgcttctcggccgcgtcgcgcgccgccgcgtggcgtagcttccccctctccaaccttgttgttcctcgctcctcctcagtgcggcttcctgcgtgctccaggccccgtgacaagcgcggggggaggcggcccacatggatctcgaggcggggtcantccgaccccgcagcgacggcgaaggcggcggtccggcggccggcagggagaccgatgatagcaatgtttggaaggatctattccttgcttacaagactcttggtgttgtttttggtggcctcgtcacttctcccctctacgtttatccctctatgaacttgtcatctcccacagaagctgactacctggggatatacagcataatgttttggactcttactttaattggtgtggtcaagtatgtatgcatagctctcaatgctgatgatcatggtgaaggtggtacatttgccatgtattctttgttgtgtaggcatgctgatataggcatccttccttccaaaagggtgtatgcagaagaagatccactgcttcacagtcagtctgcaatagccagaaggcctagtaggctgggaaagttctttgaacagagcataactgcaagaagagttttgttattcgtagcagtacttgggatgtgcatgctcattggagatggcatacttactcctgctatttcagtactatcagcaattgatgggataagagggccatttcctactgttagcaaacctgttgtggaggccctttctgcagcaattctcattggcttattcttattgcaaaagtatgggacttcaaaagtgagctttctgttttctccaatcatggcagcatggactttcaccactccaattatcggcttatacagtattgtacattactatcctggcatcttcaaagccatttcaccgtattatattgttcatttcttcctgagaaataaaaggcaaggttggcaactgcttggtgggactgttttatgcatcacaggtgctgaagctatgttcgcagatcttgggcacttcagcaaaaaggctattcagatagcatttctgtctagcatatatccttctttggtgctcacttatgctgggcaaacagcataccttataaacaatgtcaatgactttggtgatggtttctataaatttgttcctcgtcccgtttactggccaatgtttgtcgttgcaacactagcagcaattgttgcgagccaatccttaatatccgcgacattctctgtcatcaagcaatcagttgtcctggattacttccctcgtgttaaagtggtgcacacgtcgcaacacaaagaaggcgaggtttactccccagaaatcaattacattctcatggtactgtgtgtcggtgttatactaggatttggtggtggcaaggctatagggaatgctttcggtgttgtggtcatcatggtcatgctcataactacagtcctactcacccttgtgatgatcatcatatggagaacaccacttgtgcttgctgggctgtacttcgtccccttcttcatcatggaaggggcctatgtcagtgcagttttcaccaagatccctgaaggaggttggcttcctttcgcggtttccataacccttgcaatgatcatgttcggctggtactacggtcggcaaaggaaatttgagtacgagatgacaaacaaagtgagcttggagcacctcggcgagctcttggcaaggcctgaggttcagagggtccctggcctctgcttcttctacagcaacatacaggacgggctaactccaatcctcagccattacatcaagaacatgagctcactgcacacggtcacaatttttgtcaccctgaggtccctgctcgtcgccaaagttgatcaaagcaaaaggatcctgataaacaggcttggaccaaacggggtgtacggctgcaccgttcagtcggtacgccgacaacctcagcctcgagggcggcgacgacctcgccgcgcaggtcacgagctgcctgcaatggcacatccagatggacactgatggccgccggtcaccggaggaagagatggcgcagctggaggcggcgaggttggccggcgtggtgcacgtccggggcaagatgaggttctacgtcggcgaggacgccggctggtttgataagatcatgctcggattctatgagttcttgcatgggatctgccggtcggctctgccggttcttgggatgcctctgcaacagcgagttgagatcggcatgctgtacaaggtctgatgagctgttgatcgattgaatcactagtgttgtctgttgccttacgatgttgatcgattggaactaggaatcagacggttagaagtgtaagatcaggaaattgtgttatgcgttatgtaaactgtatacattatacgtatagaaaaattcagcacgtcgtactg

SEQ ID NO: 18167 - DNA, 2050 bp, Oryza sativa
  ref <308>: DATABASE ACCESSION NUMBER: AK068575
  ref <309>: DATABASE ENTRY DATE: 2001-12-06
ggtgccctcctctctgtcgctgtcgccacgtgccctcctctccgtcgctatcgccgcccgccctcctctccgtcgccgccgccgcgcgccctcctctccgtcgccgtcgccgtcatcgcgcgccttcctcttcgtcgccatcgccactcgccttcctctccgtcgccgtcgccgctgcctccctctatttcgccggcgacaccgccgctgccatcctctattccgccggtcatgccgttgccacctccctctatttcgccggtgatgctgccgccctctattccaccttcgttgttgtcctctgctctggtgccgtcaccgccaaactgccctcctagttgcagctagaggtgtttgcctgtgtggccctgctctttccctgccatggatacgtttctttgaatgagcaaacaagcttcatgctctatcactaactgcgaggacagacaattgccccataatgcttgagtcttttgtccaagacgattccaacatcaggattgccatctattcaagtaatacacgttgctcactgcaattgctttttgtcaagcctcattgatgtattcaacaagtatcagtcgctgaagcaagttctgctgcagcacaaatctaacagtgttaggttcttatgttcttctggttatacctagcattcttcaatgccaatttatcacatttctaggtgccttttctggttatagtttcttactctatttttatagcatctatatgaagcagcaatagtcatttcaggattctttcctgctggtaggacagatgtggaatcataacaaatgtccaaatttggcgtgtttcatatgacctaagtagcaaaaagataggcattagtacaattagacatggcttgtgggtaataaggcttagctatatggtcattaacttagctataaagttgttacttgaccagatcagctatctggcagaactaagacttacaactggcacatcacttcagagaacatacttgcttagacctgcaacttgcatgtaccatattcttcagatacgttggttgcccatataaaatggggtcttaattcctttacgtgcaataattcataaagtctgaattcatcttcaacagtgctttggtcacaaccaattgaaagctgtagatatttcttaccacacacattccttatggtagtgttcaaataaaataaatttactctaaatatttgcttgactgaaagacaatttacctttattgcatttcaggattcagttataccctaaaacagatttatttgaccctttataaagttacatgtccatattatatattcatattaatattagtttattccaagctacagtccaaataaataattgaaccatttggtagtaatcagttgttgagcaaagctcccaaatagcacgtgtaatcaagttctattgtgttgtattcatactctcagatggtggttagatctttatgccacattatgacttaatgaatgtatcctcttatgtgaattagctaagcattgacaagtgaagtccttgcatgattacatcttatttaatctttgtaagataagttaattagcatatccatatgtttttagttttgacttacacaaagaaactgctatatttagtcactggctaattcattacttcgttgagttatttctctcttctgttgactgcagtaataactggtgctttcttcactaggtcaacatctcctttgtttatatataccttacccatctttacggaatcacattcactgcacttgcatctttttcccttttctccattgatactatcctcaatctattagtgtggtaacaccggtatatattctgttgaattgtatgataggtgatgcctttctgaatgatattggtacaattggaaggataatagagcaaagatttaccttttgtttttatggtgtcctggccatagtcaaacacgggagatcaccatacattagttgattctgcctaattctaataccaatgtaattgcaagttgacattgatttcagacaccgctttgtgtaaagatattttgt

SEQ ID NO: 18168 - DNA, 1098 bp, Oryza sativa
  ref <308>: DATABASE ACCESSION NUMBER: AK068576
  ref <309>: DATABASE ENTRY DATE: 2001-12-06
ggccgtcagcccgtctctggcctcgtcacttcactccactggcggcggcggcggcggcgacaggactcccgccgccgctcagctccggcgtcgccctcccggaggtcctcgtcgtctgggacatcctggtacggcttccccccaaacccctcctccgctgccgcctggtgtgccgcgcatggcgccgcctcacctccacccgcgacttcctcctcgcccaccaccgccaccagccctccctccccctcgtcaccggctgcagaaacggcgacgtcctcgccgtcgaccgccggcgccggctcctccaccccgtcgcccggttcgacagctccgtcttctgcgtggaggaggcctcctgcgacggcatccttgtcctctggaggaagagggccatcggtgcccattccagtgtccgcttctcgatctgtaacccgaccacgcgtcagtccggtgacatcccgctgccgctgctcaccgggttcatgctcatgggcttgtactggcaccgccccaccggcgagtatcggcttctgctctacaggatagagctacctgcttcggagcggctcgttgatgttctgatccccggcgatagaaacgcctgctacgtctacacattgggctctggcgatttgccgaggtgcattgggtggccagaggcggaggcaaacggcgcatctgtgctgctgcatgggagcctgcattggtataagagaatcgaagatatgattttggcgtttgacattacagccgagtcgttccggtggatgcggtctccattcggcaaggcggtgtggagagcgtttcatggcctgtttgagattaattgtatgctcggcatgtactgctgtgacgatggtgcgacatttgtagatatctgggtgctggaggattatgagagagaggtctggtctctcaagtaccgggttgaattgccagttctagagatcaggagagagcttgatgtgaagcgtgatctttacagtgtgatggtttcttccgaggatggggatgtgcttgtgctggttaactgcaaacgagccatgctctacattggtactgatggcaagctgttggcgagtttgccacatgataatg

SEQ ID NO: 18169 - DNA, 2939 bp, Oryza sativa
  ref <308>: DATABASE ACCESSION NUMBER: AK068577
  ref <309>: DATABASE ENTRY DATE: 2001-12-06
ggttcgcgcccacttccagccaggccaccgccgccgccgccgaccgaagcagccgacggcgaccaccgccgcggcgagggatcggtgcgtaagcttggcggcgggccgctccgcacgcgggagggagcgccgtagccgcccttccccccaccctctacaccccctcgccggcggcgaacacggcgcgcgatgggaggcgcgcgcgcgcaggtgaacaagccgcacaagacacgcttcgcctccaaggcgtcgcgccacgcgcacaagatcgataaggtcaggaccgggaagccggagggcagccaccgcgccgccgtcaagggggcccgcgccgcgcgcgtccagcggagcaaggcgatccgtgatcagaaacgtgctgctttgctgaaggagaagcgctcttccgttggatcttcgagtgcgccccgtgtcgttgttctttttggcctttcctcgtcggcaaatgtcagatcacttgccaaagaccttttaaccattgcttctggtgatgaagagaaaccaacttcttccactgttgcttctcctacatataaacttcgaaccacggtacttgaagcaccttatggtgatcttacatcatgcatggaactggcaaaggttgctgatttgctagcatttgtactatcagcaaattcattatacgattgtgattcgagcagtccaattgatgattttggatcacaatgcttgtctgtttttcgggccatgggcttacctagtacagctgttttcattcgagatcttccatcagaaaacaaaagtaggcaggaattgaagaaaacagctatttcttttgtttctccagagctacctgaggattgcaagttctatgcagctgacacaaaggatgatttgcacaagttcatgtggcttttcaaggagcagcacctttcatgtccacattggagaaaccagaggccttatgttatgtctgaggaggcctgcataaaacctgatgacagttcagggctgtgcacattgcttatgtctggatatttacgtgcccacaatctttctgtcaaccagcttgtccatctgtcaggtgttggtgattttcagttgggtcaaattgatatcctcaaggatccttttcctattaatgagaggaaaaactccaatgccatggtttctgaagatagtggtattcagattgttgacacctttgttccagacccttcaagtcaagagcctttgcttgttgaaaacaccccagatccacttgaaggggagcagacttggccgacagaagctgagatggaagaagcctatttgaacaacaaacagagaaagctaaaaagaaagcttcctcgaggcacttcagaataccaggctgcttggattgtggatgatacagatgatgaagatggtgattctgagaacgacaaccaggatggtgctggaatggttatagatgagcaagatcactcagacaatggaggtgatggttcagatatggatgtggtatctcactttacggagaaatttgatgaagaaacaattgggggtaccgagatggcagacgatgaaaatttgaccaaagagcagatagaggcagagattaagaaaataaaagaagctaacgctgaagacgaagaatttcccgatgaggtggagacacccttagatgtcccagcaaaaaggcgatttgcaaaatacagagggctaaagtcatttaggacatcatcctgggatccaaaggaatcactgccacaggattatgcaagaatatttgcattcgataactttacaagaacacaaaagcatgttcttgctaaaatggcagagcgagatgaaggaaccttgaaggattgtgctcaaagaggatcatttgtgaggctccatctgaaaaatgttcctactgagattgcctcaaaacttgttcatccatcaaggagattgcctgtggttgtttctggtcttcttcaacatgagtcaaaaatatcggttctccatttcagcataaagaaacatgactcctatgaagctcctatcaaatcaaaggactccttaattttcaatgttgggttccggcagtttactgctaggccattgttttcaactgacaacatcaattgcaataagcataagatggagaggtttctacatcatgggcggttttctgttgcctctgtatatgctccaatttgctttcctccactccctcttattgttctaaagagcagagatggggagcagcctgccattgctgctgttggttcactgaaaagtgtggatccggaccggattattcttaagaaaattgttttgactggttatcctcaacgggtctcaaaactgaaagcagtagtgcgatacatgttctacaatcctgaagatgtcaagtggtttaagcctgtagagttgtggacgaaacatggtcgacgtggccgaatcaaggagactgttggcactcatggtgctatgaaatgcatattcaatagcagcgtccagcagcatgataccgtgtgcatgagcctttacaaacgcgcttaccccaaatggccagaacagctctaccagatatgatcatatcagggtcatggatatgtgcttgcacgttggcatgtacgtctcaaagttttgacagattgagctcatcgatgtgcttcctgatgcagctcatatatgtatactagtgctagcagaaaaagaaacctcatgtcaacaacgacatgtagttagctgtattctgtatgttaacatttgttttacgttaacagctatgatttttgatttttgctgattttcggcgtgctttcatccgcatttgtgattgattgagccggtaattcaagctgcaatgttacaagatatcgtgttaaatgttacaggtgcaatcaggagctcacctgtaatccatgcccatgggtggtggttaaagagaaaccttatatggcataatatgttaaattgcttcc

SEQ ID NO: 18170 - DNA, 1898 bp, Oryza sativa
  ref <308>: DATABASE ACCESSION NUMBER: AK068578
  ref <309>: DATABASE ENTRY DATE: 2001-12-06
ggtcctcaccaaacaaaccctagcctcttcataatcggagaaaaagaaagagaaaaccctaaggctctctcccctccggcggcgacaggacgggttctcgatcagggttgccagcgaacacgtctacgatggcggatgaaagcgagcggagcggtatggtaatcgacgacgtcggcggcggactgaatcttccaataattgttgcaggcaagcgtaagcgggagctcacatgggaagagaaggcgttgacagttcttgatattgtcgggtcccaacagcaccccgcatgccaacctgccgagcgtgattgcagcctcatagactcggagaaagattactcatctatggccggctgccaggccggagaacacgctagtatatttggcattgacaagaatggggatgattctgatgaaccgtgtgctaaggatgatgccaagcaaagtgatgtggctcctctgaaggaggaggagaattgggagctggacagtgaaccagagctcacatgggatgagaaggtggttgaagttctaaacatagttcgacgccgagagatcaccgaatataaccccaagcagttttgctcaattcctactcgattttgtgcctacaacatagccttctttgacctggacaaagagtcaaagcttgcacgtggaccacctatcaagtcactagctttccccgactactggtgggagatggactctgtcaatgtgattgcaatcaaggtggccgagtctgatgtgggttaccctatcagggtatttggcactgtgctggccagggatgagtacgatttcaggtgtgtctatttgttcaggcgtgacaggaacaatccacagatcatcacctcgccggaggacacactaactctgacaggacctaatcgagcgctgggtgcaatagacaaaatgtatttcgagttcaatttgaagattagagacggtgatgtcgacaaagatttctgcaaaggtgtgcgagaacacaatgccatctgctatacaaagcagccgatgactttatcgctagagagctgcctgagtagaattgattttgtgtatagtcctgttcaattagctgtggaagcttctgttgcagtcaaaattaagggggttgtatccaagtttttcactggcaaagtgactgcttggactactggagatgatcagaacaaaatcatcctgtatgacagtgaagtggaaggcaggaacagagttcttggagctgatggatcagtcgatctgactcgctgtttcgtagccgtcaatttggatgatgaactggtgctcaatgtctgtgtttctgaaggagctggctcaatctttgagctcgttcttggacacaatgatgaagaatgtgtccttgagcaaggtccctatgaactgcaggtgaatgttgtttggacagctgccttgaagcatcgacagcgcagaaaattgtttgagcgtatcggtgacttccgcgtgttaaggtgatatgtagtatgaagatttatatgggggaagctgttacatctcaagcagttctttcttgttatatagattataatttttttgttcagctgagttgaactcgtgcttaactgaaaatctgcctgcaagacttatttagttatatgtactggtagactggtaatctataagattactgatgtctagtagggagtatggatctgtctggtagtctgtataaccttttctgaacctaccaaagtttattttgcgttcttggagaagtgtcttgtctgtcattgttacttactgggttgtgagcatcggattgaggtagtttgtagaggtttgagcgccatgtgtgctctactgttgccatttgctgttgagagatgctgagaacctgacgtttatggctatatatatgttgatgttttgtaagtt

SEQ ID NO: 18171 - DNA, 2126 bp, Oryza sativa
  ref <308>: DATABASE ACCESSION NUMBER: AK068579
  ref <309>: DATABASE ENTRY DATE: 2001-12-06
gggtgcgcgtgatagctctactctcgcggtcgctgtgggcgcggggcgggttggcgaagcggagacggcacgcgcggagtccgtacggccgcagcgaggcgacgtggtggcgtcgagtcggcggcgatgataagggttgtgtctccgccgcctccgtccaccgtgcagctgcgcggcggcggcggcaccccggggccctcctcctcctccgcggtctgccgtttctggggttcccgaagaggaagtagagttgcggcgacgagtagttggggttgggggaagagtaggaggaggaggcgcgccgccatctcatgctgctctgctgaggaaggggaggggccccgggtcgccacgccgtcggctcccccggcgccgtccgagggatcgatacagctctactcgcagatcgagagggtgatcacggaggcggcgaagcagtcccgggagggctggggttcgaccggagattggaccgagatcgagggagcgtgggtgctgaagcctaaatcacaggagccctcgttcgttgttcacttcgttggtgggatttttgttggagctgctcctcagatcacttatcgtttcttccttgaacgacttgcagacaagggagctttggtgatcgcaacgccatatgctagcggctttgatcatttcttcatcgcagatgaagttcaatttaagtttgacaggtgcttaagaaacatggttgaacctgtaaatgaccttcccacatttggtgttgggcattctttgggatctgtgatccaccttctcattggatcaagatacgctgtgcagcgaagtggaaatatattgatggcctttaacaataaggaagcaagcttggcagttccattattttcgcctgtaattgttcccatggcacagagttttgggccaatattttcccagttgacatcatatccaacacttcgttttggggcggaagcagccattaagcaacttgagaatcttagccctcctgttgttaagcagctcctgccattagttcagcaacttcctccactgtatatggatttagtaaaaggccgagaagaattcgttccaaagccagaagagacacgtcggctggtaaaatcctactatgggatttctcgaaacctcttgataaagttcaaagatgatcaaattgatgaaacatctattcttgcgcaagtactaagctccgaatctgccattagctcactgcttgacatgtcaattcggtcacttcctggagatcatggactaccgttacagcaggtacttcctgatgttccaccagcaatggccgatgcagtaaacagaggaggtgaactcctgacaaatctagcaacagggacaccatgggaggctgttgctaaggaggtaggtagcactttaggtgcggattcgggcgttctacgagcacaaatctcaaaggatgtcaatacacttgttgacgtaattgtttcatggattgagtcaaattctggtccaagattacttcgttcatgatgacacccccacaaaggtttagcaggttgggaatgccagtaccaaacgtcaagaggattcaactgacgagtattgcaaactgtagattgcatttcaaccccgacatgctagtggtgtatatatatgctgtacatcgtagcgcatgacttgttgaatgtaatctatcttgatggagtattatgaatgtacatttccattaaaaaaatgtacatttggaaggactagaatagagcgatgagtttatgggtttgtggctgctctgatcctgacaggcactgggggtgcacagtactgcacagtcctgtccgcaaatctacagttcagttttacaagaaatgttcatttggtagcaacggaaggtctatagttctccgaggaaactggccgaggtatgcacccgtgcttatcattcttcgtaaaactgtaattatttgttaaaactatccttttacttcagatgggtatttcataagactgctgcaacaacaacagcaacaacagttgattttatcacatatgggctcgacttaccctgatataaagtattgcatgtgtgtatgatatatgtactcaaaacttttcaggtgaataatgtaagctttttgataaagtcatacactattgtt

SEQ ID NO: 18172 - DNA, 873 bp, Oryza sativa
  ref <308>: DATABASE ACCESSION NUMBER: AK068580
  ref <309>: DATABASE ENTRY DATE: 2001-12-06
gttcagtcgcacgtaccacaccagcatcctcgcacggtcgcgacccctcccgcacctcaccaggtagagagagagacgacggcggtggtggcgggatgttcctgcggcggatcctgagcggcgggggaggggtggcggcgctgcgggcggcgcgcgccgtgaaggagacgacggggctcgtggggctggaggtggtgcccaacgcgcgggaggtgctcgtcggcctctacacccgcaccctcaaggagatcgaggccgtccccaaggacgagggctaccgcaaggccgtcgagtccttcacccgccaccgcctccagatctgccaggaggaggacgactggaagcgcatcgaggaccgcatcggctgcggccaggtcgaggagctcatcgaggaggcccaggacgagctcaagctcatcgccaagatgatcgaatgggacccatggggtgttcctgatgactatgaatgcgaggttattgaagatgacacacttatcccgaaacatgttccgcagcatcggcctgttgcactccctgaggagttcttcaagacactagatgctgtcaaatctgatcctgctctgcagggtgagtctcctcctcaagtgaaaccataaagacgtgaactctccaagatctaccatttgcaccattttgctgcgtggagtagactatagattagtttcatgtgttctttgccagcaatatttgcttggttgttccaagcagaataaagttctaccgagcactacaaagaatgtgtttaaactgagtgcttccacacagtgaaatgtgtgatatttgatactgtggacatcattttctttttctctgtattaatctatggtgacgaaaagcaaacgttttactgtt

SEQ ID NO: 18173 - DNA, 1827 bp, Oryza sativa
  ref <308>: DATABASE ACCESSION NUMBER: AK068581
  ref <309>: DATABASE ENTRY DATE: 2001-12-06
gggtggtaacaggggaacgctgctcagcttcttgcggctgtatacttcagaacaccagaagaaaaaaaatcttgtgctgcacatatggagatgcaagatgaacatgtcattgacgtcccttcaatactggcgcaagaactgagtactgaactcactagcctgaagccaccgtcgacggagttggccggcgacggcgacccttctccgacgccgccgatcatcatcgacgaggtcggcgaacggactcgcaacgtcgacccgcacgagtacctgccgcaccacgtctacatcgggccgtacagccgtatgaggaacgccgacctcgccggggacgacgacgacaagctgcgcacgcttcaggaggtcctcgccgcggcggcggcgtactccaccgcgccgccgctgcagctgaaggacttcgtcgccgagctcgagctcctcgaggcccgcgcgaggagcagctaccgccacacgttcggtgtggtgccgagcaaggagttcctgcgctggctgctgctcgacgcatgctacatcctcgtccgcttcggcgacgtcgacgacgtcgtcgggcgccgcccacgcccggcggcgccggcggccgtggcgagcgcgaacggcgccgtgcagggcgggaaccgcgtcgtgccgtcggtggagaggaggagagcatccgccgccgaccggcagtatatcctcgacgtggtccgcgacgtgttctaccttgcggcgaaccaggttccgttcttcgtcgtcgagagggtccgccagatgacgtttctggaccacggtactccggcgctggacgccatcgcgaggttcgccggaaaactcttggagcagaagcagtactccgtcgcgacgccgaccatggtggggccgccggaacggcggccggagccggccaatcttctgcacctgctgcacatgcacttcacgcccaccgtactcacatccgccgccgctgtcggtggcggcggtgcgcccgtgggccgatggcgcacggcgatggagtactacttcgtcggcgtgaagttcaagagacggcctctcaatcgccgcagcaagggcggcgccctcagcatcctcgacgtgaaggtgagcggcggcggcggcggcacgctggaggtgccgcagctgaacatcgacggcgagacgtggcggctgctccgcaacctgatagcgctggagcagagcaacccgtcgggggcggggagccacgtgacggcgtactgcgtgttcatgtcgcagctggcgtcgacgccgatggacgtggagctgctgtcgcggcggggcgtgatcgtgcacggcctcggcaacaacggcgaggtcgccaagcgcttcgccgatctctgcaagggcaccgtgttcgacgtggacgacgccgaccagaactacctgaggccggtgtgccaggtgctcgaccggcggttccagagccggccgcggcggtggatggcgtggctgaagcagaagtacttcgccaacccgtggctcgccgccggcctcgcggcggcggccgtcatcttcgtctgcaccgtcatccaggcggtttactccgttctgagttacaaaaaaggatgatgcgggtctattggcagagacagtggtccatgtgcatagcaagcagcctattgtacaacatgcctgtttcattgtagagcaaaataatttaacttagggctttgccaatcacaacttgccatagtttgccaaattaaggcctatgggaaaaccaacctcttgcaagtgatgtatatattgtactaaggaacaagacgtactacaaagtaggttaaaatgaaaaaaaaaaacttattctttccttgc

SEQ ID NO: 18174 - DNA, 2010 bp, Oryza sativa
  ref <308>: DATABASE ACCESSION NUMBER: AK068582
  ref <309>: DATABASE ENTRY DATE: 2001-12-06
gttcccgcggctgcctccggcgagcgatctccctgcgtctcctcggtctcctcgcgagctcgccgccggccgcctgagccgatctccatcccgcgagcagcagcgccggcgtccccgctgcttcttccgccgcatccttcgctcgctcgctggcgcataattcctgaatccattttaagtgcagtaattctgagtaccaaaaaagccctcaaaatggtggttcttgctgcttccatcatttcaaagtccgggaaagcacttgtttcaagacagtttgttgacatgtctcgcataaggattgaaggattacttgcagctttccccaaactggttggaactgggaagcagcacacttatgttgagactgaaaatgttcgctatgtttatcagccaatagaaggcctgtacttgctacttatcacaaacaagcagggcaatattcttgaagatctggacaccttgaggctgctctctaagcttgtgcctgaatactccccctctcttgatgaggagggtgtttgtaaaacagcatttgagcttatatttgccttcgatgaagccatctctcttggaaataaggaaaatgtaacagttcaacaagtcaaacaatattgcgagatggagagccatgaagagaaggctcacaagctgatgatgcaaagcaaaatcaatgaaacaagggacgtgatgaagaagaaagctagtgagcttgataagatgaggatggaaagaggaaaacttgacaaaggaggatactcatcaatatctggtccccgggtaatcgagaaaacattcaatgacatgagcattaccggtagtggatttgggagtggttctggattaggtggactgggcatggatatggactcatttgctagcaagcccaaaggaggccgtccatctgcagctgctactgctcctggtaaaggtcttggtatgaaattaggcaaaacacagaagacgaatcagttcctagagtctttgaaagctgaaggagaagtcattctggaggatgtacaacccagctcagttcagtcaagggcatcgcctcttccaccaagtgatcctgtcacagtgacaattgaagaaaaactcaatgttacagttaaaagagatggaggtgttaataactttgatgtgcaaggaacccttgctcttcaggtccttaatgatgcagatgggtttatccagttgcagattgaaaaccaagatgtacctggacttagcttcaaaacacaccccaatatcaacaaggatctgtttaacagtcagcaagttgtgggagcaaaagatccaaacaggccattcccaagtggtcaaaatgaaactcctctggttaaatggagaattcaggggatggatgagtcatcgttacctctatcagtcaactgctggccatcagtatctggaagtgaaacctatgtcaacattgagtatgaagctgctgagatgtttgacctgcacaatgttgtcatctctataccattgcctgctctccgggaggctccaagtgttagacagattgatggagaatggaagtatgactcgagaaactccgtgttggaatggtccattcttcttatcgatcagtcgaaccgcagtggctccatggaattcgttgtccccccagctgatccatcaacatttttccccatatctattggattttccgcatcgagtacattcagtgatttgaaggttactggaatccgtcctctgaaggatggtaacccgccaaagtattcgcagagggctcgtttggtggccgctaattaccaagtagtttaacctaacaagggatgtttgttgcctcacttcagtgacacatgtttgcggtatatgttatctttcggcgatgagctgttgagaagtcatgacaaacaaggattgttttgtatttacagtgaatgtatttttcgcctgtttcatatgtagtaacattttgccccaaattgctgatgatctgtactgccacccgagaaataaacacatgtattttcctttgaaacc

SEQ ID NO: 18175 - DNA, 1009 bp, Oryza sativa
  ref <308>: DATABASE ACCESSION NUMBER: AK099061
  ref <309>: DATABASE ENTRY DATE: 2002-08-28
ggcaaatacgacgcgttcccaaatcccccaatccgatctgcctttcctcttcctcctcgtcaaaccctagccaaatccacgatcggggctagctcgtcggcggcggcgatggggaacccggagaagctgatgacccagatcttcgacctcaagttcacctccaagtcgctgcagcggcaggcgcgcaagtgcgagaaggaggagaaggagcagaagctcaaggtgaagaaggcgatcgagaaggggaacatggacggcgcgcggatctacgccgagaacgccatccgcaagcgcaccgagcacatgaactacctccgcctcgcctcccgcctcgacgccgtcgtcgcgcgcctcgacacccaggcgaagatgcaggtcatcggcaagtccatggccaacatcgtcaagtcgctcgactccgcgctcgccacggggaacctgcagaagatgtccgagaccatggacaacttcgagcgccagttcgtcaacatggaggtccaggccgagttcatggagggcgccatggccggctccacctcgctctccacgcccgagaccgaggtcaacagcctcatgcagcaagtcgccgacgactacggccttgaggtctccgttgggttgccgcaggccgccgctcacgccataccagctgccaaggagaaggagaaggctgttgatgaagacgacctctcccgccgcctggctgagcttaaggcccgcggctgagggatttcacttcagatatgattctcaagctgctatgagccattgtcacgtcaaaggctactcatatttgttagattcgtaaatactgttatgctaaaatgcgtgtgttgatatcccatatgggatctgtggacttcattaaaaccttgctgtgtgatacaaatccataatatgtgagcttgggaacgtctctgtgtcgctgtatcctaagcctgcccgtttgaacagaaatgttgaagttgtccatcttttcacgggatgttttccttgctttaatgccatg

SEQ ID NO: 18176 - DNA, 989 bp, Oryza sativa
  ref <308>: DATABASE ACCESSION NUMBER: AK068583
  ref <309>: DATABASE ENTRY DATE: 2001-12-06
ggtgctctgcctccctctcccttcccacgccgtctcgccgcaatcgctcgctcggtcgcctcctcttccgccgcgagacacgaagagcagcagctcacaggtaggcctgcgcgtcggcggccatgggagacagccagtactccttctccctcaccaccttcagcccgtcggggaagctggtgcagatcgagcacgcgctcaccgcggtcggatccggccagacgtccctcgggatcaaagctgctaatggtgtagttatcgccactgagaagaaattgccttctattttagtcgatgaaacatctgtgcaaaagattcagtcattgactccgaacattggagttgtctacagtgggatgggtcccgatttccgtgttcttgtgagaaaaagtcggaacaagcacagcagtattatcggttgtacaaggaaactatccctgttactcagcttgtccgagaaactgctgctgttatgcaggagttcacacagtctggtggtgtaagaccatttggagtatcattattgattgccgggtacgatgacaatggcccacagctgtatcaggttgatccctcaggatcatacttctcctggaaagcatcagctatggggaaaaatgtctccaatgcaaagacatttcttgaaaaaagatacacagaagacatggagcttgatgatgccatccatactgccattttgactctgaaagaaggatatgagggtcaaatctcagccaacaatattgaaattggagttattcgatctgaccgtgaattcaaagttctaaccccggcagagatcaaggatttcttggaagaggtggagtaaattgtctgttgacatttgatagtttactgttctaagtgacactcttgagccgtagtcatgaggcttcttgtctcttaccatttgtcacttaaacctattgtaaactgatttgcttcagtgatatgcatgaggtgaagtggtggacctacttttgaatccc

SEQ ID NO: 18177 - DNA, 1664 bp, Oryza sativa
  ref <308>: DATABASE ACCESSION NUMBER: AK068584
  ref <309>: DATABASE ENTRY DATE: 2001-12-06
gacgtcgacacaataccacacccatccccctgcccttcgccgtctcccacctccacctcacctgcgagcagcggtgcctcctctcctcctctgctgcctccgccgcgcgcatcctcctcccatccatctcttctcggcctcggcgcccgtttcctcgctacttcgccgcctgcgccgatctccattaatccatccatcccgcgagggggagcagcggggtaggggtgccgtcgtcctgccgcttccgcctccggactagggatcatgtcaggaagagatcgtctgccacgtcgctttatagaggatggcaggggctaccctgacatccgtgtagttgatgaacgtaggggctatcctgacatccgtgtagttgaggatcgtaggggctaccatggtattcgtgccattgaggatcataggggctatcctgacatccatgaaggccttgtcatgagggttgcacctcgctctcacacggctatgccggaggaagaaattgagattcagggggccgaattcaggaggcttatggcagatcaccgtgctcttgctgaagaacgtttggccttacaccgggaattacaagctggaaaagatgaggtccgtcacttgaacacgatcattgcagacatcagtgccaagaaggaaacttatatcggtgagcttgttgacaaaaggaggaaacttgaagctgaacttagagcaaatgagtctttaagagatgagattgtgcagcttcggggtgaaattgataagcaccttgtagtcaggaaagagctctctgcgaagtctgcatctatcatgcatgaactaaccagggaacaatctaataaacagcagattcctatgttgaaagcagagattgatgcccttcgacaggaacttgttcatgcaaggtctgcatgtgaattagagcagaaaggaaattttcagttggttgaacagaagaaagcaatggagaagaatatgatttcgatggcacaagaaattgaacaaatgcgagcagaattagctaattccgaagggagaccatgggccccaggtgcgacatatgggatgaagctgggcagccctgaagtgaccttccctacttcatatggagataactacaatatccatgtgggaggttccgagaaaggtcattcacatcttcctgaatcaagctcatggggtacatatgacaacaatcgccttcagtaccgttaagatcgcagctgctatgaaaaaagtccgtgaagacttctgggtcccatggtcatatcacatggtttagattatcgtatctacctccttttttgtggtacaatcaatagttatctttcttaattaaaattgaaatgcctctaatcattttcttctctgtgtgtcatataaaatatgttccaatggtaactactgcttatactttggctcgatacctatatccaagtttccttggttatatggatccatgacacagttattttaatatgacttgggtatatatatgatatagtttagttaatgactcagtcatgccacatatggagcatgaagtctgaattctatgtggagatataattaagcatatcagagaaatgttccttccatcatgtattacatgtcattctgaaaaaaaaccagtgagctttttatgaaatgaatacacattgttgcttgtgttt

SEQ ID NO: 18178 - DNA, 1218 bp, Oryza sativa
  ref <308>: DATABASE ACCESSION NUMBER: AK068585
  ref <309>: DATABASE ENTRY DATE: 2001-12-06
gaactttcccaattccttttcgcctccctgtagaggcatggagtgggacaaggccaaggcgtcctccggcgaggcggtggacgacaggggcggaggggaaggagggctcgggtacgtgaaggtgatgacggacgagcagatggaggtgctccggaagcagatctccatctacgccaccatctgcgagcagctcgtcgagatgcaccgcgccctcaccgcgcagcaggactccattgcaggaatgaggcttggtaatctgtactgtgatcctctaatggttcccggaggtcacaagatcacagcaaggcagcgatggacaccaaccccaatgcagttgcagattcttgagaacatctttgaccaaggcaatggaacaccaagcaagcaaaagataaaggacataacagcagagctctcacagcatggccagatctcagagacaaatgtctataactggttccagaacaggcgggcacgatcgaaacggaagcaagctgctttaccaaataataatgcagaatctgaagctgaagcggatgaggagtccccaactgacaaaaaacccaaatcagataggccgcttcaccagaacatagccatgagagatcacaatagcgaaaggatctcggagatgcaccactttgacacggagcatgagcaaatccgtcgtatgatgtatgcatccaatgacagtagctcgcgatcgtcaggcagtttgggccagatgtccttctacgacaatgttatgtcaaatccaagaatcgatcatttccttggtaaggtggagagccccgggagcttcccccacatgcgatccggtgaaagctttgatatgtattgatgacgcggcaattctggattctggttactaggttcgttgcattagacaccatactgttttcccctgtaaaaagtgaagctggtaacttgccgttcattttgcttactgaaattgcgaagtttgccttacgtccacacgttggttatcatggtcttgtcgacattctacggagaatagctagttctagtgtaaacctgttctgttgctgaattagctgcaagaagccgataaatagcactctgcacacttaggtgttaggtgattgtgtggatatttcttgatggtgagtttgtaacgatcttctttcactttgtcctgaaggctgaatcgatcagcgctacaaatgagttagtagttttaaaggttgctcttgtccg

SEQ ID NO: 18179 - DNA, 1914 bp, Oryza sativa
  ref <308>: DATABASE ACCESSION NUMBER: AK068586
  ref <309>: DATABASE ENTRY DATE: 2001-12-06
gggtactagttgaaaattacatgctcagacaaaaacaaaccagaaacgatttattcacatacatagctcgaaatgttcaaattttgaatgaagcaagtagttgtttctcgatatttttcccccttgactgtccagaagttgcttacatataaaagcacaagaacacattctgattcatacaaagcagccgcacagcgtgcagcagaagcatcgttcgaatccaaccgatggcgaagccgacggtggtgttgctgcccgtgtggggcgccggccacttcatgcccatgatcgaggccggcaagcggctgctccgcggcagcggcggcgcgctgtcggtcaccgtgctcctcatgccggcgccgacgccggatgcggcggtcgacatcgcggcccaggtgaagcgcgaggaggcctccggcgccgacgacatcagcttccggcacctccccgccgtcgacatgccgaccgtccacaccggcatcgaggagtgggtctccctcatactgcggagccacgggccccacgtgagggccgccatcgccgggctcgattgccccgtggccgcgctcgtcaccgacatcttctgcacgccggcgctcgacgtggccgccgagctcggcgtgccgtcctacgtgtacttcacctccggcgccgtcatgctggagctgctgctgtactcgccggtgctcgacgaggaggtgcccggcgaattctcggagatggatggcgcgctgaacattcccgggctgccgccggtgccgccgtccgtgctcccggcgacgatgcttcacaagaagaagatgtcgacatacaggtggttcctcgaaaccgggaggtgctacatgaaggccaccggcttcatcgtcaacacggcggcggagctcgagcagagcgtcatcgacgccatcgccgacggccggtgcacgcgcggggtgcccgcgccgacggtgtacgcgatcggcccggtgatcgcgctcaccccgccgccggagcagccgcacgagtgcgtgcggtggctggacgcgcagcccccggcgtccgtgctgctcgtctgcttcggcagcaagggcctcctgccgccgcccaaggtgcgggagatagccgccacgctggagcggagcgagcaccgcttcctgtgggtgctgcgcggcccgcccaaggacagccggccggggcaacgggtgcccacggacgccatgctcgacgagctcctccccgaggggttcttggacaagaccaaggggagggggctcgtgtggccgacgcgggcgccgcagaaggacatcctcgcccacgccgccgtgggcgggttcgtgacgcactgcgggtggaactccatcctcgagagcctctggttcggcgtgccgatgctgccatggccgctcgacaacgagcagcacgcgaacgcgttcctgctggtgtccgtcctgggcgtcgccgtgccgctgcggctggaccgggagcgggacaacttcgtggaggcggcggagctggagcgtgcggtgagcaccctgctgggcggcggggacggcgaggcggggaggaaggcgagggagaaggccgtggccgtgaaggcggcgtgccggaaggccgtcgagaagggcgggtcgtctgacgccgcgttccagaggctcgccgaggaaatccggcgaggtgccgttaatgtcccgaagaagcgaaactgaaaggactgaaaatccgtcgactgacgactgtgcagtgcagagctggccaaaatcgaaacgcccatgcggctttgcgtgactgcgtctacacgtcgacatgtgtacgttttaaaatgcacgggttagagattctatctatcgactatacgtgtacgtctgtactggcgtttaatatgtgtgtatatgcatatctgttcattgttcaataataaatctttcaaaacaagcc

SEQ ID NO: 18180 - DNA, 1098 bp, Oryza sativa
  ref <308>: DATABASE ACCESSION NUMBER: AK068587
  ref <309>: DATABASE ENTRY DATE: 2001-12-06
gggcggctctgcctctgcagcagcaaccacatctccggcggcggcggcgactccggcgatcccccgtcggcttcctctctccgtagtctctccggcggcgtcggcaggagctccccccctccccccatcacatgggggcttccgagtctatcctctccaggccgcagcagcagcggcggccgccgtgggcggacgagatcacgacggtgtccgagggccggcgcgacgccggggacggagaccccctcctccaccgcatcaagtccctcaccatcgccccgccgctgttgagcggccagtcggcggcgagctcggaggcggagagcagcctcaccgacatcctcgtccggaagccatcctcctcctccgccacctctggcaacttgaatccaaatgtgatgttcgagcttttctctctgtaccgtgaatggcaagaagagaaggccaagaaaattagtgaaacacaggaagagatagaaaacaagatagaaacagcagatgctttgtccattaagcttctccagcggttcaattattctgttacttccatgagatcaacctctcacaaccttgctgaagtccgtccactgcaggtggaagttggtgagttgaagggcaggttaaccgaagtaataagtaactgtgatgcattgtgcaagagaattgccgctgaaggtccagaaagtctgcgatcgtctgttcaacctttcaccactagtaaaatggagccaagagagagcgaaacacttgatctgaaaacacagtcctgaattgcacacaatctgtctgatactctgattggtacgccatcaaaggcatcagaaggaactacactgacatttcctaattccaaagggtagctgcaccatgccccctgtgtagtgtgtaccctctctgtacatccatactatggcagtatggttagacgtcagatcttctcagctcttattgcaacattcgtccatcttttgtaaagctaaactgttcatgtacacagatctgtacaaccaaatattaacatcagaagtgcatgatttaggttcagttgcttgtcttcactgcatatatacagtaacaagagcgtgtgtctgtctgatt

SEQ ID NO: 18181 - DNA, 1381 bp, Oryza sativa
  ref <308>: DATABASE ACCESSION NUMBER: AK068588
  ref <309>: DATABASE ENTRY DATE: 2001-12-06
gaattccctcctcctccctcctacaaccccaatcccccttcttcttcttcttcttgtacttgttgttcttgctcttgttccagtgttgcagcagcagcagcagcagcggaggcgcaagaagacgagctagagagagagaatcagaggagagcttgggtgagatgggtgagtgcagaggaggaggaggaggaggagatgggctgatcaagctgttcgggaagacgatcccggtgcagccggatgccaaggatgttcagcagcatagtggcagtagcagcagctcaaccgaatccgacgtccaagaaaccgccgctgtcgccgtcgccgacccctccccgcggtcggaggtcgtcgacggcgagagcccgccgcagccgggcggcgaggcggcgagccatcagcagcagcagaaggagatgaagctgaagaagccggacaagatcctgccatgcccgcggtgcagcagcatggacaccaagttctgctacttcaacaactacaacgtcaaccagcctcgccacttctgcaagcactgccagcgctactggaccgccggcggcgccatgcgcaacgtccccgtcggcgccggcgtactggggctgcatgattccacctcctggagcttggagcctcccatggccggccacagtccagtctcaggccatctcatcatcatcaccacctacaagtgctacaccttcagtctcctccttcacactaggcaagcatcccagagagggtggtgatcatgaggcaagagatcaccatggcaatggtaaagtgtgggtgccgaagacgatccggatcgacaacgccgacgaggttgcccggagctcaatccggtcactcttcgccttcagaggcggcgacaaggcggatgataacaacgacgacgatggcaccggcgtgcacaagctcgccaccacggtgttcgagccaaagagggacagcaagacggcgaaacatccggcgatcacgagcttgccgctcttgcacaccaaccccgtcgcgcttacccgatccgcgaccttccaggagggatcttgaaggccatcttgcaagatttttttttttttgccttcatcctctctgctgcttctgaactgaacacgaagttagtagcctgacagtgctgatttttttgtgaatcagacagagtatttgtatactaggggtatttgggggaagtgtatgacatagctacttgtggagatatagttgtaaccataggtagcatgtaaatactatttagaaaatagctgtttaaatggatatagctagtatttgggtttggagccaggagataagtaaggcccctggttttgtagataaataagaatcaattagatggaatatatggcttgaggtatttcatttcttc

SEQ ID NO: 18182 - DNA, 1720 bp, Oryza sativa
  ref <308>: DATABASE ACCESSION NUMBER: AK068589
  ref <309>: DATABASE ENTRY DATE: 2001-12-06
gaatttacacccaaacacaaaaaattagcagcacgcagccgccttcccaatcctctcctcttctccaagcggcaattcgcgcgaggttttctccgatcaaaccctcgaatccccccctcgcgaatccatcggagggtagccccgcgatccgcgtcggcgagagcggattccgattccgcgatggagcgggtgttctccgtggaggagatctccgacccattctgggtcccgcctccgccgccgcagtcggcggcggcggcccagcagcagggcggcggcggcgtggcttcgggaggtggtggtggtgtagcggggggcggcggcggcgggaacgcgatgaaccggtgcccgtcggagtggtacttccagaagtttctggaggaggcggtgctcgatagccccgtcccgaaccctagcccgagggccgaagcgggagggatcaggggcgcaggaggggtggtgccggtcgatgttaagcagccgcagctctcggcggcggcggcggcggcggcgacgacgagcgcggtggtggaccccgtggagtacaacgcgatgctgaagcagaagctggagaaggacctcgccgcggtcgccatgtggagggcctctggcacagttccacctgagcgtcctggagctggttcatccttgctgaatgcagatgtttcacacataggcgctcctaattccatcggaggcaatgctactccagttcaaaacatgctaagtggcccaagtgggggatcgggctcacagttggtacagaatgttgatgtccttgtaaagcagcccaccagctcttcatcaagggagcagtcagatgatgatgacatggagggagaagctgagaccactggaactgcaagacctgctgatcaaagattacaacgaaggaagcaatccaatcgggagtcagccaggcgctcaagaagcagaaaggcagctcacttgaatgagctggaggcacaggtatcgcaattaagagtcgagaactcctcgctgttaaggcgtcttgctgatgttaaccagaagtacaatgatgctgctgttgacaatagagtgctaaaagcagatgttgagaccttgagagcaaaggtgaagatggcagaggactcggtgaagcgggtgacaggcatgaacgcgttgtttcccgccgcttctgatatgtcatccctcagcatgccattcaacagctccccatctgaagcaacgtcagacgctgctgttcccatccaagatgacccgaacaattacttcgctactaacaacgacatcggaggtaacaacaactacatgcccgacataccttcttcggctcaggaggacgaggacttcgtcaatggcgctctggctgccggcaagattggccggacagcctcgctgcagcgggtggcgagcctggagcatatccagaagaggatgtgcggtgggccggcttcgtctgggtcgacgtcctgagaccgaaacccagagctgcttcggttctgaaagacactgcgagcaggaaatgatgattggacaggcgtagacattgctaatgctgtgaggttgatgattgttggtcgtcgtcgtcgtcattgtgcattctttgtaagggacacctcttagtaccctcttcttctaagggacttagtaccccttgtggatctcatcgtcctaaatactatacacattagccaaatgttcattggtgtgatggcgtcgtccctaatttgaacgg
